United States Patent Application Publication US 2007/0214517 A1 - sequence listing, part 37

SEQ ID NO: 43257 - protein, 330 aa, Arabidopsis thaliana
  peptide (1)..(330): Ceres Seq. ID no. 12324756
  misc_feature (19)..(244): Homolog of NCBI NO: 34909060 NR Description: P0702B09.33 [Oryza sativa (japonica
  misc_feature (19)..(60): Homolog of NCBI NO: 7459607 NR Description: hypothetical protein At2g41170 [imported] -
  misc_feature (268)..(311): Homolog of NCBI NO: 7459607 NR Description: hypothetical protein At2g41170 [imported] -
  misc_feature (113)..(266): Homolog of NCBI NO: 7459607 NR Description: hypothetical protein At2g41170 [imported] -
  misc_feature (17)..(330): Homolog of NCBI NO: 30688559 NR Description: F-box protein family [Arabidopsis thaliana]
  misc_feature (20)..(330): Homolog of NCBI NO: 34903372 NR Description: unnamed protein product [Oryza sativa (japonica
  misc_feature (19)..(245): Homolog of NCBI NO: 7487431 NR Description: hypothetical protein At2g32560 [imported] -
  misc_feature (270)..(330): Homolog of NCBI NO: 15225802 NR Description: unknown protein; protein id: At2g26850.1
  misc_feature (1)..(244): Homolog of NCBI NO: 15225802 NR Description: unknown protein; protein id: At2g26850.1
  misc_feature (1)..(330): Homolog of NCBI NO: 30685347 NR Description: F-box protein family [Arabidopsis thaliana]
MNTLHQTKHDPASPVIDQMSVLDLPELALDCILDLLPPSGLCSMARVCSSLRERCVSDHLWEKHLKTKWGKILGPAAHREWQCYISSSTYHLDSPHHQTGNLGFAKIISLIRSLSSVFREDKQRRGYASSLPLDSSMSCYLSLETGRFWFPAQVYNRENGHVGFMLSCYDAELSYDTHTDTFQARYPPHGRRASAIEKGVTWDRIRAAPIDASPHLLHVSDSLKELKPGDHIEIQWRRNKEFPYGWWYGLVRHLESCDGDHNHCHCHLSETVVLEFNQYTVGSRWRRTMIMRDHKEEGNEEDGFYGGIRKLNCKEEIAMWKRHWPCSILE

SEQ ID NO: 43258 - protein, 312 aa, Arabidopsis thaliana
  peptide (1)..(312): Ceres Seq. ID no. 12324757
  misc_feature (1)..(226): Homolog of NCBI NO: 34909060 NR Description: P0702B09.33 [Oryza sativa (japonica
  misc_feature (1)..(42): Homolog of NCBI NO: 7459607 NR Description: hypothetical protein At2g41170 [imported] -
  misc_feature (250)..(293): Homolog of NCBI NO: 7459607 NR Description: hypothetical protein At2g41170 [imported] -
  misc_feature (95)..(248): Homolog of NCBI NO: 7459607 NR Description: hypothetical protein At2g41170 [imported] -
  misc_feature (1)..(312): Homolog of NCBI NO: 30688559 NR Description: F-box protein family [Arabidopsis thaliana]
  misc_feature (2)..(312): Homolog of NCBI NO: 34903372 NR Description: unnamed protein product [Oryza sativa (japonica
  misc_feature (1)..(227): Homolog of NCBI NO: 7487431 NR Description: hypothetical protein At2g32560 [imported] -
  misc_feature (252)..(312): Homolog of NCBI NO: 15225802 NR Description: unknown protein; protein id: At2g26850.1
  misc_feature (1)..(226): Homolog of NCBI NO: 15225802 NR Description: unknown protein; protein id: At2g26850.1
  misc_feature (1)..(312): Homolog of NCBI NO: 30685347 NR Description: F-box protein family [Arabidopsis thaliana]
MSVLDLPELALDCILDLLPPSGLCSMARVCSSLRERCVSDHLWEKHLKTKWGKILGPAAHREWQCYISSSTYHLDSPHHQTGNLGFAKIISLIRSLSSVFREDKQRRGYASSLPLDSSMSCYLSLETGRFWFPAQVYNRENGHVGFMLSCYDAELSYDTHTDTFQARYPPHGRRASAIEKGVTWDRIRAAPIDASPHLLHVSDSLKELKPGDHIEIQWRRNKEFPYGWWYGLVRHLESCDGDHNHCHCHLSETVVLEFNQYTVGSRWRRTMIMRDHKEEGNEEDGFYGGIRKLNCKEEIAMWKRHWPCSILE

SEQ ID NO: 43259 - DNA, 1190 bp, Arabidopsis thaliana
  misc_feature (1)..(1190): Ceres Seq. ID no. 12651668
  misc_feature: MA Experiment ID: 108577 Result: Down-regulated in Transcription
  misc_feature: MA Experiment 108577 PARAMETER Experiment Name: At_42deg_Heat_cDNA_P Parameter: Temperature (deg C) Value: 42 vs. 22
  misc_feature: MA Experiment 108577 PARAMETER Experiment Name: At_42deg_Heat_cDNA_P Parameter: Timepoint (hr) Value: 6
  misc_feature: MA Experiment 108577 PARAMETER Experiment Name: At_42deg_Heat_cDNA_P Parameter: Tissue Value: Aerial
  misc_feature: MA Experiment ID: 20000794 Result: Up-regulated in Transcription
  misc_feature: MA Experiment 20000794 PARAMETER Experiment Name: At_Petals_P Parameter: Age (day) Value: 23-25 days
  misc_feature: MA Experiment 20000794 PARAMETER Experiment Name: At_Petals_P Parameter: Plant Line Value: WS
  misc_feature: MA Experiment 20000794 PARAMETER Experiment Name: At_Petals_P Parameter: Tissue Value: Petals vs. Whole plant
  misc_feature: Phenotype: WHOLE PLANT Color-Dark Green
  misc_feature: Phenotype: WHOLE PLANT Size-Large
  misc_feature: Phenotype: INFLORESCENCE Height-Tall
  misc_feature: Phenotype: FERTILITY Fertility-Reduced
  misc_feature: Phenotype: INFLORESCENCE Height-Tall
  misc_feature: Phenotype: INFLORESCENCE Other
  misc_feature: Phenotype: WHOLE PLANT Size-Large
  misc_feature: Phenotype: INFLORESCENCE Height-Tall
  misc_feature: Phenotype: WHOLE PLANT Size-Large
  misc_feature: Phenotype: INFLORESCENCE Height-Tall
gaaatcctagctgaagtctatgctccataatcaaatccagttcatcagagatcaaagatggctattgcacgaactggagtttatgttgatgattaccttgagtagctacaaagattactaaacacagttcgcgaactagacgagagatctcaatcgcttataaatcagacaagacagcaaactaagtattgcttagggcttgcttcacagagttctaaaaagggtaatggtaatcattacaataatggtggtcttgatgaagaggaaacgattgagaaaatgcgtaaagagattgagtctagtcaggaaaatgcgttaagtttgtgtaccgagaaggttttattggcccgacaagcgtatgatcttatagatagtcatgtaaaacgacttgatgaagatctgaataattttgcagaagatttaaagcaagagggaaaaattccaccagacgagccctctgttcttcctccactacctatagttcctaaagcggaaaagcgtaagtccttctatggcacacctcagcccaagaagattgattatagagatagagactgggatcgtgacagggattttgagctcatgcctcctccaggaagcaatcggaaagaccttatgccaattgaagagcagccaatcgatccaaacgaaccaacttactgtgtctgccatcaggtgtcctttggagacatgattgcctgtgacaatgagaattgccaaggaggtgaatggtttcactatacatgcgttggcctcacacctgagaccagattcaaagggaaatggtactgccccacctgcagactcctcccacagtcacactaatatcatttgtacctgtgagaaggtgccactggcatcttctttggcaccttcccttcatgaccaatgccaccaaactcatctttcttgttacccaacatctagcaagtgcaagtagaagcaaactttagatggagaaatcatcatgttttgtaaacctcgggttaattcgtggagcatatattttgtatatcaattgtatttgggtattggtgggcattttccgttttattctactagtatcgatatttacatctgcttctttctttcttttttcccctcaaaccatgagcctttgtattgatcaaatgacatgtacaaaggttttgttcatcagaaggaatttcactaaaataaaaaattgcttg

SEQ ID NO: 43260 - protein, 181 aa, Arabidopsis thaliana
  peptide (1)..(181): Ceres Seq. ID no. 12651669
  misc_feature (127)..(177): Pfam Name: PHD-finger Pfam Description: PHD-finger
  misc_feature (119)..(180): Homolog of NCBI NO: 18404002 NR Description: PHD-finger protein, putative
  misc_feature (1)..(51): Homolog of NCBI NO: 18404002 NR Description: PHD-finger protein, putative
  misc_feature (115)..(174): Homolog of NCBI NO: 19921252 NR Description: CG9293-PA [Drosophila melanogaster]
  misc_feature (1)..(51): Homolog of NCBI NO: 19921252 NR Description: CG9293-PA [Drosophila melanogaster]
  misc_feature (79)..(174): Homolog of NCBI NO: 24584112 NR Description: CG9293-PB [Drosophila melanogaster]
  misc_feature (1)..(51): Homolog of NCBI NO: 24584112 NR Description: CG9293-PB [Drosophila melanogaster]
  misc_feature (1)..(145): Homolog of NCBI NO: 18087670 NR Description: putative growth inhibitory protein [Oryza sativa]
  misc_feature (1)..(181): Homolog of NCBI NO: 21553698 NR Description: putative growth inhibitory protein [Arabidopsis
  misc_feature (1)..(181): Homolog of NCBI NO: 25405727 NR Description: hypothetical protein F20D21.22 [imported] -
  misc_feature (1)..(145): Homolog of NCBI NO: 30695729 NR Description: expressed protein [Arabidopsis thaliana]
MRKEIESSQENALSLCTEKVLLARQAYDLIDSHVKRLDEDLNNFAEDLKQEGKIPPDEPSVLPPLPIVPKAEKRKSFYGTPQPKKIDYRDRDWDRDRDFELMPPPGSNRKDLMPIEEQPIDPNEPTYCVCHQVSFGDMIACDNENCQGGEWFHYTCVGLTPETRFKGKWYCPTCRLLPQSH

SEQ ID NO: 43261 - DNA, 1883 bp, Arabidopsis thaliana; identical to SEQ ID NO: 27101
  misc_feature (1)..(1883): Ceres Seq. ID no. 12482898
  misc_feature: MA Experiment ID: 20000179 Result: Up-regulated in Transcription
  misc_feature: MA Experiment 20000179 PARAMETER Experiment Name: At_Germinating_Seeds_P Parameter: Age (hr) Value: 6 vs. 0
  misc_feature: MA Experiment 20000179 PARAMETER Experiment Name: At_Germinating_Seeds_P Parameter: Tissue Value: Germinating Seeds
  misc_feature: MA Experiment ID: 20001556 Result: Down-regulated in Transcription
  misc_feature: MA Experiment 20001556 PARAMETER Experiment Name: At_Drought_Soil_Dry_P Parameter: Age (day) Value: 26
  misc_feature: MA Experiment 20001556 PARAMETER Experiment Name: At_Drought_Soil_Dry_P Parameter: Organism Value: A. thaliana
  misc_feature: MA Experiment 20001556 PARAMETER Experiment Name: At_Drought_Soil_Dry_P Parameter: Plant Line Value: WS
  misc_feature: MA Experiment 20001556 PARAMETER Experiment Name: At_Drought_Soil_Dry_P Parameter: Post Timepoint (hr) Value: None
  misc_feature: MA Experiment 20001556 PARAMETER Experiment Name: At_Drought_Soil_Dry_P Parameter: Post-Treatment Value: None
  misc_feature: MA Experiment 20001556 PARAMETER Experiment Name: At_Drought_Soil_Dry_P Parameter: Timepoint (day) Value: 12
  misc_feature: MA Experiment 20001556 PARAMETER Experiment Name: At_Drought_Soil_Dry_P Parameter: Treatment Value: Drought vs. No Drought

SEQ ID NO: 43262 - protein, 543 aa, Arabidopsis thaliana; identical to SEQ ID NO: 27102
  peptide (1)..(543): Ceres Seq. ID no. 12482899
  misc_feature (223)..(421): Pfam Name: Monooxygenase Pfam Description: Monooxygenase
  misc_feature (223)..(421): Pfam Name: Monooxygenase Pfam Description: Monooxygenase
  misc_feature (22)..(535): Homolog of NCBI NO: 15227757 NR Description: squalene monooxygenase (squalene epoxidase)(SE),
  misc_feature (24)..(536): Homolog of NCBI NO: 21537043 NR Description: squalene epoxidase-like protein [Arabidopsis
  misc_feature (24)..(536): Homolog of NCBI NO: 18420113 NR Description: squalene monooxygenase (squalene epoxidase)(SE),
  misc_feature (40)..(535): Homolog of NCBI NO: 27311240 NR Description: Putative Squalene monooxygenase
  misc_feature (24)..(537): Homolog of NCBI NO: 6685403 NR Description: Squalene monooxygenase (Squalene epoxidase) (SE)
  misc_feature (22)..(535): Homolog of NCBI NO: 15227757 NR Description: squalene monooxygenase (squalene epoxidase)(SE),
  misc_feature (24)..(536): Homolog of NCBI NO: 18420113 NR Description: squalene monooxygenase (squalene epoxidase)(SE),
  misc_feature (24)..(537): Homolog of NCBI NO: 6685403 NR Description: Squalene monooxygenase (Squalene epoxidase) (SE)
  misc_feature (13)..(543): Homolog of NCBI NO: 18406296 NR Description: squalene monooxygenase, putative; protein id:
  misc_feature (13)..(543): Homolog of NCBI NO: 25404216 NR Description: probable squalene monooxygenase F9K23.3
  misc_feature (17)..(537): Homolog of NCBI NO: 27475610 NR Description: squalene monooxygenase 2 [Medicago truncatula]
  misc_feature (26)..(535): Homolog of NCBI NO: 27475612 NR Description: squalene monooxygenase 1 [Medicago truncatula]
  misc_feature (69)..(543): Homolog of NCBI NO: 27311241 NR Description: Putative Squalene monooxygenase
  misc_feature (40)..(535): Homolog of NCBI NO: 27311240 NR Description: Putative Squalene monooxygenase
  misc_feature (24)..(536): Homolog of NCBI NO: 21537043 NR Description: squalene epoxidase-like protein [Arabidopsis
  misc_feature (69)..(543): Homolog of NCBI NO: 27311241 NR Description: Putative Squalene monooxygenase
  misc_feature (26)..(535): Homolog of NCBI NO: 27475612 NR Description: squalene monooxygenase 1 [Medicago truncatula]
  misc_feature (17)..(537): Homolog of NCBI NO: 27475610 NR Description: squalene monooxygenase 2 [Medicago truncatula]
  misc_feature (13)..(543): Homolog of NCBI NO: 25404216 NR Description: probable squalene monooxygenase F9K23.3
  misc_feature (13)..(543): Homolog of NCBI NO: 18406296 NR Description: squalene monooxygenase, putative; protein id:

SEQ ID NO: 43263 - protein, 531 aa, Arabidopsis thaliana; identical to SEQ ID NO: 27103
  peptide (1)..(531): Ceres Seq. ID no. 12482900
  misc_feature (211)..(409): Pfam Name: Monooxygenase Pfam Description: Monooxygenase
  misc_feature (211)..(409): Pfam Name: Monooxygenase Pfam Description: Monooxygenase
  misc_feature (10)..(523): Homolog of NCBI NO: 15227757 NR Description: squalene monooxygenase (squalene epoxidase)(SE),
  misc_feature (12)..(524): Homolog of NCBI NO: 21537043 NR Description: squalene epoxidase-like protein [Arabidopsis
  misc_feature (12)..(524): Homolog of NCBI NO: 18420113 NR Description: squalene monooxygenase (squalene epoxidase)(SE),
  misc_feature (28)..(523): Homolog of NCBI NO: 27311240 NR Description: Putative Squalene monooxygenase
  misc_feature (12)..(525): Homolog of NCBI NO: 6685403 NR Description: Squalene monooxygenase (Squalene epoxidase) (SE)
  misc_feature (10)..(523): Homolog of NCBI NO: 15227757 NR Description: squalene monooxygenase (squalene epoxidase)(SE),
  misc_feature (12)..(524): Homolog of NCBI NO: 18420113 NR Description: squalene monooxygenase (squalene epoxidase)(SE),
  misc_feature (12)..(525): Homolog of NCBI NO: 6685403 NR Description: Squalene monooxygenase (Squalene epoxidase) (SE)
  misc_feature (1)..(531): Homolog of NCBI NO: 18406296 NR Description: squalene monooxygenase, putative; protein id:
  misc_feature (1)..(531): Homolog of NCBI NO: 25404216 NR Description: probable squalene monooxygenase F9K23.3
  misc_feature (5)..(525): Homolog of NCBI NO: 27475610 NR Description: squalene monooxygenase 2 [Medicago truncatula]
  misc_feature (14)..(523): Homolog of NCBI NO: 27475612 NR Description: squalene monooxygenase 1 [Medicago truncatula]
  misc_feature (57)..(531): Homolog of NCBI NO: 27311241 NR Description: Putative Squalene monooxygenase
  misc_feature (28)..(523): Homolog of NCBI NO: 27311240 NR Description: Putative Squalene monooxygenase
  misc_feature (12)..(524): Homolog of NCBI NO: 21537043 NR Description: squalene epoxidase-like protein [Arabidopsis
  misc_feature (57)..(531): Homolog of NCBI NO: 27311241 NR Description: Putative Squalene monooxygenase
  misc_feature (14)..(523): Homolog of NCBI NO: 27475612 NR Description: squalene monooxygenase 1 [Medicago truncatula]
  misc_feature (5)..(525): Homolog of NCBI NO: 27475610 NR Description: squalene monooxygenase 2 [Medicago truncatula]
  misc_feature (1)..(531): Homolog of NCBI NO: 25404216 NR Description: probable squalene monooxygenase F9K23.3
  misc_feature (1)..(531): Homolog of NCBI NO: 18406296 NR Description: squalene monooxygenase, putative; protein id:

SEQ ID NO: 43264 - protein, 364 aa, Arabidopsis thaliana; identical to SEQ ID NO: 27104
  peptide (1)..(364): Ceres Seq. ID no. 12482901
  misc_feature (44)..(242): Pfam Name: Monooxygenase Pfam Description: Monooxygenase
  misc_feature (44)..(242): Pfam Name: Monooxygenase Pfam Description: Monooxygenase
  misc_feature (1)..(356): Homolog of NCBI NO: 15227757 NR Description: squalene monooxygenase (squalene epoxidase)(SE),
  misc_feature (1)..(357): Homolog of NCBI NO: 21537043 NR Description: squalene epoxidase-like protein [Arabidopsis
  misc_feature (1)..(357): Homolog of NCBI NO: 18420113 NR Description: squalene monooxygenase (squalene epoxidase)(SE),
  misc_feature (1)..(356): Homolog of NCBI NO: 27311240 NR Description: Putative Squalene monooxygenase
  misc_feature (1)..(358): Homolog of NCBI NO: 6685403 NR Description: Squalene monooxygenase (Squalene epoxidase) (SE)
  misc_feature (1)..(356): Homolog of NCBI NO: 15227757 NR Description: squalene monooxygenase (squalene epoxidase)(SE),
  misc_feature (1)..(357): Homolog of NCBI NO: 18420113 NR Description: squalene monooxygenase (squalene epoxidase)(SE),
  misc_feature (1)..(358): Homolog of NCBI NO: 6685403 NR Description: Squalene monooxygenase (Squalene epoxidase) (SE)
  misc_feature (1)..(364): Homolog of NCBI NO: 18406296 NR Description: squalene monooxygenase, putative; protein id:
  misc_feature (1)..(364): Homolog of NCBI NO: 25404216 NR Description: probable squalene monooxygenase F9K23.3
  misc_feature (1)..(358): Homolog of NCBI NO: 27475610 NR Description: squalene monooxygenase 2 [Medicago truncatula]
  misc_feature (1)..(356): Homolog of NCBI NO: 27475612 NR Description: squalene monooxygenase 1 [Medicago truncatula]
  misc_feature (1)..(364): Homolog of NCBI NO: 27311241 NR Description: Putative Squalene monooxygenase
  misc_feature (1)..(356): Homolog of NCBI NO: 27311240 NR Description: Putative Squalene monooxygenase
  misc_feature (1)..(357): Homolog of NCBI NO: 21537043 NR Description: squalene epoxidase-like protein [Arabidopsis
  misc_feature (1)..(364): Homolog of NCBI NO: 27311241 NR Description: Putative Squalene monooxygenase
  misc_feature (1)..(356): Homolog of NCBI NO: 27475612 NR Description: squalene monooxygenase 1 [Medicago truncatula]
  misc_feature (1)..(358): Homolog of NCBI NO: 27475610 NR Description: squalene monooxygenase 2 [Medicago truncatula]
  misc_feature (1)..(364): Homolog of NCBI NO: 25404216 NR Description: probable squalene monooxygenase F9K23.3
  misc_feature (1)..(364): Homolog of NCBI NO: 18406296 NR Description: squalene monooxygenase, putative; protein id:

SEQ ID NO: 43265 - DNA, 1902 bp, Arabidopsis thaliana
  misc_feature (1)..(1902): Ceres Seq. ID no. 12336522
  misc_feature: MA Experiment ID: 108462 Result: Down-regulated in Transcription
  misc_feature: MA Experiment 108462 PARAMETER Experiment Name: At_Germinating_Seeds_cDNA_P Parameter: Age (day) Value: 2 vs. 0
  misc_feature: MA Experiment 108462 PARAMETER Experiment Name: At_Germinating_Seeds_cDNA_P Parameter: Tissue Value: Germinating Seeds
atcgaaattttggattcgaacgtgtggatcgctggaaaaattaaactttagggtcgctagattacgattgcttcgctttttagtagtagtaggctacaatcgattggcaaacatctctatatcggccataactccgtcaagctctgcagaggctgcttcatcagtattgagagacttcctggtgattgattctcatgtctatgtctgagtttggcattgtctacgccatccatatcatcaccgtccaattcggctccgtcgtctcgaaagtttgtgaatgtcttctacgtaaaggacctctttcctcacgagacatctctcgtttagctgaatcagatatcaaccataacaaagttaaagatattctctatctcttgattcagcacaattgtgttcaagctttctccattgaacctcctgatggttctgagagcaaagctattgtacagtatattgtgttgtttaacaacattctgcatcgtgtgaggtataacaagttttcgaggattgtaaacgaagaacttgactccaagtgcggtgcagttcttgatggtttacttagtaacggtaggcttaccttgggacagtttattgaaagagatagagattcaggaaatacgataggttctgaagcaatcagagattctcttcagaaattggttgctgcccgttttgttgagcgcattccttctcccgaacctgttcttggaaacaaagaaaaagagccggcaaagagaagaggcgctaaagctgccaagattcttaaagaaccagaaaccttggaggaacaagttgttgaagcagcaactccagttgacgcaataaggtttccacttatattcgaagaagattccaattcatctttagcagatgacaatagcaacatcactgaggggaagcgtaaacaacgtgatgtggacacatcagattcgagcagtggagtaatttggcgtcctaattttgaggagttcatccaccgccttagacataaggcgtgtgtggagatagtgaaagagcgccgggatgaaggatgtgccattgtcttgagggcaatgttagaagtaggaagatcgcaagagaagaaggtgaaaacagacaattcggctccaatgtcagttggttccatttatgaagaagttattaagacagaagcaggtcgcactatgttacaagagcgagttgaagcatgccttgaccaattgagtgctacgtcttcttatctaccagcatttgtgaacgaagtgaatgattcatacatagttgattataaatccattatcagcgtagcacagaaagatgagatagaggcagtagtgatgagaagatatgggaaagaagctttcagaatgttcagatacttatcacaggaagggcgttttgttgagaccgataagattgctgatgccgcgctgactgaaaagaaagatacaccgcaattccttttaaagatgtggaaagacggatacttacatatgcagaaattggcggtcacagctccgggtatgtatacaccgtttctgttgtggaaggtaaacaagttgattgtgacaactcaaatgttggatgagatgtaccatgcgtcccttaacttgagtcttaggttggcccatgagttagaagccgaaaaagagttgctgttgttgccattagataaactggaaggaccattaaaggagagactgaaaaaggtcaaagccaagaggctgttactctcttccactatgtttaaacttgatgatgccattatgctttttcatgacttttaaactcatacattcaaaaactaatttcttttggtcgatttagttcacattgtcttctagcattttttttttttttttgacataatgagaagttgtaactttgaaggtaattgatactgtttcgagagaaatgttgttt

SEQ ID NO: 43266 - protein, 523 aa, Arabidopsis thaliana
  peptide (1)..(523): Ceres Seq. ID no. 12336523
  misc_feature (10)..(523): Pfam Name: RNA polymerase III subunit RPC82 Pfam Description: RNA polymerase III subunit RPC82
  misc_feature (357)..(466): Homolog of NCBI NO: 34911154 NR Description: putative RNA polymerase III subunit
  misc_feature (75)..(327): Homolog of NCBI NO: 34911154 NR Description: putative RNA polymerase III subunit
  misc_feature (3)..(523): Homolog of NCBI NO: 11358814 NR Description: RNA polymerase III subunit-like protein -
  misc_feature (3)..(523): Homolog of NCBI NO: 21553700 NR Description: RNA polymerase III subunit-like protein
  misc_feature (1)..(523): Homolog of NCBI NO: 18408755 NR Description: RNA polymerase III subunit - like protein
MSMSEFGIVYAIHIITVQFGSVVSKVCECLLRKGPLSSRDISRLAESDINHNKVKDILYLLIQHNCVQAFSIEPPDGSESKAIVQYIVLFNNILHRVRYNKFSRIVNEELDSKCGAVLDGLLSNGRLTLGQFIERDRDSGNTIGSEAIRDSLQKLVAARFVERIPSPEPVLGNKEKEPAKRRGAKAAKILKEPETLEEQVVEAATPVDAIRFPLIFEEDSNSSLADDNSNITEGKRKQRDVDTSDSSSGVIWRPNFEEFIHRLRHKACVEIVKERRDEGCAIVLRAMLEVGRSQEKKVKTDNSAPMSVGSIYEEVIKTEAGRTMLQERVEACLDQLSATSSYLPAFVNEVNDSYIVDYKSIISVAQKDEIEAVVMRRYGKEAFRMFRYLSQEGRFVETDKIADAALTEKKDTPQFLLKMWKDGYLHMQKLAVTAPGMYTPFLLWKVNKLIVTTQMLDEMYHASLNLSLRLAHELEAEKELLLLPLDKLEGPLKERLKKVKAKRLLLSSTMFKLDDAIMLFHDF

SEQ ID NO: 43267 - protein, 521 aa, Arabidopsis thaliana
  peptide (1)..(521): Ceres Seq. ID no. 12336524
  misc_feature (8)..(521): Pfam Name: RNA polymerase III subunit RPC82 Pfam Description: RNA polymerase III subunit RPC82
  misc_feature (355)..(464): Homolog of NCBI NO: 34911154 NR Description: putative RNA polymerase III subunit
  misc_feature (73)..(325): Homolog of NCBI NO: 34911154 NR Description: putative RNA polymerase III subunit
  misc_feature (1)..(521): Homolog of NCBI NO: 11358814 NR Description: RNA polymerase III subunit-like protein -
  misc_feature (1)..(521): Homolog of NCBI NO: 21553700 NR Description: RNA polymerase III subunit-like protein
  misc_feature (1)..(521): Homolog of NCBI NO: 18408755 NR Description: RNA polymerase III subunit - like protein
MSEFGIVYAIHIITVQFGSVVSKVCECLLRKGPLSSRDISRLAESDINHNKVKDILYLLIQHNCVQAFSIEPPDGSESKAIVQYIVLFNNILHRVRYNKFSRIVNEELDSKCGAVLDGLLSNGRLTLGQFIERDRDSGNTIGSEAIRDSLQKLVAARFVERIPSPEPVLGNKEKEPAKRRGAKAAKILKEPETLEEQVVEAATPVDAIRFPLIFEEDSNSSLADDNSNITEGKRKQRDVDTSDSSSGVIWRPNFEEFIHRLRHKACVEIVKERRDEGCAIVLRAMLEVGRSQEKKVKTDNSAPMSVGSIYEEVIKTEAGRTMLQERVEACLDQLSATSSYLPAFVNEVNDSYIVDYKSIISVAQKDEIEAVVMRRYGKEAFRMFRYLSQEGRFVETDKIADAALTEKKDTPQFLLKMWKDGYLHMQKLAVTAPGMYTPFLLWKVNKLIVTTQMLDEMYHASLNLSLRLAHELEAEKELLLLPLDKLEGPLKERLKKVKAKRLLLSSTMFKLDDAIMLFHDF

SEQ ID NO: 43268 - DNA, 1504 bp, Arabidopsis thaliana; identical to SEQ ID NO: 38423
  misc_feature (1)..(1504): Ceres Seq. ID no. 13592972
  misc_feature: MA Experiment ID: 20001451 Result: Down-regulated in Transcription
  misc_feature: MA Experiment 20001451 PARAMETER Experiment Name: At_Far-red-induction_P Parameter: Age (day) Value: 7
  misc_feature: MA Experiment 20001451 PARAMETER Experiment Name: At_Far-red-induction_P Parameter: Light Value: Far-red vs. White
  misc_feature: MA Experiment 20001451 PARAMETER Experiment Name: At_Far-red-induction_P Parameter: Organism Value: A. thaliana
  misc_feature: MA Experiment 20001451 PARAMETER Experiment Name: At_Far-red-induction_P Parameter: Plant Line Value: Columbia
  misc_feature: MA Experiment 20001451 PARAMETER Experiment Name: At_Far-red-induction_P Parameter: Timepoint (hr) Value: 24
  misc_feature: MA Experiment 20001451 PARAMETER Experiment Name: At_Far-red-induction_P Parameter: Tissue Value: Whole Plant

SEQ ID NO: 43269 - protein, 191 aa, Arabidopsis thaliana; identical to SEQ ID NO: 38424
  peptide (1)..(191): Ceres Seq. ID no. 13592973
  misc_feature (89)..(191): Homolog of NCBI NO: 11281187 NR Description: hypothetical protein F18O21.170 - Arabidopsis
  misc_feature (22)..(183): Homolog of NCBI NO: 40538927 NR Description: expressed protein [Oryza sativa (japonica
  misc_feature (1)..(191): Homolog of NCBI NO: 30694398 NR Description: expressed protein [Arabidopsis thaliana]
  misc_feature (89)..(191): Homolog of NCBI NO: 11281187 NR Description: hypothetical protein F18O21.170 - Arabidopsis
  misc_feature (22)..(183): Homolog of NCBI NO: 40538927 NR Description: expressed protein [Oryza sativa (japonica
  misc_feature (1)..(191): Homolog of NCBI NO: 30694398 NR Description: expressed protein [Arabidopsis thaliana]

SEQ ID NO: 43270 - protein, 103 aa, Arabidopsis thaliana; identical to SEQ ID NO: 38425
  peptide (1)..(103): Ceres Seq. ID no. 13592974
  misc_feature (1)..(103): Homolog of NCBI NO: 11281187 NR Description: hypothetical protein F18O21.170 - Arabidopsis
  misc_feature (1)..(95): Homolog of NCBI NO: 40538927 NR Description: expressed protein [Oryza sativa (japonica
  misc_feature (1)..(103): Homolog of NCBI NO: 30694398 NR Description: expressed protein [Arabidopsis thaliana]
  misc_feature (1)..(103): Homolog of NCBI NO: 11281187 NR Description: hypothetical protein F18O21.170 - Arabidopsis
  misc_feature (1)..(95): Homolog of NCBI NO: 40538927 NR Description: expressed protein [Oryza sativa (japonica
  misc_feature (1)..(103): Homolog of NCBI NO: 30694398 NR Description: expressed protein [Arabidopsis thaliana]

SEQ ID NO: 43271 - DNA, 1634 bp, Arabidopsis thaliana
  misc_feature (1)..(1634): Ceres Seq. ID no. 12421792
  misc_feature: MA Experiment ID: 108561 Result: Up-regulated in Transcription
  misc_feature: MA Experiment 108561 PARAMETER Experiment Name: At_100uM_ABA_cDNA_P Parameter: Timepoint (hr) Value: 6
  misc_feature: MA Experiment 108561 PARAMETER Experiment Name: At_100uM_ABA_cDNA_P Parameter: Tissue Value: Aerial
  misc_feature: MA Experiment 108561 PARAMETER Experiment Name: At_100uM_ABA_cDNA_P Parameter: Treatment Value: 100uM ABA vs. No Treatment
  misc_feature: MA Experiment ID: 108569 Result: Up-regulated in Transcription
  misc_feature: MA Experiment 108569 PARAMETER Experiment Name: At_0.001%_MeJA__cDNA_P Parameter: Timepoint (hr) Value: 6
  misc_feature: MA Experiment 108569 PARAMETER Experiment Name: At_0.001%_MeJA__cDNA_P Parameter: Tissue Value: Aerial
  misc_feature: MA Experiment 108569 PARAMETER Experiment Name: At_0.001%_MeJA__cDNA_P Parameter: Treatment Value: 0.001% MeJA vs. No Treatment
  misc_feature: MA Experiment ID: 108572 Result: Up-regulated in Transcription
  misc_feature: MA Experiment 108572 PARAMETER Experiment Name: At_Drought_cDNA_P Parameter: Timepoint (hr) Value: 1
  misc_feature: MA Experiment 108572 PARAMETER Experiment Name: At_Drought_cDNA_P Parameter: Tissue Value: Aerial
  misc_feature: MA Experiment 108572 PARAMETER Experiment Name: At_Drought_cDNA_P Parameter: Treatment Value: Drought vs. No Drought
  misc_feature: MA Experiment ID: 108573 Result: Up-regulated in Transcription
  misc_feature: MA Experiment 108573 PARAMETER Experiment Name: At_Drought_cDNA_P Parameter: Timepoint (hr) Value: 6
  misc_feature: MA Experiment 108573 PARAMETER Experiment Name: At_Drought_cDNA_P Parameter: Tissue Value: Aerial
  misc_feature: MA Experiment 108573 PARAMETER Experiment Name: At_Drought_cDNA_P Parameter: Treatment Value: Drought vs. No Drought
  misc_feature: MA Experiment ID: 108574 Result: Up-regulated in Transcription
  misc_feature: MA Experiment 108574 PARAMETER Experiment Name: At_Wounding__cDNA_P Parameter: Timepoint (hr) Value: 1
  misc_feature: MA Experiment 108574 PARAMETER Experiment Name: At_Wounding__cDNA_P Parameter: Tissue Value: Aerial
  misc_feature: MA Experiment 108574 PARAMETER Experiment Name: At_Wounding__cDNA_P Parameter: Treatment Value: Wounding vs. No Wounding
  misc_feature: MA Experiment ID: 20000071 Result: Up-regulated in Transcription
  misc_feature: MA Experiment 20000071 PARAMETER Experiment Name: At_100uM_ABA_Mutants_cDNA_P Parameter: Plant Line Value: CS8104
  misc_feature: MA Experiment 20000071 PARAMETER Experiment Name: At_100uM_ABA_Mutants_cDNA_P Parameter: Timepoint (hr) Value: 6
  misc_feature: MA Experiment 20000071 PARAMETER Experiment Name: At_100uM_ABA_Mutants_cDNA_P Parameter: Tissue Value: Aerial
  misc_feature: MA Experiment 20000071 PARAMETER Experiment Name: At_100uM_ABA_Mutants_cDNA_P Parameter: Treatment Value: 100uM ABA vs. No Treatment
  misc_feature: MA Experiment ID: 20000072 Result: Up-regulated in Transcription
  misc_feature: MA Experiment 20000072 PARAMETER Experiment Name: At_100uM_ABA_Mutants_cDNA_P Parameter: Plant Line Value: CS8105
  misc_feature: MA Experiment 20000072 PARAMETER Experiment Name: At_100uM_ABA_Mutants_cDNA_P Parameter: Timepoint (hr) Value: 6
  misc_feature: MA Experiment 20000072 PARAMETER Experiment Name: At_100uM_ABA_Mutants_cDNA_P Parameter: Tissue Value: Aerial
  misc_feature: MA Experiment 20000072 PARAMETER Experiment Name: At_100uM_ABA_Mutants_cDNA_P Parameter: Treatment Value: 100uM ABA vs. No Treatment
  misc_feature: MA Experiment ID: 20000086 Result: Up-regulated in Transcription
  misc_feature: MA Experiment 20000086 PARAMETER Experiment Name: At_100uM_ABA_Mutants_cDNA_P Parameter: Plant Line Value: CS22
  misc_feature: MA Experiment 20000086 PARAMETER Experiment Name: At_100uM_ABA_Mutants_cDNA_P Parameter: Timepoint (hr) Value: 6
  misc_feature: MA Experiment 20000086 PARAMETER Experiment Name: At_100uM_ABA_Mutants_cDNA_P Parameter: Tissue Value: Aerial
  misc_feature: MA Experiment 20000086 PARAMETER Experiment Name: At_100uM_ABA_Mutants_cDNA_P Parameter: Treatment Value: 100uM ABA vs. No Treatment
  misc_feature: MA Experiment ID: 20000087 Result: Up-regulated in Transcription
  misc_feature: MA Experiment 20000087 PARAMETER Experiment Name: At_100uM_ABA_Mutants_cDNA_P Parameter: Plant Line Value: WS
  misc_feature: MA Experiment 20000087 PARAMETER Experiment Name: At_100uM_ABA_Mutants_cDNA_P Parameter: Timepoint (hr) Value: 6
  misc_feature: MA Experiment 20000087 PARAMETER Experiment Name: At_100uM_ABA_Mutants_cDNA_P Parameter: Tissue Value: Aerial
  misc_feature: MA Experiment 20000087 PARAMETER Experiment Name: At_100uM_ABA_Mutants_cDNA_P Parameter: Treatment Value: 100uM ABA vs. No Treatment
  misc_feature: MA Experiment ID: 20000088 Result: Up-regulated in Transcription
  misc_feature: MA Experiment 20000088 PARAMETER Experiment Name: At_100uM_ABA_Mutants_cDNA_P Parameter: Plant Line Value: Landsberg
  misc_feature: MA Experiment 20000088 PARAMETER Experiment Name: At_100uM_ABA_Mutants_cDNA_P Parameter: Timepoint (hr) Value: 6
  misc_feature: MA Experiment 20000088 PARAMETER Experiment Name: At_100uM_ABA_Mutants_cDNA_P Parameter: Tissue Value: Aerial
  misc_feature: MA Experiment 20000088 PARAMETER Experiment Name: At_100uM_ABA_Mutants_cDNA_P Parameter: Treatment Value: 100uM ABA vs. No Treatment
  misc_feature: MA Experiment ID: 20000314 Result: Down-regulated in Transcription
  misc_feature: MA Experiment 20000314 PARAMETER Experiment Name: At_14day_Shoots-Roots_Sub_P Parameter: Age (day) Value: 14
  misc_feature: MA Experiment 20000314 PARAMETER Experiment Name: At_14day_Shoots-Roots_Sub_P Parameter: Organism Value: A. thaliana
  misc_feature: MA Experiment 20000314 PARAMETER Experiment Name: At_14day_Shoots-Roots_Sub_P Parameter: Plant Line Value: WS
  misc_feature: MA Experiment 20000314 PARAMETER Experiment Name: At_14day_Shoots-Roots_Sub_P Parameter: Tissue Value: Roots vs. Whole Plant
  misc_feature: MA Experiment ID: 20000315 Result: Down-regulated in Transcription
  misc_feature: MA Experiment 20000315 PARAMETER Experiment Name: At_14day_Shoots-Roots_Sub_P Parameter: Age (day) Value: 14
  misc_feature: MA Experiment 20000315 PARAMETER Experiment Name: At_14day_Shoots-Roots_Sub_P Parameter: Organism Value: A. thaliana
  misc_feature: MA Experiment 20000315 PARAMETER Experiment Name: At_14day_Shoots-Roots_Sub_P Parameter: Plant Line Value: WS
  misc_feature: MA Experiment 20000315 PARAMETER Experiment Name: At_14day_Shoots-Roots_Sub_P Parameter: Tissue Value: Shoots vs. Whole Plant
  misc_feature: MA Experiment ID: 20000328 Result: Down-regulated in Transcription
  misc_feature: MA Experiment 20000328 PARAMETER Experiment Name: At_42deg_Heat_Sub_P Parameter: Age (day) Value: 14
  misc_feature: MA Experiment 20000328 PARAMETER Experiment Name: At_42deg_Heat_Sub_P Parameter: Organism Value: A. thaliana
  misc_feature: MA Experiment 20000328 PARAMETER Experiment Name: At_42deg_Heat_Sub_P Parameter: Plant Line Value: WS
  misc_feature: MA Experiment 20000328 PARAMETER Experiment Name: At_42deg_Heat_Sub_P Parameter: Temperature (deg C) Value: 42 vs. 22
  misc_feature: MA Experiment 20000328 PARAMETER Experiment Name: At_42deg_Heat_Sub_P Parameter: Timepoint (hr) Value: 6
  misc_feature: MA Experiment 20000328 PARAMETER Experiment Name: At_42deg_Heat_Sub_P Parameter: Tissue Value: Aerial
  misc_feature: MA Experiment ID: 20000348 Result: Up-regulated in Transcription
  misc_feature: MA Experiment 20000348 PARAMETER Experiment Name: At_100uM_ABA_Sub_P Parameter: Age (day) Value: 14
  misc_feature: MA Experiment 20000348 PARAMETER Experiment Name: At_100uM_ABA_Sub_P Parameter: Organism Value: A. thaliana
  misc_feature: MA Experiment 20000348 PARAMETER Experiment Name: At_100uM_ABA_Sub_P Parameter: Plant Line Value: WS
  misc_feature: MA Experiment 20000348 PARAMETER Experiment Name: At_100uM_ABA_Sub_P Parameter: Timepoint (hr) Value: 1
  misc_feature: MA Experiment 20000348 PARAMETER Experiment Name: At_100uM_ABA_Sub_P Parameter: Tissue Value: Aerial
  misc_feature: MA Experiment 20000348 PARAMETER Experiment Name: At_100uM_ABA_Sub_P Parameter: Treatment Value: 100uM ABA vs. No Treatment
  misc_feature: MA Experiment ID: 20000349 Result: Up-regulated in Transcription
  misc_feature: MA Experiment 20000349 PARAMETER Experiment Name: At_100uM_ABA_Sub_P Parameter: Age (day) Value: 14
  misc_feature: MA Experiment 20000349 PARAMETER Experiment Name: At_100uM_ABA_Sub_P Parameter: Organism Value: A. thaliana
  misc_feature: MA Experiment 20000349 PARAMETER Experiment Name: At_100uM_ABA_Sub_P Parameter: Plant Line Value: WS
  misc_feature: MA Experiment 20000349 PARAMETER Experiment Name: At_100uM_ABA_Sub_P Parameter: Timepoint (hr) Value: 6
  misc_feature: MA Experiment 20000349 PARAMETER Experiment Name: At_100uM_ABA_Sub_P Parameter: Tissue Value: Aerial
  misc_feature: MA Experiment 20000349 PARAMETER Experiment Name: At_100uM_ABA_Sub_P Parameter: Treatment Value: 100uM ABA vs. No Treatment
  misc_feature: MA Experiment ID: 20000352 Result: Up-regulated in Transcription
  misc_feature: MA Experiment 20000352 PARAMETER Experiment Name: At_Drought_Sub_P Parameter: Age (day) Value: 7
  misc_feature: MA Experiment 20000352 PARAMETER Experiment Name: At_Drought_Sub_P Parameter: Organism Value: A. thaliana
  misc_feature: MA Experiment 20000352 PARAMETER Experiment Name: At_Drought_Sub_P Parameter: Plant Line Value: WS
  misc_feature: MA Experiment 20000352 PARAMETER Experiment Name: At_Drought_Sub_P Parameter: Timepoint (hr) Value: 6
  misc_feature: MA Experiment 20000352 PARAMETER Experiment Name: At_Drought_Sub_P Parameter: Tissue Value: Whole Plant
  misc_feature: MA Experiment 20000352 PARAMETER Experiment Name: At_Drought_Sub_P Parameter: Treatment Value: Drought vs. No Drought
  misc_feature: MA Experiment ID: 20000355 Result: Down-regulated in Transcription
  misc_feature: MA Experiment 20000355 PARAMETER Experiment Name: At_Siliques_Sub_P Parameter: Age (day) Value: 21
  misc_feature: MA Experiment 20000355 PARAMETER Experiment Name: At_Siliques_Sub_P Parameter: Organism Value: A. thaliana
  misc_feature: MA Experiment 20000355 PARAMETER Experiment Name: At_Siliques_Sub_P Parameter: Plant Line Value: WS
  misc_feature: MA Experiment 20000355 PARAMETER Experiment Name: At_Siliques_Sub_P Parameter: Tissue Value: Less Than 5mm Siliques vs. Whole Plant
acccaaaaacaaaatctaatagagaaaaataagtagatatggcaacccttaagtgcattgattggcaattcagcggaagcgaggcggccaaagatgctgctgcggcctccttaggctcatatacctctgcactctatgccctgtgcgatcctcatggcaaacccattttgcccccacgaaatgagatcctggagaccagcaatacagccgaaaaagcagttgttaaagctgttctttatggctcgggaaacgcctatgctcctagcttaggcctcgcggccgccaaaagtgccgtagcagagtatctaaaccaaggtcttccaaagaagcttaccgcagatgacgtgtttatgactctgggatgcaaacaagctattgagctcgcggtagacattctcgctaaaccgaaagccaacgttttgcttccgagtcccggcttcccatgggacctagtccgctccatctacaagaaccttgaggtccgccactataatttccttccagaaaagaactttgaaatcgactttgatagcgtccgagcgctcgtggacgagaacacatttgccatatttataatcaacccccacaaccccaatggtaacacctactccgaggctcatctcaaacagctggctgaactggctaaggaactcaagattatggtggtttctgacgaggtttttagatggacactctttggtagtaacccttttgttcctatgggaaaattctcgtcgatcgtaccagtggttacactcggatccatatcaaagggatggaaagtcccaggatggcgaactggttggctcacgctacatgatctagacggtgtcttcagaaacaccaaggtcttacaagctgctcaagattttctccagataaacaataaccctccgacagttatccaggcggctattcctgacatcttggagaaaactcctcaagagttttttgataagaggcagagttttctgaaagataaagtagaatttggttattctaagctcaagtacattcctagcctcacttgctacatgaaacccgaagcctgcaccttcttatggaccgagcttgatttatcgagctttgtggacatcgaagacgatcaagacttttgcaataagcttgctaaagaagaaaacctcgtcgttttaccagggattgcattcagtcagaagaactggttgaggcattctatcgatatggagactccggtattggaggatgcattggaaagattgaagagcttctgcgatcgccattccaacaaaaaagctcccctcaaagacgtcaatggtgttaagtaaagggtcaatatggttatttgcctaagtcatttacgtatgctataatgataaataaatgagtgtttcttggtttgaggtaaatcatgaacactttagtgtatttgtaacaaataaaatgggtgcacttaatatcaatcgtgtgtaatgttttctcatagtttgctatatctttgtgtatatctatctacttttcggaaataaaatagattgtctgcatttaccattggaatacatatacatatatacatctcttaactacttcaaaatactttggacttgtcgtgtcgtgtatttttagaaaaattatgaagaaacccagttttacct

SEQ ID NO: 43272 - protein, 422 aa, Arabidopsis thaliana
  peptide (1)..(422): Ceres Seq. ID no. 12421793
  misc_feature (88)..(405): Pfam Name: Aminotransferase class I and II Pfam Description: Aminotransferase class I and II
  misc_feature (9)..(416): Homolog of NCBI NO: 15224631 NR Description: putative tyrosine aminotransferase
  misc_feature (1)..(411): Homolog of NCBI NO: 15809874 NR Description: At2g20610/F23N11.7 [Arabidopsis thaliana]
  misc_feature (1)..(411): Homolog of NCBI NO: 15225387 NR Description: putative tyrosine aminotransferase
  misc_feature (9)..(411): Homolog of NCBI NO: 11527943 NR Description: ROOTY/SUPERROOT1 [Arabidopsis thaliana]
  misc_feature (9)..(411): Homolog of NCBI NO: 11527941 NR Description: ROOTY/SUPERROOT1 [Arabidopsis thaliana]
  misc_feature (1)..(351): Homolog of NCBI NO: 7488405 NR Description: tyrosine transaminase homolog F9D16.60 -
  misc_feature (105)..(422): Homolog of NCBI NO: 30686253 NR Description: aminotransferase family [Arabidopsis thaliana]
  misc_feature (1)..(421): Homolog of NCBI NO: 22328891 NR Description: tyrosine transaminase like protein
  misc_feature (1)..(421): Homolog of NCBI NO: 28192642 NR Description: cystine lyase BOCL-3 [Brassica oleracea]
  misc_feature (1)..(422): Homolog of NCBI NO: 15236533 NR Description: tyrosine transaminase like protein
MATLKCIDWQFSGSEAAKDAAAASLGSYTSALYALCDPHGKPILPPRNEILETSNTAEKAVVKAVLYGSGNAYAPSLGLAAAKSAVAEYLNQGLPKKLTADDVFMTLGCKQAIELAVDILAKPKANVLLPSPGFPWDLVRSIYKNLEVRHYNFLPEKNFEIDFDSVRALVDENTFAIFIINPHNPNGNTYSEAHLKQLAELAKELKIMVVSDEVFRWTLFGSNPFVPMGKFSSIVPVVTLGSISKGWKVPGWRTGWLTLHDLDGVFRNTKVLQAAQDFLQINNNPPTVIQAAIPDILEKTPQEFFDKRQSFLKDKVEFGYSKLKYIPSLTCYMKPEACTFLWTELDLSSFVDIEDDQDFCNKLAKEENLVVLPGIAFSQKNWLRHSIDMETPVLEDALERLKSFCDRHSNKKAPLKDVNGVK

SEQ ID NO: 43273 - protein, 318 aa, Arabidopsis thaliana
  peptide (1)..(318): Ceres Seq. ID no. 12421794
  misc_feature (1)..(301): Pfam Name: Aminotransferase class I and II Pfam Description: Aminotransferase class I and II
  misc_feature (1)..(312): Homolog of NCBI NO: 15224631 NR Description: putative tyrosine aminotransferase
  misc_feature (1)..(307): Homolog of NCBI NO: 15809874 NR Description: At2g20610/F23N11.7 [Arabidopsis thaliana]
  misc_feature (1)..(307): Homolog of NCBI NO: 15225387 NR Description: putative tyrosine aminotransferase
  misc_feature (1)..(307): Homolog of NCBI NO: 11527943 NR Description: ROOTY/SUPERROOT1 [Arabidopsis thaliana]
  misc_feature (1)..(307): Homolog of NCBI NO: 11527941 NR Description: ROOTY/SUPERROOT1 [Arabidopsis thaliana]
  misc_feature (1)..(247): Homolog of NCBI NO: 7488405 NR Description: tyrosine transaminase homolog F9D16.60 -
  misc_feature (1)..(318): Homolog of NCBI NO: 30686253 NR Description: aminotransferase family [Arabidopsis thaliana]
  misc_feature (1)..(317): Homolog of NCBI NO: 22328891 NR Description: tyrosine transaminase like protein
  misc_feature (1)..(317): Homolog of NCBI NO: 28192642 NR Description: cystine lyase BOCL-3 [Brassica oleracea]
  misc_feature (1)..(318): Homolog of NCBI NO: 15236533 NR Description: tyrosine transaminase like protein
MTLGCKQAIELAVDILAKPKANVLLPSPGFPWDLVRSIYKNLEVRHYNFLPEKNFEIDFDSVRALVDENTFAIFIINPHNPNGNTYSEAHLKQLAELAKELKIMVVSDEVFRWTLFGSNPFVPMGKFSSIVPVVTLGSISKGWKVPGWRTGWLTLHDLDGVFRNTKVLQAAQDFLQINNNPPTVIQAAIPDILEKTPQEFFDKRQSFLKDKVEFGYSKLKYIPSLTCYMKPEACTFLWTELDLSSFVDIEDDQDFCNKLAKEENLVVLPGIAFSQKNWLRHSIDMETPVLEDALERLKSFCDRHSNKKAPLKDVNGVK

SEQ ID NO: 43274 - protein, 215 aa, Arabidopsis thaliana
  peptide (1)..(215): Ceres Seq. ID no. 12421795
  misc_feature (1)..(198): Pfam Name: Aminotransferase class I and II Pfam Description: Aminotransferase class I and II
  misc_feature (1)..(209): Homolog of NCBI NO: 15224631 NR Description: putative tyrosine aminotransferase
  misc_feature (1)..(204): Homolog of NCBI NO: 15809874 NR Description: At2g20610/F23N11.7 [Arabidopsis thaliana]
  misc_feature (1)..(204): Homolog of NCBI NO: 15225387 NR Description: putative tyrosine aminotransferase
  misc_feature (1)..(204): Homolog of NCBI NO: 11527943 NR Description: ROOTY/SUPERROOT1 [Arabidopsis thaliana]
  misc_feature (1)..(204): Homolog of NCBI NO: 11527941 NR Description: ROOTY/SUPERROOT1 [Arabidopsis thaliana]
  misc_feature (1)..(144): Homolog of NCBI NO: 7488405 NR Description: tyrosine transaminase homolog F9D16.60 -
  misc_feature (1)..(215): Homolog of NCBI NO: 30686253 NR Description: aminotransferase family [Arabidopsis thaliana]
  misc_feature (1)..(214): Homolog of NCBI NO: 22328891 NR Description: tyrosine transaminase like protein
  misc_feature (1)..(214): Homolog of NCBI NO: 28192642 NR Description: cystine lyase BOCL-3 [Brassica oleracea]
  misc_feature (1)..(215): Homolog of NCBI NO: 15236533 NR Description: tyrosine transaminase like protein
MVVSDEVFRWTLFGSNPFVPMGKFSSIVPVVTLGSISKGWKVPGWRTGWLTLHDLDGVFRNTKVLQAAQDFLQINNNPPTVIQAAIPDILEKTPQEFFDKRQSFLKDKVEFGYSKLKYIPSLTCYMKPEACTFLWTELDLSSFVDIEDDQDFCNKLAKEENLVVLPGIAFSQKNWLRHSIDMETPVLEDALERLKSFCDRHSNKKAPLKDVNGVK

SEQ ID NO: 43275 - DNA, 1798 bp, Arabidopsis thaliana
  misc_feature (1)..(1798): Ceres Seq. ID no. 13592818
  misc_feature: MA Experiment ID: 20000173 Result: Down-regulated in Transcription
  misc_feature: MA Experiment 20000173 PARAMETER Experiment Name: At_42deg_Heat_P Parameter: Age (day) Value: 14
  misc_feature: MA Experiment 20000173 PARAMETER Experiment Name: At_42deg_Heat_P Parameter: Organism Value: A. thaliana
  misc_feature: MA Experiment 20000173 PARAMETER Experiment Name: At_42deg_Heat_P Parameter: Plant Line Value: WS
  misc_feature: MA Experiment 20000173 PARAMETER Experiment Name: At_42deg_Heat_P Parameter: Temperature (deg C) Value: 42 vs. 22
  misc_feature: MA Experiment 20000173 PARAMETER Experiment Name: At_42deg_Heat_P Parameter: Timepoint (hr) Value: 6
  misc_feature: MA Experiment 20000173 PARAMETER Experiment Name: At_42deg_Heat_P Parameter: Tissue Value: Aerial
  misc_feature: MA Experiment ID: 20000184 Result: Down-regulated in Transcription
  misc_feature: MA Experiment 20000184 PARAMETER Experiment Name: At_Shoots__P Parameter: Age (day) Value: 7
  misc_feature: MA Experiment 20000184 PARAMETER Experiment Name: At_Shoots__P Parameter: Tissue Value: Shoots vs. Whole Plant
  misc_feature: MA Experiment ID: 20000185 Result: Up-regulated in Transcription
  misc_feature: MA Experiment 20000185 PARAMETER Experiment Name: At_Roots__P Parameter: Age (day) Value: 7 vs. 21
  misc_feature: MA Experiment 20000185 PARAMETER Experiment Name: At_Roots__P Parameter: Organism Value: A. thaliana
  misc_feature: MA Experiment 20000185 PARAMETER Experiment Name: At_Roots__P Parameter: Tissue Value: Roots vs. Whole Plant
  misc_feature: MA Experiment ID: 20000439 Result: Up-regulated in Transcription
  misc_feature: MA Experiment 20000439 PARAMETER Experiment Name: At_Roots__P Parameter: Age (day) Value: 14 vs. 21
  misc_feature: MA Experiment 20000439 PARAMETER Experiment Name: At_Roots__P Parameter: Organism Value: A. thaliana
  misc_feature: MA Experiment 20000439 PARAMETER Experiment Name: At_Roots__P Parameter: Tissue Value: Roots vs. Whole Plant
  misc_feature: MA Experiment ID: 20000495 Result: Up-regulated in Transcription
  misc_feature: MA Experiment 20000495 PARAMETER Experiment Name: At_Guard_Cells_P Parameter: Harvest Date Value: 8/2/2002
  misc_feature: MA Experiment 20000495 PARAMETER Experiment Name: At_Guard_Cells_P Parameter: Organism Value: A. thaliana
  misc_feature: MA Experiment 20000495 PARAMETER Experiment Name: At_Guard_Cells_P Parameter: Tissue Value: Guard Cells vs. Leaves
  misc_feature: MA Experiment ID: 20000794 Result: Up-regulated in Transcription
  misc_feature: MA Experiment 20000794 PARAMETER Experiment Name: At_Petals_P Parameter: Age (day) Value: 23-25 days
  misc_feature: MA Experiment 20000794 PARAMETER Experiment Name: At_Petals_P Parameter: Plant Line Value: WS
  misc_feature: MA Experiment 20000794 PARAMETER Experiment Name: At_Petals_P Parameter: Tissue Value: Petals vs. Whole plant
attcttttgagctaccgattttgccgttttcgtgcagtaatttcgagaaagcgtggaccatttctggattccaaagctgaagaagatccaaacattgtgaagatagaatccgtttactaatgttagaagcatcgaagaatgaaaatgtgctgcaagtgaaggaatgaaagtgcgttgtagttcttcgtatcacgactttggcgtgcatagactgtagatagatatcagataacaacctgtagtggaaatatgagaagacctagtcaaatgatgaggcttctattaacatcctttttcggtgttattgttggtttccttatgggtattacttttccaaccttgactttaactaagatgaatcttccatccacattgtttccctcgattgatcttgcatacattgaggataaatactctgacatatcaagacaaagactatttggttcttggtcttcgacaaaaggcctcaaactcaagaatgacatccctgaccctccatataactataatgacactaagatatgggtttcgactaacccccgtggtgctgagaggctaccaccagatatagtcacgcctgaatcagatttttacctccgtcgactgtggggcgaccctaatgaggatttaacagtcaagcagcggtatctagtaacatttacggttggctatgatcagaggaaaaatatagacactgtgttgaagaagttctcagataacttctctataatgctgtttcactacgatggccgggcagcgaatgggaagagtttgaatggtccaagcgagccattcatgtgagcattcggaaacaaacaaaatggtggtacgctaagcgatttcttcatcctgacatagttgccccctatgaatatatcttcatatgggatgaggatcttggcgtggaacactttgattcggaaaaatatctggcggtggtgaagaagcatggtttggaaatctcacagcctggattagagccatatgaagggctcacatgggagatgaccaagaaaagagacgacactgaagtccacaagcatgctgaggaaaggaatgggtggtgcactgatcccaatttacccccttgtgcagcgtttgtggagattatggctcctgttttctcccgcaaggcatggcgctgtgtgtcgcatatgattcagaacgatttgattcatggatggggtctggactttgccgttcggaaatgtgttcagaacgcacacgagaaaattggagttgtagatgctcaatggattatacatcaaggtgttccatcattagggaattaaggacaaccagagcaagggaaacaaccatgggaaggggtgagagaacgatgcaggagagagtggacaatgtttcaagacagattggatgatgctgaaaaagcttattttgaagcatctgctcacaagaatgcttcttcacggcctcacgggtaataaggaaacatatagtctctccctccgacttccactctctttgtttaccctgttaattttgttcccggagctgtgctttgatttcgtgtttatggaagagaatagtctggtcgagagaagataaattgttagcagctaagcacattcattaacatctgattagtctttcttttttcttttcttttcttaactctgttaactcttattgttgatgagaactccggtggagagtagagttagaggtagacaacaataaaaaaagggagattaactgtgatgggtaagaaattaggtgttattaccagaacacgacagaactttttttaattactgttatatttcgagtttttttt

SEQ ID NO: 43276 - protein, 183 aa, Arabidopsis thaliana
  peptide (1)..(183): Ceres Seq. ID no. 13592819
  misc_feature (90)..(170): Pfam Name: Protein of unknown function (DUF707) Pfam Description: Protein of unknown function (DUF707)
  misc_feature (1)..(170): Homolog of NCBI NO: 18404941 NR Description: expressed protein [Arabidopsis thaliana]
  misc_feature (1)..(71): Homolog of NCBI NO: 18390845 NR Description: storage protein -related [Arabidopsis thaliana]
  misc_feature (90)..(168): Homolog of NCBI NO: 18390845 NR Description: storage protein -related [Arabidopsis thaliana]
  misc_feature (1)..(175): Homolog of NCBI NO: 22329525 NR Description: expressed protein [Arabidopsis thaliana]
  misc_feature (1)..(170): Homolog of NCBI NO: 14719314 NR Description: putative protein [Oryza sativa]
  misc_feature (1)..(168): Homolog of NCBI NO: 34906848 NR Description: P0470A12.1 [Oryza sativa (japonica
  misc_feature (2)..(168): Homolog of NCBI NO: 18408876 NR Description: F12A21.2 [Arabidopsis thaliana]
  misc_feature (1)..(36): Homolog of NCBI NO: 7939519 NR Description: gb|AAD31054.1~gene_id:K1G2.18~strong similarity
  misc_feature (89)..(170): Homolog of NCBI NO: 7939519 NR Description: gb|AAD31054.1~gene_id:K1G2.18~strong similarity
  misc_feature (1)..(170): Homolog of NCBI NO: 22331371 NR Description: expressed protein [Arabidopsis thaliana]
MRRPSQMMRLLLTSFFGVIVGFLMGITFPTLTLTKMNLPSTLFPSIDLAYIEDKYSDISRQRLFGSWSSTKGLKLKNDIPDPPYNYNDTKIWVSTNPRGAERLPPDIVTPESDFYLRRLWGDPNEDLTVKQRYLVTFTVGYDQRKNIDTVLKKFSDNFSIMLFHYDGRAANGKSLNGPSEPFM

SEQ ID NO: 43277 - protein, 177 aa, Arabidopsis thaliana
  peptide (1)..(177): Ceres Seq. ID no. 13592820
  misc_feature (84)..(164): Pfam Name: Protein of unknown function (DUF707) Pfam Description: Protein of unknown function (DUF707)
  misc_feature (1)..(164): Homolog of NCBI NO: 18404941 NR Description: expressed protein [Arabidopsis thaliana]
  misc_feature (1)..(65): Homolog of NCBI NO: 18390845 NR Description: storage protein -related [Arabidopsis thaliana]
  misc_feature (84)..(162): Homolog of NCBI NO: 18390845 NR Description: storage protein -related [Arabidopsis thaliana]
  misc_feature (1)..(169): Homolog of NCBI NO: 22329525 NR Description: expressed protein [Arabidopsis thaliana]
  misc_feature (1)..(164): Homolog of NCBI NO: 14719314 NR Description: putative protein [Oryza sativa]
  misc_feature (1)..(162): Homolog of NCBI NO: 34906848 NR Description: P0470A12.1 [Oryza sativa (japonica
  misc_feature (1)..(162): Homolog of NCBI NO: 18408876 NR Description: F12A21.2 [Arabidopsis thaliana]
  misc_feature (1)..(30): Homolog of NCBI NO: 7939519 NR Description: gb|AAD31054.1~gene_id:K1G2.18~strong similarity
  misc_feature (83)..(164): Homolog of NCBI NO: 7939519 NR Description: gb|AAD31054.1~gene_id:K1G2.18~strong similarity
  misc_feature (1)..(164): Homolog of NCBI NO: 22331371 NR Description: expressed protein [Arabidopsis thaliana]
MMRLLLTSFFGVIVGFLMGITFPTLTLTKMNLPSTLFPSIDLAYIEDKYSDISRQRLFGSWSSTKGLKLKNDIPDPPYNYNDTKIWVSTNPRGAERLPPDIVTPESDFYLRRLWGDPNEDLTVKQRYLVTFTVGYDQRKNIDTVLKKFSDNFSIMLFHYDGRAANGKSLNGPSEPFM

SEQ ID NO: 43278 - protein, 176 aa, Arabidopsis thaliana
  peptide (1)..(176): Ceres Seq. ID no. 13592821
  misc_feature (83)..(163): Pfam Name: Protein of unknown function (DUF707) Pfam Description: Protein of unknown function (DUF707)
  misc_feature (1)..(163): Homolog of NCBI NO: 18404941 NR Description: expressed protein [Arabidopsis thaliana]
  misc_feature (1)..(64): Homolog of NCBI NO: 18390845 NR Description: storage protein -related [Arabidopsis thaliana]
  misc_feature (83)..(161): Homolog of NCBI NO: 18390845 NR Description: storage protein -related [Arabidopsis thaliana]
  misc_feature (1)..(168): Homolog of NCBI NO: 22329525 NR Description: expressed protein [Arabidopsis thaliana]
  misc_feature (1)..(163): Homolog of NCBI NO: 14719314 NR Description: putative protein [Oryza sativa]
  misc_feature (1)..(161): Homolog of NCBI NO: 34906848 NR Description: P0470A12.1 [Oryza sativa (japonica
  misc_feature (1)..(161): Homolog of NCBI NO: 18408876 NR Description: F12A21.2 [Arabidopsis thaliana]
  misc_feature (1)..(29): Homolog of NCBI NO: 7939519 NR Description: gb|AAD31054.1~gene_id:K1G2.18~strong similarity
  misc_feature (82)..(163): Homolog of NCBI NO: 7939519 NR Description: gb|AAD31054.1~gene_id:K1G2.18~strong similarity
  misc_feature (1)..(163): Homolog of NCBI NO: 22331371 NR Description: expressed protein [Arabidopsis thaliana]
MRLLLTSFFGVIVGFLMGITFPTLTLTKMNLPSTLFPSIDLAYIEDKYSDISRQRLFGSWSSTKGLKLKNDIPDPPYNYNDTKIWVSTNPRGAERLPPDIVTPESDFYLRRLWGDPNEDLTVKQRYLVTFTVGYDQRKNIDTVLKKFSDNFSIMLFHYDGRAANGKSLNGPSEPFM

SEQ ID NO: 43279 - DNA, 1145 bp, Arabidopsis thaliana
  misc_feature (1)..(1145): Ceres Seq. ID no. 12422505
  misc_feature: MA Experiment ID: 108434 Result: Down-regulated in Transcription
  misc_feature: MA Experiment 108434 PARAMETER Experiment Name: At_Root_Tips_cDNA_P Parameter: Tissue Value: Root Tips
  misc_feature: MA Experiment ID: 108435 Result: Down-regulated in Transcription
  misc_feature: MA Experiment 108435 PARAMETER Experiment Name: At_stm_Mutants_cDNA_P Parameter: Plant Line Value: wt Landsburg vs stm
  misc_feature: MA Experiment 108435 PARAMETER Experiment Name: At_stm_Mutants_cDNA_P Parameter: Tissue Value: Shoot Apical Meristem Region
  misc_feature: MA Experiment ID: 108572 Result: Up-regulated in Transcription
  misc_feature: MA Experiment 108572 PARAMETER Experiment Name: At_Drought_cDNA_P Parameter: Timepoint (hr) Value: 1
  misc_feature: MA Experiment 108572 PARAMETER Experiment Name: At_Drought_cDNA_P Parameter: Tissue Value: Aerial
  misc_feature: MA Experiment 108572 PARAMETER Experiment Name: At_Drought_cDNA_P Parameter: Treatment Value: Drought vs. No Drought
  misc_feature: MA Experiment ID: 108573 Result: Up-regulated in Transcription
  misc_feature: MA Experiment 108573 PARAMETER Experiment Name: At_Drought_cDNA_P Parameter: Timepoint (hr) Value: 6
  misc_feature: MA Experiment 108573 PARAMETER Experiment Name: At_Drought_cDNA_P Parameter: Tissue Value: Aerial
  misc_feature: MA Experiment 108573 PARAMETER Experiment Name: At_Drought_cDNA_P Parameter: Treatment Value: Drought vs. No Drought
  misc_feature: MA Experiment ID: 108574 Result: Down-regulated in Transcription
  misc_feature: MA Experiment 108574 PARAMETER Experiment Name: At_Wounding__cDNA_P Parameter: Timepoint (hr) Value: 1
  misc_feature: MA Experiment 108574 PARAMETER Experiment Name: At_Wounding__cDNA_P Parameter: Tissue Value: Aerial
  misc_feature: MA Experiment 108574 PARAMETER Experiment Name: At_Wounding__cDNA_P Parameter: Treatment Value: Wounding vs. No Wounding
  misc_feature: MA Experiment ID: 108577 Result: Down-regulated in Transcription
  misc_feature: MA Experiment 108577 PARAMETER Experiment Name: At_42deg_Heat_cDNA_P Parameter: Temperature (deg C) Value: 42 vs. 22
  misc_feature: MA Experiment 108577 PARAMETER Experiment Name: At_42deg_Heat_cDNA_P Parameter: Timepoint (hr) Value: 6
  misc_feature: MA Experiment 108577 PARAMETER Experiment Name: At_42deg_Heat_cDNA_P Parameter: Tissue Value: Aerial
  misc_feature: MA Experiment ID: 108579 Result: Down-regulated in Transcription
  misc_feature: MA Experiment 108579 PARAMETER Experiment Name: At_4deg_Cold_cDNA_P Parameter: Temperature (deg C) Value: 4 vs. 22
  misc_feature: MA Experiment 108579 PARAMETER Experiment Name: At_4deg_Cold_cDNA_P Parameter: Timepoint (hr) Value: 6
  misc_feature: MA Experiment 108579 PARAMETER Experiment Name: At_4deg_Cold_cDNA_P Parameter: Tissue Value: Aerial
  misc_feature: MA Experiment ID: 108594 Result: Down-regulated in Transcription
  misc_feature: MA Experiment 108594 PARAMETER Experiment Name: At_Ler-rhl_Root_cDNA_P Parameter: Plant Line Value: null
  misc_feature: MA Experiment ID: 108605 Result: Up-regulated in Transcription
  misc_feature: MA Experiment 108605 PARAMETER Experiment Name: At_100uM_ABA_cDNA_P Parameter: Timepoint (hr) Value: 6
  misc_feature: MA Experiment 108605 PARAMETER Experiment Name: At_100uM_ABA_cDNA_P Parameter: Tissue Value: Aerial
  misc_feature: MA Experiment 108605 PARAMETER Experiment Name: At_100uM_ABA_cDNA_P Parameter: Treatment Value: 100uM ABA vs. No Treatment
  misc_feature: MA Experiment ID: 20000069 Result: Up-regulated in Transcription
  misc_feature: MA Experiment 20000069 PARAMETER Experiment Name: At_100uM_ABA_Mutants_cDNA_P Parameter: Plant Line Value: CS23
  misc_feature: MA Experiment 20000069 PARAMETER Experiment Name: At_100uM_ABA_Mutants_cDNA_P Parameter: Timepoint (hr) Value: 6
  misc_feature: MA Experiment 20000069 PARAMETER Experiment Name: At_100uM_ABA_Mutants_cDNA_P Parameter: Tissue Value: Aerial
  misc_feature: MA Experiment 20000069 PARAMETER Experiment Name: At_100uM_ABA_Mutants_cDNA_P Parameter: Treatment Value: 100uM ABA vs. No Treatment
  misc_feature: MA Experiment ID: 20000070 Result: Up-regulated in Transcription
  misc_feature: MA Experiment 20000070 PARAMETER Experiment Name: At_100uM_ABA_Mutants_cDNA_P Parameter: Plant Line Value: CS24
  misc_feature: MA Experiment 20000070 PARAMETER Experiment Name: At_100uM_ABA_Mutants_cDNA_P Parameter: Timepoint (hr) Value: 6
  misc_feature: MA Experiment 20000070 PARAMETER Experiment Name: At_100uM_ABA_Mutants_cDNA_P Parameter: Tissue Value: Aerial
  misc_feature: MA Experiment 20000070 PARAMETER Experiment Name: At_100uM_ABA_Mutants_cDNA_P Parameter: Treatment Value: 100uM ABA vs. No Treatment
  misc_feature: MA Experiment ID: 20000071 Result: Up-regulated in Transcription
  misc_feature: MA Experiment 20000071 PARAMETER Experiment Name: At_100uM_ABA_Mutants_cDNA_P Parameter: Plant Line Value: CS8104
  misc_feature: MA Experiment 20000071 PARAMETER Experiment Name: At_100uM_ABA_Mutants_cDNA_P Parameter: Timepoint (hr) Value: 6
  misc_feature: MA Experiment 20000071 PARAMETER Experiment Name: At_100uM_ABA_Mutants_cDNA_P Parameter: Tissue Value: Aerial
  misc_feature: MA Experiment 20000071 PARAMETER Experiment Name: At_100uM_ABA_Mutants_cDNA_P Parameter: Treatment Value: 100uM ABA vs. No Treatment
  misc_feature: MA Experiment ID: 20000086 Result: Up-regulated in Transcription
  misc_feature: MA Experiment 20000086 PARAMETER Experiment Name: At_100uM_ABA_Mutants_cDNA_P Parameter: Plant Line Value: CS22
  misc_feature: MA Experiment 20000086 PARAMETER Experiment Name: At_100uM_ABA_Mutants_cDNA_P Parameter: Timepoint (hr) Value: 6
  misc_feature: MA Experiment 20000086 PARAMETER Experiment Name: At_100uM_ABA_Mutants_cDNA_P Parameter: Tissue Value: Aerial
  misc_feature: MA Experiment 20000086 PARAMETER Experiment Name: At_100uM_ABA_Mutants_cDNA_P Parameter: Treatment Value: 100uM ABA vs. No Treatment
  misc_feature: MA Experiment ID: 20000087 Result: Up-regulated in Transcription
  misc_feature: MA Experiment 20000087 PARAMETER Experiment Name: At_100uM_ABA_Mutants_cDNA_P Parameter: Plant Line Value: WS
  misc_feature: MA Experiment 20000087 PARAMETER Experiment Name: At_100uM_ABA_Mutants_cDNA_P Parameter: Timepoint (hr) Value: 6
  misc_feature: MA Experiment 20000087 PARAMETER Experiment Name: At_100uM_ABA_Mutants_cDNA_P Parameter: Tissue Value: Aerial
  misc_feature: MA Experiment 20000087 PARAMETER Experiment Name: At_100uM_ABA_Mutants_cDNA_P Parameter: Treatment Value: 100uM ABA vs. No Treatment
  misc_feature: MA Experiment ID: 20000088 Result: Up-regulated in Transcription
  misc_feature: MA Experiment 20000088 PARAMETER Experiment Name: At_100uM_ABA_Mutants_cDNA_P Parameter: Plant Line Value: Landsberg
  misc_feature: MA Experiment 20000088 PARAMETER Experiment Name: At_100uM_ABA_Mutants_cDNA_P Parameter: Timepoint (hr) Value: 6
  misc_feature: MA Experiment 20000088 PARAMETER Experiment Name: At_100uM_ABA_Mutants_cDNA_P Parameter: Tissue Value: Aerial
  misc_feature: MA Experiment 20000088 PARAMETER Experiment Name: At_100uM_ABA_Mutants_cDNA_P Parameter: Treatment Value: 100uM ABA vs. No Treatment
  misc_feature: MA Experiment ID: 20000089 Result: Up-regulated in Transcription
  misc_feature: MA Experiment ID: 20000090 Result: Up-regulated in Transcription
  misc_feature: MA Experiment ID: 20000117 Result: Up-regulated in Transcription
  misc_feature: MA Experiment 20000117 PARAMETER Experiment Name: At_100uM_ABA_Mutants_cDNA_P Parameter: Plant Line Value: Columbia
  misc_feature: MA Experiment 20000117 PARAMETER Experiment Name: At_100uM_ABA_Mutants_cDNA_P Parameter: Timepoint (hr) Value: 6
  misc_feature: MA Experiment 20000117 PARAMETER Experiment Name: At_100uM_ABA_Mutants_cDNA_P Parameter: Tissue Value: Aerial
  misc_feature: MA Experiment 20000117 PARAMETER Experiment Name: At_100uM_ABA_Mutants_cDNA_P Parameter: Treatment Value: 100uM ABA vs. No Treatment
  misc_feature: MA Experiment ID: 20000224 Result: Down-regulated in Transcription
aattgcaaatcaaatggatcgtcttaagctttatttctccgttttcgttttgtctttctttatcgtctcggtttcgtcgtctgatgtcaacgacggcgatgatctcgtgatccgtcaggtggttggtggagccgagcctcaggttttgacctcagaggatcacttttctctcttcaagcggaagttcgggaaggtctacgcttccaacgaggagcatgactatagattctcggtttgagttccgtaagaagcacttgggggttagaagtggctttaagcttcctaaagatgccaacaaggctccgattctccctaccgaaaatctccctgaggattttgattggagagatcatggcgccgttactcccgtcaaaaatcagggatcttgcggctcttgctggagtttcagcgccactggagctttggaaggtgctaacttcctcgctaccggcagactcgtcagcctcagcgaacaacagctcgtcgactgtgatcacgagtgtgatcccgaggaggcagattcctgcgactctggttgcaatggtgggctaatgaacagcgcttttgaatacaccctcaaaaccggagggctcatgaaagaagaagactatccttacaccggaaaggacggcaagacctgcaagctagacaagtccaagatcgttgcctctgtctccaacttcagtgttatctccattgatgaagaacagattgctgcaaaccttgtcaagaacggacctcttgctgtagccatcaacgctggctatatgcagacttacattggaggagtctcatgcccttacatatgcaccaggaggctcaaccacggtgtcttattggttggctatggagcggcaggttacgctccggctaggttcaaggagaagccttactggatcatcaagaactcgtggggagagacttggggtgaaaatggtttctacaaaatctgcaaaggccgtaacatttgtggtgttgacagtatggtctccactgttgcagccaccgtctcaaccaccgcccattaagcatctcgtcaataagttttaattactttggtgatttgtatgagcgagctctctttgcgctgctgactctctctatttatctctgcttcttgcttgtaaataaaatgcgttctattg

SEQ ID NO: 43280 - protein, 270 aa, Arabidopsis thaliana
  peptide (1)..(270): Ceres Seq. ID no. 12422506
  misc_feature (37)..(262): Pfam Name: Papain family cysteine protease Pfam Description: Papain family cysteine protease
  misc_feature (8)..(269): Homolog of NCBI NO: 7211743 NR Description: papain-like cysteine proteinase isoform II
  misc_feature (8)..(269): Homolog of NCBI NO: 7381221 NR Description: papain-like cysteine proteinase isoform II
  misc_feature (5)..(266): Homolog of NCBI NO: 516865 NR Description: putative thiol protease [Arabidopsis thaliana]
  misc_feature (8)..(269): Homolog of NCBI NO: 7211745 NR Description: papain-like cysteine proteinase isoform III
  misc_feature (8)..(269): Homolog of NCBI NO: 7381219 NR Description: papain-like cysteine proteinase isoform I
  misc_feature (8)..(269): Homolog of NCBI NO: 7211741 NR Description: papain-like cysteine proteinase isoform I
  misc_feature (5)..(266): Homolog of NCBI NO: 18399697 NR Description: cysteine proteinase
  misc_feature (5)..(270): Homolog of NCBI NO: 18141287 NR Description: senescence-associated cysteine protease [Brassica
  misc_feature (5)..(270): Homolog of NCBI NO: 21593213 NR Description: cysteine proteinase RD19A [Arabidopsis thaliana]
  misc_feature (5)..(270): Homolog of NCBI NO: 18420375 NR Description: cysteine proteinase RD19A
MTIDSRFEFRKKHLGVRSGFKLPKDANKAPILPTENLPEDFDWRDHGAVTPVKNQGSCGSCWSFSATGALEGANFLATGRLVSLSEQQLVDCDHECDPEEADSCDSGCNGGLMNSAFEYTLKTGGLMKEEDYPYTGKDGKTCKLDKSKIVASVSNFSVISIDEEQIAANLVKNGPLAVAINAGYMQTYIGGVSCPYICTRRLNHGVLLVGYGAAGYAPARFKEKPYWIIKNSWGETWGENGFYKICKGRNICGVDSMVSTVAATVSTTAH

SEQ ID NO: 43281 - protein, 158 aa, Arabidopsis thaliana; identical to SEQ ID NO: 27260
  peptide (1)..(158): Ceres Seq. ID no. 12422507
  misc_feature (1)..(150): Pfam Name: Papain family cysteine protease Pfam Description: Papain family cysteine protease
  misc_feature (1)..(157): Homolog of NCBI NO: 7211743 NR Description: papain-like cysteine proteinase isoform II
  misc_feature (1)..(157): Homolog of NCBI NO: 7381221 NR Description: papain-like cysteine proteinase isoform II
  misc_feature (1)..(154): Homolog of NCBI NO: 516865 NR Description: putative thiol protease [Arabidopsis thaliana]
  misc_feature (1)..(157): Homolog of NCBI NO: 7211745 NR Description: papain-like cysteine proteinase isoform III
  misc_feature (1)..(157): Homolog of NCBI NO: 7381219 NR Description: papain-like cysteine proteinase isoform I
  misc_feature (1)..(157): Homolog of NCBI NO: 7211741 NR Description: papain-like cysteine proteinase isoform I
  misc_feature (1)..(154): Homolog of NCBI NO: 18399697 NR Description: cysteine proteinase
  misc_feature (1)..(158): Homolog of NCBI NO: 18141287 NR Description: senescence-associated cysteine protease [Brassica
  misc_feature (1)..(158): Homolog of NCBI NO: 21593213 NR Description: cysteine proteinase RD19A [Arabidopsis thaliana]
  misc_feature (1)..(158): Homolog of NCBI NO: 18420375 NR Description: cysteine proteinase RD19A

SEQ ID NO: 43282 - protein, 144 aa, Arabidopsis thaliana; identical to SEQ ID NO: 27261
  peptide (1)..(144): Ceres Seq. ID no. 12422508
  misc_feature (1)..(136): Pfam Name: Papain family cysteine protease Pfam Description: Papain family cysteine protease
  misc_feature (1)..(143): Homolog of NCBI NO: 7211743 NR Description: papain-like cysteine proteinase isoform II
  misc_feature (1)..(143): Homolog of NCBI NO: 7381221 NR Description: papain-like cysteine proteinase isoform II
  misc_feature (1)..(140): Homolog of NCBI NO: 516865 NR Description: putative thiol protease [Arabidopsis thaliana]
  misc_feature (1)..(143): Homolog of NCBI NO: 7211745 NR Description: papain-like cysteine proteinase isoform III
  misc_feature (1)..(143): Homolog of NCBI NO: 7381219 NR Description: papain-like cysteine proteinase isoform I
  misc_feature (1)..(143): Homolog of NCBI NO: 7211741 NR Description: papain-like cysteine proteinase isoform I
  misc_feature (1)..(140): Homolog of NCBI NO: 18399697 NR Description: cysteine proteinase
  misc_feature (1)..(144): Homolog of NCBI NO: 18141287 NR Description: senescence-associated cysteine protease [Brassica
  misc_feature (1)..(144): Homolog of NCBI NO: 21593213 NR Description: cysteine proteinase RD19A [Arabidopsis thaliana]
  misc_feature (1)..(144): Homolog of NCBI NO: 18420375 NR Description: cysteine proteinase RD19A

SEQ ID NO: 43283 - DNA, 1394 bp, Arabidopsis thaliana
  misc_feature (1)..(1394): Ceres Seq. ID no. 12421356
  misc_feature: MA Experiment ID: 108463 Result: Down-regulated in Transcription
  misc_feature: MA Experiment 108463 PARAMETER Experiment Name: At_Germinating_Seeds_cDNA_P Parameter: Age (day) Value: 3 vs. 0
  misc_feature: MA Experiment 108463 PARAMETER Experiment Name: At_Germinating_Seeds_cDNA_P Parameter: Tissue Value: Germinating Seeds
  misc_feature: MA Experiment ID: 108464 Result: Down-regulated in Transcription
  misc_feature: MA Experiment 108464 PARAMETER Experiment Name: At_Germinating_Seeds_cDNA_P Parameter: Age (day) Value: 4 vs. 0
  misc_feature: MA Experiment 108464 PARAMETER Experiment Name: At_Germinating_Seeds_cDNA_P Parameter: Tissue Value: Germinating Seeds
  misc_feature: MA Experiment ID: 108573 Result: Up-regulated in Transcription
  misc_feature: MA Experiment 108573 PARAMETER Experiment Name: At_Drought_cDNA_P Parameter: Timepoint (hr) Value: 6
  misc_feature: MA Experiment 108573 PARAMETER Experiment Name: At_Drought_cDNA_P Parameter: Tissue Value: Aerial
  misc_feature: MA Experiment 108573 PARAMETER Experiment Name: At_Drought_cDNA_P Parameter: Treatment Value: Drought vs. No Drought
  misc_feature: MA Experiment ID: 108577 Result: Down-regulated in Transcription
  misc_feature: MA Experiment 108577 PARAMETER Experiment Name: At_42deg_Heat_cDNA_P Parameter: Temperature (deg C) Value: 42 vs. 22
  misc_feature: MA Experiment 108577 PARAMETER Experiment Name: At_42deg_Heat_cDNA_P Parameter: Timepoint (hr) Value: 6
  misc_feature: MA Experiment 108577 PARAMETER Experiment Name: At_42deg_Heat_cDNA_P Parameter: Tissue Value: Aerial
  misc_feature: MA Experiment ID: 20000794 Result: Up-regulated in Transcription
  misc_feature: MA Experiment 20000794 PARAMETER Experiment Name: At_Petals_P Parameter: Age (day) Value: 23-25 days
  misc_feature: MA Experiment 20000794 PARAMETER Experiment Name: At_Petals_P Parameter: Plant Line Value: WS
  misc_feature: MA Experiment 20000794 PARAMETER Experiment Name: At_Petals_P Parameter: Tissue Value: Petals vs. Whole plant
  misc_feature: MA Experiment ID: 20001247 Result: Up-regulated in Transcription
  misc_feature: MA Experiment 20001247 PARAMETER Experiment Name: At_Far-red-induction_P Parameter: Age (day) Value: 7
  misc_feature: MA Experiment 20001247 PARAMETER Experiment Name: At_Far-red-induction_P Parameter: Light Value: Far-red vs. White
  misc_feature: MA Experiment 20001247 PARAMETER Experiment Name: At_Far-red-induction_P Parameter: Organism Value: A. thaliana
  misc_feature: MA Experiment 20001247 PARAMETER Experiment Name: At_Far-red-induction_P Parameter: Plant Line Value: Columbia
  misc_feature: MA Experiment 20001247 PARAMETER Experiment Name: At_Far-red-induction_P Parameter: Timepoint (hr) Value: 1
  misc_feature: MA Experiment 20001247 PARAMETER Experiment Name: At_Far-red-induction_P Parameter: Tissue Value: Whole Plant
  misc_feature: MA Experiment ID: 20001248 Result: Up-regulated in Transcription
  misc_feature: MA Experiment 20001248 PARAMETER Experiment Name: At_Far-red-induction_P Parameter: Age (day) Value: 7
  misc_feature: MA Experiment 20001248 PARAMETER Experiment Name: At_Far-red-induction_P Parameter: Light Value: Far-red vs. White
  misc_feature: MA Experiment 20001248 PARAMETER Experiment Name: At_Far-red-induction_P Parameter: Organism Value: A. thaliana
  misc_feature: MA Experiment 20001248 PARAMETER Experiment Name: At_Far-red-induction_P Parameter: Plant Line Value: Columbia
  misc_feature: MA Experiment 20001248 PARAMETER Experiment Name: At_Far-red-induction_P Parameter: Timepoint (hr) Value: 4
  misc_feature: MA Experiment 20001248 PARAMETER Experiment Name: At_Far-red-induction_P Parameter: Tissue Value: Whole Plant
  misc_feature: MA Experiment ID: 20001450 Result: Up-regulated in Transcription
  misc_feature: MA Experiment 20001450 PARAMETER Experiment Name: At_Far-red-induction_P Parameter: Age (day) Value: 7
  misc_feature: MA Experiment 20001450 PARAMETER Experiment Name: At_Far-red-induction_P Parameter: Light Value: Far-red vs. White
  misc_feature: MA Experiment 20001450 PARAMETER Experiment Name: At_Far-red-induction_P Parameter: Organism Value: A. thaliana
  misc_feature: MA Experiment 20001450 PARAMETER Experiment Name: At_Far-red-induction_P Parameter: Plant Line Value: Columbia
  misc_feature: MA Experiment 20001450 PARAMETER Experiment Name: At_Far-red-induction_P Parameter: Timepoint (hr) Value: 8
  misc_feature: MA Experiment 20001450 PARAMETER Experiment Name: At_Far-red-induction_P Parameter: Tissue Value: Whole Plant
aatcatcttctccacaacaaaaaaataaccctaatttacacagaaaatatgtggggaattggaggaaattactactggcgaaagaaaaacaacaacggaggagaaagcgaagcgatcgttgtggtattcgcttggatgtctagcgaagaacgcaatctaaagaaccatgtcgatctctattcttctcttctttgggattctctcgtttgccattctcaatttctcaacatgtttcttccagataaagctgcagatttagcttctaatgttgtttctgaacttgtcaaggtaaaaaggagctcaaagcaaagccagttcctttagtgtttgcttctttctctggtggtcctaatgcttgtatgtataaagttcttcaaatacttgaaggaacatgcgaaacgggactaaatccggatgattgtagattggttagaaactgcatctcagggtttatttatgactcatgtcctgtggatttcactagcgacttgggagctcgattagcggttcatccaactacgcttaaaatgtctagtccacctaaaccgtttgtatgggcagcgaatggtattgcttcgagtctcgattatgtttttctcaacaggtttgaatcacagcgagccgagtactggcagactctttactctactataatcatgagagtaccttatctcattctatgctctgaaaacgatgaccttgctccttatcaaactatacacaatttcgctacacgtctccaagaactaggaggaaatgtaaaacttgtaaaatggaatgattcccctcattgtggtcattatcgttataaccaggtcgactataaagctgctgtatctgagttcttgtcaaaagcagcgtcggtttattcgcagaagacgagaagtcttgacagagaagctatgaaaggaacatgtcatgatgagataacagagccaattcagagcttggggcaatcaacctctggtcttaaccgaagcttcaacggaactccacttgtcacaaccgatcatttcttcgtacctagcaccgtaggttactacgtgggcagagacggcggatatgtgcaagatgaacacaaacaagatttgatttgtttgtccaatactcaaaccaatgaatcggttaagcccaatggagttctaggccaaatcttatttgatgtttatattccgaagaatgttgaggattgggatataaagctatcagaaaccgggcggtctaggcggagaccggggaagagatttatacgtagatcgagattgtaacatctgagttatatattatatataccatgagtacccatttgttttcttcagatactgttgcagaggtattccatttggttttccctcgcaaagattaataaattaataaaataagatcttttttgc

SEQ ID NO: 43284 - protein, 302 aa, Arabidopsis thaliana
  peptide (1)..(302): Ceres Seq. ID no. 12421357
  misc_feature (1)..(278): Pfam Name: Eukaryotic protein of unknown function (DUF829) Pfam Description: Eukaryotic protein of unknown function (DUF829)
  misc_feature (1)..(283): Homolog of NCBI NO: 25411656 NR Description: hypothetical protein At2g15690 [imported] -
  misc_feature (1)..(283): Homolog of NCBI NO: 18397898 NR Description: unknown protein; protein id: At2g15695.1
  misc_feature (1)..(302): Homolog of NCBI NO: 15241450 NR Description: putative protein
MYKVLQILEGTCETGLNPDDCRLVRNCISGFIYDSCPVDFTSDLGARLAVHPTTLKMSSPPKPFVWAANGIASSLDYVFLNRFESQRAEYWQTLYSTIIMRVPYLILCSENDDLAPYQTIHNFATRLQELGGNVKLVKWNDSPHCGHYRYNQVDYKAAVSEFLSKAASVYSQKTRSLDREAMKGTCHDEITEPIQSLGQSTSGLNRSFNGTPLVTTDHFFVPSTVGYYVGRDGGYVQDEHKQDLICLSNTQTNESVKPNGVLGQILFDVYIPKNVEDWDIKLSETGRSRRRPGKRFIRRSRL

SEQ ID NO: 43285 - protein, 246 aa, Arabidopsis thaliana
  peptide (1)..(246): Ceres Seq. ID no. 12421358
  misc_feature (1)..(222): Pfam Name: Eukaryotic protein of unknown function (DUF829) Pfam Description: Eukaryotic protein of unknown function (DUF829)
  misc_feature (1)..(227): Homolog of NCBI NO: 25411656 NR Description: hypothetical protein At2g15690 [imported] -
  misc_feature (1)..(227): Homolog of NCBI NO: 18397898 NR Description: unknown protein; protein id: At2g15695.1
  misc_feature (1)..(246): Homolog of NCBI NO: 15241450 NR Description: putative protein
MSSPPKPFVWAANGIASSLDYVFLNRFESQRAEYWQTLYSTIIMRVPYLILCSENDDLAPYQTIHNFATRLQELGGNVKLVKWNDSPHCGHYRYNQVDYKAAVSEFLSKAASVYSQKTRSLDREAMKGTCHDEITEPIQSLGQSTSGLNRSFNGTPLVTTDHFFVPSTVGYYVGRDGGYVQDEHKQDLICLSNTQTNESVKPNGVLGQILFDVYIPKNVEDWDIKLSETGRSRRRPGKRFIRRSRL

SEQ ID NO: 43286 - protein, 203 aa, Arabidopsis thaliana
  peptide (1)..(203): Ceres Seq. ID no. 12421359
  misc_feature (1)..(179): Pfam Name: Eukaryotic protein of unknown function (DUF829) Pfam Description: Eukaryotic protein of unknown function (DUF829)
  misc_feature (1)..(184): Homolog of NCBI NO: 25411656 NR Description: hypothetical protein At2g15690 [imported] -
  misc_feature (1)..(184): Homolog of NCBI NO: 18397898 NR Description: unknown protein; protein id: At2g15695.1
  misc_feature (1)..(203): Homolog of NCBI NO: 15241450 NR Description: putative protein
MRVPYLILCSENDDLAPYQTIHNFATRLQELGGNVKLVKWNDSPHCGHYRYNQVDYKAAVSEFLSKAASVYSQKTRSLDREAMKGTCHDEITEPIQSLGQSTSGLNRSFNGTPLVTTDHFFVPSTVGYYVGRDGGYVQDEHKQDLICLSNTQTNESVKPNGVLGQILFDVYIPKNVEDWDIKLSETGRSRRRPGKRFIRRSRL

SEQ ID NO: 43287 - DNA, 1248 bp, Arabidopsis thaliana
  misc_feature (1)..(1248): Ceres Seq. ID no. 12394526
  misc_feature: MA Experiment ID: 20001558 Result: Up-regulated in Transcription
  misc_feature: MA Experiment 20001558 PARAMETER Experiment Name: At_Drought_Soil_Dry_P Parameter: Age (day) Value: 27
  misc_feature: MA Experiment 20001558 PARAMETER Experiment Name: At_Drought_Soil_Dry_P Parameter: Organism Value: A. thaliana
  misc_feature: MA Experiment 20001558 PARAMETER Experiment Name: At_Drought_Soil_Dry_P Parameter: Plant Line Value: WS
  misc_feature: MA Experiment 20001558 PARAMETER Experiment Name: At_Drought_Soil_Dry_P Parameter: Post Timepoint (hr) Value: 6
  misc_feature: MA Experiment 20001558 PARAMETER Experiment Name: At_Drought_Soil_Dry_P Parameter: Post-Treatment Value: Re-Water vs. No Drought
  misc_feature: MA Experiment 20001558 PARAMETER Experiment Name: At_Drought_Soil_Dry_P Parameter: Timepoint (day) Value: 13
  misc_feature: MA Experiment 20001558 PARAMETER Experiment Name: At_Drought_Soil_Dry_P Parameter: Treatment Value: Drought vs. No Drought
ttttctccgtgtttctaggactcgcatgtctctgtttatctccgattccggcaacagctcaacgtcggaaactcaggttcagtgttaacggcgagttcaagatactacaagtggcggatatgcattttgctaacggcgctaagacgcagtgtcaaaatgttcttcctagccagagagctcattgctcagacctcaacaccaccatcttcatgtcgcgagtcatcgccgccgagaagcctgatcttatcgtcttcaccggtgataacatatttgggtttgatgtaaaagacgctttgaaatccataaacgctgcgtttgctccagcgattgcgtctaaaatcccatgggttgctattttgggaaaccatgaccaagaatctacatttacaagacaacaagttatgaatcacattgtgaagcttcccaacactttgtctcaagtgaatcctcctgaagctgctcattacattgatggttttggtaattacaatctccaaatccatggagctgctgattcgaaactacagaacaaatctgttcttaatctttattttctcgatagtggagattattctagtgttccttacatggaaggttatgattggatcaaaacttctcagcagttttggttcgaccgcacttcaaaacgtctcaagagggagtacaacgcaaagcctaatcctcaagaaggtatagctccaggactagcttacttccacattccattaccggagtttttgagttttgactcaaagaacgctacaaaaggagtgagacaagaaggtacatccgcggcttctacaaactcgggtttcttcacaacattgatagctagaggagatgtgaaatctgtgtttgtgggtcacgaccatgtcaacgacttctgcggtgaacttaaaggtttgaatctatgttatggtggtggatttgggtatcatgcttatggtaaagctggatgggaaagaagagcgagagttgtggttgttgatttgaataagaagagaaaaggaaagtggggagctgtgaaatcgattaagacatggaagaggcttgatgataagcatctctctgttattgactctcaagttctttggaacaattctgcaaacaaattagttgttcgttgatattgattccatgtgttgttgttttgatctgtctactaaatgttctgttttagttggttttgggtttcatagaaactgtttaagtgtttatcattgagttagttttaaactccatttgatg

SEQ ID NO: 43288 - protein, 374 aa, Arabidopsis thaliana
  peptide (1)..(374): Ceres Seq. ID no. 12394527
  misc_feature (32)..(292): Pfam Name: Calcineurin-like phosphoesterase Pfam Description: Calcineurin-like phosphoesterase
  misc_feature (70)..(338): Homolog of NCBI NO: 29349293 NR Description: putative phosphohydrolase, Icc family
  misc_feature (25)..(359): Homolog of NCBI NO: 40740622 NR Description: hypothetical protein AN3604.2 [Aspergillus
  misc_feature (14)..(367): Homolog of NCBI NO: 6323393 NR Description: Dose-Dependent Cell cycle Regulator; Dcr2p
  misc_feature (24)..(367): Homolog of NCBI NO: 15242042 NR Description: putative protein; protein id: At5g57140.1
  misc_feature (5)..(310): Homolog of NCBI NO: 30267809 NR Description: hypothetical protein [Arabidopsis thaliana]
  misc_feature (5)..(367): Homolog of NCBI NO: 30267807 NR Description: hypothetical protein [Arabidopsis thaliana]
  misc_feature (5)..(367): Homolog of NCBI NO: 15226455 NR Description: hypothetical protein; protein id: At2g46880.1
  misc_feature (5)..(370): Homolog of NCBI NO: 25763519 NR Description: probable phosphoesterase (EC 3.1.-.-) At2g46880 -
  misc_feature (13)..(367): Homolog of NCBI NO: 7208777 NR Description: putative PTS protein [Cicer arietinum]
  misc_feature (1)..(374): Homolog of NCBI NO: 15242654 NR Description: putative protein; protein id: At5g63140.1
FSVFLGLACLCLSPIPATAQRRKLRFSVNGEFKILQVADMHFANGAKTQCQNVLPSQRAHCSDLNTTIFMSRVIAAEKPDLIVFTGDNIFGFDVKDALKSINAAFAPAIASKIPWVAILGNHDQESTFTRQQVMNHIVKLPNTLSQVNPPEAAHYIDGFGNYNLQIHGAADSKLQNKSVLNLYFLDSGDYSSVPYMEGYDWIKTSQQFWFDRTSKRLKREYNAKPNPQEGIAPGLAYFHIPLPEFLSFDSKNATKGVRQEGTSAASTNSGFFTTLIARGDVKSVFVGHDHVNDFCGELKGLNLCYGGGFGYHAYGKAGWERRARVVVVDLNKKRKGKWGAVKSIKTWKRLDDKHLSVIDSQVLWNNSANKLVVR

SEQ ID NO: 43289 - protein, 335 aa, Arabidopsis thaliana; identical to SEQ ID NO: 35819
  peptide (1)..(335): Ceres Seq. ID no. 12394528
  misc_feature (1)..(253): Pfam Name: Calcineurin-like phosphoesterase Pfam Description: Calcineurin-like phosphoesterase
  misc_feature (31)..(299): Homolog of NCBI NO: 29349293 NR Description: putative phosphohydrolase, Icc family
  misc_feature (1)..(320): Homolog of NCBI NO: 40740622 NR Description: hypothetical protein AN3604.2 [Aspergillus
  misc_feature (1)..(328): Homolog of NCBI NO: 6323393 NR Description: Dose-Dependent Cell cycle Regulator; Dcr2p
  misc_feature (1)..(328): Homolog of NCBI NO: 15242042 NR Description: putative protein; protein id: At5g57140.1
  misc_feature (1)..(271): Homolog of NCBI NO: 30267809 NR Description: hypothetical protein [Arabidopsis thaliana]
  misc_feature (1)..(328): Homolog of NCBI NO: 30267807 NR Description: hypothetical protein [Arabidopsis thaliana]
  misc_feature (1)..(328): Homolog of NCBI NO: 15226455 NR Description: hypothetical protein; protein id: At2g46880.1
  misc_feature (1)..(331): Homolog of NCBI NO: 25763519 NR Description: probable phosphoesterase (EC 3.1.-.-) At2g46880 -
  misc_feature (1)..(328): Homolog of NCBI NO: 7208777 NR Description: putative PTS protein [Cicer arietinum]
  misc_feature (1)..(335): Homolog of NCBI NO: 15242654 NR Description: putative protein; protein id: At5g63140.1

SEQ ID NO: 43290 - protein, 305 aa, Arabidopsis thaliana
  peptide (1)..(305): Ceres Seq. ID no. 12394529
  misc_feature (1)..(223): Pfam Name: Calcineurin-like phosphoesterase Pfam Description: Calcineurin-like phosphoesterase
  misc_feature (1)..(269): Homolog of NCBI NO: 29349293 NR Description: putative phosphohydrolase, Icc family
  misc_feature (1)..(290): Homolog of NCBI NO: 40740622 NR Description: hypothetical protein AN3604.2 [Aspergillus
  misc_feature (1)..(298): Homolog of NCBI NO: 6323393 NR Description: Dose-Dependent Cell cycle Regulator; Dcr2p
  misc_feature (1)..(298): Homolog of NCBI NO: 15242042 NR Description: putative protein; protein id: At5g57140.1
  misc_feature (1)..(241): Homolog of NCBI NO: 30267809 NR Description: hypothetical protein [Arabidopsis thaliana]
  misc_feature (1)..(298): Homolog of NCBI NO: 30267807 NR Description: hypothetical protein [Arabidopsis thaliana]
  misc_feature (1)..(298): Homolog of NCBI NO: 15226455 NR Description: hypothetical protein; protein id: At2g46880.1
  misc_feature (1)..(301): Homolog of NCBI NO: 25763519 NR Description: probable phosphoesterase (EC 3.1.-.-) At2g46880 -
  misc_feature (1)..(298): Homolog of NCBI NO: 7208777 NR Description: putative PTS protein [Cicer arietinum]
  misc_feature (1)..(305): Homolog of NCBI NO: 15242654 NR Description: putative protein; protein id: At5g63140.1
MSRVIAAEKPDLIVFTGDNIFGFDVKDALKSINAAFAPAIASKIPWVAILGNHDQESTFTRQQVMNHIVKLPNTLSQVNPPEAAHYIDGFGNYNLQIHGAADSKLQNKSVLNLYFLDSGDYSSVPYMEGYDWIKTSQQFWFDRTSKRLKREYNAKPNPQEGIAPGLAYFHIPLPEFLSFDSKNATKGVRQEGTSAASTNSGFFTTLIARGDVKSVFVGHDHVNDFCGELKGLNLCYGGGFGYHAYGKAGWERRARVVVVDLNKKRKGKWGAVKSIKTWKRLDDKHLSVIDSQVLWNNSANKLVVR

SEQ ID NO: 43291 - DNA, 743 bp, Arabidopsis thaliana
  misc_feature (1)..(743): Ceres Seq. ID no. 12422309
  misc_feature: MA Experiment ID: 108434 Result: Up-regulated in Transcription
  misc_feature: MA Experiment 108434 PARAMETER Experiment Name: At_Root_Tips_cDNA_P Parameter: Tissue Value: Root Tips
  misc_feature: MA Experiment ID: 108462 Result: Down-regulated in Transcription
  misc_feature: MA Experiment 108462 PARAMETER Experiment Name: At_Germinating_Seeds_cDNA_P Parameter: Age (day) Value: 2 vs. 0
  misc_feature: MA Experiment 108462 PARAMETER Experiment Name: At_Germinating_Seeds_cDNA_P Parameter: Tissue Value: Germinating Seeds
  misc_feature: MA Experiment ID: 108463 Result: Down-regulated in Transcription
  misc_feature: MA Experiment 108463 PARAMETER Experiment Name: At_Germinating_Seeds_cDNA_P Parameter: Age (day) Value: 3 vs. 0
  misc_feature: MA Experiment 108463 PARAMETER Experiment Name: At_Germinating_Seeds_cDNA_P Parameter: Tissue Value: Germinating Seeds
  misc_feature: MA Experiment ID: 108488 Result: Down-regulated in Transcription
  misc_feature: MA Experiment ID: 108577 Result: Down-regulated in Transcription
  misc_feature: MA Experiment 108577 PARAMETER Experiment Name: At_42deg_Heat_cDNA_P Parameter: Temperature (deg C) Value: 42 vs. 22
  misc_feature: MA Experiment 108577 PARAMETER Experiment Name: At_42deg_Heat_cDNA_P Parameter: Timepoint (hr) Value: 6
  misc_feature: MA Experiment 108577 PARAMETER Experiment Name: At_42deg_Heat_cDNA_P Parameter: Tissue Value: Aerial
  misc_feature: MA Experiment ID: 108607 Result: Down-regulated in Transcription
  misc_feature: MA Experiment 108607 PARAMETER Experiment Name: At_100uM_ABA_cDNA_P Parameter: Timepoint (hr) Value: 4
  misc_feature: MA Experiment 108607 PARAMETER Experiment Name: At_100uM_ABA_cDNA_P Parameter: Tissue Value: Aerial
  misc_feature: MA Experiment 108607 PARAMETER Experiment Name: At_100uM_ABA_cDNA_P Parameter: Treatment Value: 100uM ABA vs. No Treatment
  misc_feature: MA Experiment ID: 20000069 Result: Up-regulated in Transcription
  misc_feature: MA Experiment 20000069 PARAMETER Experiment Name: At_100uM_ABA_Mutants_cDNA_P Parameter: Plant Line Value: CS23
  misc_feature: MA Experiment 20000069 PARAMETER Experiment Name: At_100uM_ABA_Mutants_cDNA_P Parameter: Timepoint (hr) Value: 6
  misc_feature: MA Experiment 20000069 PARAMETER Experiment Name: At_100uM_ABA_Mutants_cDNA_P Parameter: Tissue Value: Aerial
  misc_feature: MA Experiment 20000069 PARAMETER Experiment Name: At_100uM_ABA_Mutants_cDNA_P Parameter: Treatment Value: 100uM ABA vs. No Treatment
  misc_feature: MA Experiment ID: 20000070 Result: Up-regulated in Transcription
  misc_feature: MA Experiment 20000070 PARAMETER Experiment Name: At_100uM_ABA_Mutants_cDNA_P Parameter: Plant Line Value: CS24
  misc_feature: MA Experiment 20000070 PARAMETER Experiment Name: At_100uM_ABA_Mutants_cDNA_P Parameter: Timepoint (hr) Value: 6
  misc_feature: MA Experiment 20000070 PARAMETER Experiment Name: At_100uM_ABA_Mutants_cDNA_P Parameter: Tissue Value: Aerial
  misc_feature: MA Experiment 20000070 PARAMETER Experiment Name: At_100uM_ABA_Mutants_cDNA_P Parameter: Treatment Value: 100uM ABA vs. No Treatment
  misc_feature: MA Experiment ID: 20000071 Result: Up-regulated in Transcription
  misc_feature: MA Experiment 20000071 PARAMETER Experiment Name: At_100uM_ABA_Mutants_cDNA_P Parameter: Plant Line Value: CS8104
  misc_feature: MA Experiment 20000071 PARAMETER Experiment Name: At_100uM_ABA_Mutants_cDNA_P Parameter: Timepoint (hr) Value: 6
  misc_feature: MA Experiment 20000071 PARAMETER Experiment Name: At_100uM_ABA_Mutants_cDNA_P Parameter: Tissue Value: Aerial
  misc_feature: MA Experiment 20000071 PARAMETER Experiment Name: At_100uM_ABA_Mutants_cDNA_P Parameter: Treatment Value: 100uM ABA vs. No Treatment
  misc_feature: MA Experiment ID: 20000072 Result: Up-regulated in Transcription
  misc_feature: MA Experiment 20000072 PARAMETER Experiment Name: At_100uM_ABA_Mutants_cDNA_P Parameter: Plant Line Value: CS8105
  misc_feature: MA Experiment 20000072 PARAMETER Experiment Name: At_100uM_ABA_Mutants_cDNA_P Parameter: Timepoint (hr) Value: 6
  misc_feature: MA Experiment 20000072 PARAMETER Experiment Name: At_100uM_ABA_Mutants_cDNA_P Parameter: Tissue Value: Aerial
  misc_feature: MA Experiment 20000072 PARAMETER Experiment Name: At_100uM_ABA_Mutants_cDNA_P Parameter: Treatment Value: 100uM ABA vs. No Treatment
  misc_feature: MA Experiment ID: 20000087 Result: Up-regulated in Transcription
  misc_feature: MA Experiment 20000087 PARAMETER Experiment Name: At_100uM_ABA_Mutants_cDNA_P Parameter: Plant Line Value: WS
  misc_feature: MA Experiment 20000087 PARAMETER Experiment Name: At_100uM_ABA_Mutants_cDNA_P Parameter: Timepoint (hr) Value: 6
  misc_feature: MA Experiment 20000087 PARAMETER Experiment Name: At_100uM_ABA_Mutants_cDNA_P Parameter: Tissue Value: Aerial
  misc_feature: MA Experiment 20000087 PARAMETER Experiment Name: At_100uM_ABA_Mutants_cDNA_P Parameter: Treatment Value: 100uM ABA vs. No Treatment
  misc_feature: MA Experiment ID: 20000088 Result: Up-regulated in Transcription
  misc_feature: MA Experiment 20000088 PARAMETER Experiment Name: At_100uM_ABA_Mutants_cDNA_P Parameter: Plant Line Value: Landsberg
  misc_feature: MA Experiment 20000088 PARAMETER Experiment Name: At_100uM_ABA_Mutants_cDNA_P Parameter: Timepoint (hr) Value: 6
  misc_feature: MA Experiment 20000088 PARAMETER Experiment Name: At_100uM_ABA_Mutants_cDNA_P Parameter: Tissue Value: Aerial
  misc_feature: MA Experiment 20000088 PARAMETER Experiment Name: At_100uM_ABA_Mutants_cDNA_P Parameter: Treatment Value: 100uM ABA vs. No Treatment
  misc_feature: MA Experiment ID: 20000089 Result: Up-regulated in Transcription
  misc_feature: MA Experiment ID: 20000090 Result: Up-regulated in Transcription
  misc_feature: MA Experiment ID: 20000111 Result: Down-regulated in Transcription
  misc_feature: MA Experiment 20000111 PARAMETER Experiment Name: At_42deg_Heat_cDNA_P Parameter: Temperature (deg C) Value: 42 vs. 22
  misc_feature: MA Experiment 20000111 PARAMETER Experiment Name: At_42deg_Heat_cDNA_P Parameter: Timepoint (hr) Value: 6
  misc_feature: MA Experiment 20000111 PARAMETER Experiment Name: At_42deg_Heat_cDNA_P Parameter: Tissue Value: Aerial
  misc_feature: MA Experiment ID: 20000117 Result: Up-regulated in Transcription
  misc_feature: MA Experiment 20000117 PARAMETER Experiment Name: At_100uM_ABA_Mutants_cDNA_P Parameter: Plant Line Value: Columbia
  misc_feature: MA Experiment 20000117 PARAMETER Experiment Name: At_100uM_ABA_Mutants_cDNA_P Parameter: Timepoint (hr) Value: 6
  misc_feature: MA Experiment 20000117 PARAMETER Experiment Name: At_100uM_ABA_Mutants_cDNA_P Parameter: Tissue Value: Aerial
  misc_feature: MA Experiment 20000117 PARAMETER Experiment Name: At_100uM_ABA_Mutants_cDNA_P Parameter: Treatment Value: 100uM ABA vs. No Treatment
  misc_feature: MA Experiment ID: 20000213 Result: Up-regulated in Transcription
  misc_feature: MA Experiment 20000213 PARAMETER Experiment Name: At_4deg_Cold_P Parameter: Timepoint (hr) Value: 2
  misc_feature: MA Experiment ID: 20000224 Result: Down-regulated in Transcription
  misc_feature: MA Experiment ID: 20000437 Result: Up-regulated in Transcription
  misc_feature: MA Experiment 20000437 PARAMETER Experiment Name: At_Drought_P Parameter: Age (day) Value: 8
  misc_feature: MA Experiment 20000437 PARAMETER Experiment Name: At_Drought_P Parameter: Organism Value: A. thaliana
  misc_feature: MA Experiment 20000437 PARAMETER Experiment Name: At_Drought_P Parameter: Plant Line Value: WS
  misc_feature: MA Experiment 20000437 PARAMETER Experiment Name: At_Drought_P Parameter: Timepoint (hr) Value: 24
  misc_feature: MA Experiment 20000437 PARAMETER Experiment Name: At_Drought_P Parameter: Tissue Value: Whole Plant
  misc_feature: MA Experiment 20000437 PARAMETER Experiment Name: At_Drought_P Parameter: Treatment Value: Drought vs. No Drought
  misc_feature: MA Experiment ID: 20000438 Result: Down-regulated in Transcription
  misc_feature: MA Experiment 20000438 PARAMETER Experiment Name: At_Shoots__P Parameter: Age (day) Value: 14
  misc_feature: MA Experiment 20000438 PARAMETER Experiment Name: At_Shoots__P Parameter: Tissue Value: Shoots vs. Whole Plant
  misc_feature: MA Experiment ID: 20001451 Result: Up-regulated in Transcription
  misc_feature: MA Experiment 20001451 PARAMETER Experiment Name: At_Far-red-induction_P Parameter: Age (day) Value: 7
  misc_feature: MA Experiment 20001451 PARAMETER Experiment Name: At_Far-red-induction_P Parameter: Light Value: Far-red vs. White
  misc_feature: MA Experiment 20001451 PARAMETER Experiment Name: At_Far-red-induction_P Parameter: Organism Value: A. thaliana
  misc_feature: MA Experiment 20001451 PARAMETER Experiment Name: At_Far-red-induction_P Parameter: Plant Line Value: Columbia
  misc_feature: MA Experiment 20001451 PARAMETER Experiment Name: At_Far-red-induction_P Parameter: Timepoint (hr) Value: 24
  misc_feature: MA Experiment 20001451 PARAMETER Experiment Name: At_Far-red-induction_P Parameter: Tissue Value: Whole Plant
  misc_feature: MA Experiment ID: 20001557 Result: Up-regulated in Transcription
  misc_feature: MA Experiment 20001557 PARAMETER Experiment Name: At_Drought_Soil_Dry_P Parameter: Age (day) Value: 27
  misc_feature: MA Experiment 20001557 PARAMETER Experiment Name: At_Drought_Soil_Dry_P Parameter: Organism Value: A. thaliana
  misc_feature: MA Experiment 20001557 PARAMETER Experiment Name: At_Drought_Soil_Dry_P Parameter: Plant Line Value: WS
  misc_feature: MA Experiment 20001557 PARAMETER Experiment Name: At_Drought_Soil_Dry_P Parameter: Post Timepoint (hr) Value: 3
  misc_feature: MA Experiment 20001557 PARAMETER Experiment Name: At_Drought_Soil_Dry_P Parameter: Post-Treatment Value: Re-Water vs. No Drought
  misc_feature: MA Experiment 20001557 PARAMETER Experiment Name: At_Drought_Soil_Dry_P Parameter: Timepoint (day) Value: 13
  misc_feature: MA Experiment 20001557 PARAMETER Experiment Name: At_Drought_Soil_Dry_P Parameter: Treatment Value: Drought vs. No Drought
acatctcactgctcactactctcactgtaatcccttagatcttcttttcaaatttcaatggcgtccgatgatgttgagtatcggtgcttcgttggaggtctagcatgggccactgatgacagagctcttgagactgccttcgctcaatacggcgacgttattgattccaagatcattaacgatcgtgagactggaagatcaaggggattcggattcgtcaccttcaaggatgagaaagccatgaaggatgcgattgagggaatgaacggacaagatctcgatggccgtagcatcactgttaacgaggctcagtcacgaggaagcggtggcggcggaggccaccgtggaggtggcggcggtagacgcgagggtggaggaggatacagcggcggcggcggcggttactcctcaagaggtggtggtggcggaagctacggtggtggaagacgtgagggaggaggaggatacggtggtggtgaaggaggaggttacggaggaagcggtggtggtggaggatggtaattcctttaattaggtttaggattaccaatgaatgttctctctctcgcttgttatgcttctacttggttttgtgtgttctctattttgttctggttctgctttagatttgatgtaacagttcgtgattaggtattttggtatctggaaacgtaatgttaagtcacttgtcattttctaaataacaaatttcttcggagatattatctctgttgattgattct

SEQ ID NO: 43292 - protein, 154 aa, Arabidopsis thaliana
  peptide (1)..(154): Ceres Seq. ID no. 12422310
  misc_feature (10)..(81): Pfam Name: RNA recognition motif. (a.k.a. RRM, RBD, or RNP domain) Pfam Description: RNA recognition motif. (a.k.a. RRM, RBD, or RNP
  misc_feature (5)..(149): Homolog of NCBI NO: 2119044 NR Description: glycine-rich RNA-binding protein RGP-1b - wood
  misc_feature (1)..(154): Homolog of NCBI NO: 2331131 NR Description: glycine-rich protein [Oryza sativa]
  misc_feature (5)..(154): Homolog of NCBI NO: 544426 NR Description: Glycine-rich RNA-binding protein
  misc_feature (1)..(152): Homolog of NCBI NO: 7439998 NR Description: glycine-rich RNA-binding protein GRP1 -
  misc_feature (1)..(151): Homolog of NCBI NO: 2267567 NR Description: glycine-rich RNA binding protein 1 [Pelargonium x
  misc_feature (1)..(154): Homolog of NCBI NO: 1346180 NR Description: Glycine-rich RNA-binding protein GRP1A
  misc_feature (1)..(154): Homolog of NCBI NO: 1346181 NR Description: Glycine-rich RNA-binding protein GRP2A
  misc_feature (1)..(154): Homolog of NCBI NO: 21553354 NR Description: glycine-rich RNA binding protein 7 [Arabidopsis
  misc_feature (1)..(154): Homolog of NCBI NO: 15226605 NR Description: glycine-rich RNA binding protein AtGRP7
  misc_feature (1)..(154): Homolog of NCBI NO: 30681492 NR Description: glycine-rich RNA-binding protein (AtGRP7)
MASDDVEYRCFVGGLAWATDDRALETAFAQYGDVIDSKIINDRETGRSRGFGFVTFKDEKAMKDAIEGMNGQDLDGRSITVNEAQSRGSGGGGGHRGGGGGRREGGGGYSGGGGGYSSRGGGGGSYGGGRREGGGGYGGGEGGGYGGSGGGGGW

SEQ ID NO: 43293 - protein, 93 aa, Arabidopsis thaliana
  peptide (1)..(93): Ceres Seq. ID no. 12422311
  misc_feature (23)..(92): Pfam Name: Herpesvirus latent membrane protein 1 (LMP1) Pfam Description: Herpesvirus latent membrane protein 1 (LMP1)
  misc_feature (1)..(88): Homolog of NCBI NO: 2119044 NR Description: glycine-rich RNA-binding protein RGP-1b - wood
  misc_feature (1)..(93): Homolog of NCBI NO: 2331131 NR Description: glycine-rich protein [Oryza sativa]
  misc_feature (1)..(93): Homolog of NCBI NO: 544426 NR Description: Glycine-rich RNA-binding protein
  misc_feature (1)..(91): Homolog of NCBI NO: 7439998 NR Description: glycine-rich RNA-binding protein GRP1 -
  misc_feature (1)..(90): Homolog of NCBI NO: 2267567 NR Description: glycine-rich RNA binding protein 1 [Pelargonium x
  misc_feature (1)..(93): Homolog of NCBI NO: 1346180 NR Description: Glycine-rich RNA-binding protein GRP1A
  misc_feature (1)..(93): Homolog of NCBI NO: 1346181 NR Description: Glycine-rich RNA-binding protein GRP2A
  misc_feature (1)..(93): Homolog of NCBI NO: 21553354 NR Description: glycine-rich RNA binding protein 7 [Arabidopsis
  misc_feature (1)..(93): Homolog of NCBI NO: 15226605 NR Description: glycine-rich RNA binding protein AtGRP7
  misc_feature (1)..(93): Homolog of NCBI NO: 30681492 NR Description: glycine-rich RNA-binding protein (AtGRP7)
MKDAIEGMNGQDLDGRSITVNEAQSRGSGGGGGHRGGGGGRREGGGGYSGGGGGYSSRGGGGGSYGGGRREGGGGYGGGEGGGYGGSGGGGGW

SEQ ID NO: 43294 - protein, 86 aa, Arabidopsis thaliana
  peptide (1)..(86): Ceres Seq. ID no. 12422312
  misc_feature (16)..(85): Pfam Name: Herpesvirus latent membrane protein 1 (LMP1) Pfam Description: Herpesvirus latent membrane protein 1 (LMP1)
  misc_feature (1)..(81): Homolog of NCBI NO: 2119044 NR Description: glycine-rich RNA-binding protein RGP-1b - wood
  misc_feature (1)..(86): Homolog of NCBI NO: 2331131 NR Description: glycine-rich protein [Oryza sativa]
  misc_feature (1)..(86): Homolog of NCBI NO: 544426 NR Description: Glycine-rich RNA-binding protein
  misc_feature (1)..(84): Homolog of NCBI NO: 7439998 NR Description: glycine-rich RNA-binding protein GRP1 -
  misc_feature (1)..(83): Homolog of NCBI NO: 2267567 NR Description: glycine-rich RNA binding protein 1 [Pelargonium x
  misc_feature (1)..(86): Homolog of NCBI NO: 1346180 NR Description: Glycine-rich RNA-binding protein GRP1A
  misc_feature (1)..(86): Homolog of NCBI NO: 1346181 NR Description: Glycine-rich RNA-binding protein GRP2A
  misc_feature (1)..(86): Homolog of NCBI NO: 21553354 NR Description: glycine-rich RNA binding protein 7 [Arabidopsis
  misc_feature (1)..(86): Homolog of NCBI NO: 15226605 NR Description: glycine-rich RNA binding protein AtGRP7
  misc_feature (1)..(86): Homolog of NCBI NO: 30681492 NR Description: glycine-rich RNA-binding protein (AtGRP7)
MNGQDLDGRSITVNEAQSRGSGGGGGHRGGGGGRREGGGGYSGGGGGYSSRGGGGGSYGGGRREGGGGYGGGEGGGYGGSGGGGGW

SEQ ID NO: 43295 - DNA, 1093 bp, Arabidopsis thaliana
  misc_feature (1)..(1093): Ceres Seq. ID no. 13647059
  misc_feature: MA Experiment ID: 20000234 Result: Up-regulated in Transcription
  misc_feature: MA Experiment 20000234 PARAMETER Experiment Name: At_Siliques_P Parameter: Age (day) Value: 21
  misc_feature: MA Experiment 20000234 PARAMETER Experiment Name: At_Siliques_P Parameter: Organism Value: A. thaliana
  misc_feature: MA Experiment 20000234 PARAMETER Experiment Name: At_Siliques_P Parameter: Plant Line Value: WS
  misc_feature: MA Experiment 20000234 PARAMETER Experiment Name: At_Siliques_P Parameter: Tissue Value: Less Than 5mm Siliques vs. Whole Plant
  misc_feature: MA Experiment ID: 20000264 Result: Up-regulated in Transcription
  misc_feature: MA Experiment 20000264 PARAMETER Experiment Name: At_Open_Flower_P Parameter: Age (day) Value: 21
  misc_feature: MA Experiment 20000264 PARAMETER Experiment Name: At_Open_Flower_P Parameter: Plant Line Value: WS
  misc_feature: MA Experiment 20000264 PARAMETER Experiment Name: At_Open_Flower_P Parameter: Tissue Value: Open Flower vs. Whole Plant
  misc_feature: MA Experiment ID: 20000265 Result: Up-regulated in Transcription
  misc_feature: MA Experiment 20000265 PARAMETER Experiment Name: At_Open_Flower_P Parameter: Age (day) Value: 21
  misc_feature: MA Experiment 20000265 PARAMETER Experiment Name: At_Open_Flower_P Parameter: Plant Line Value: WS
  misc_feature: MA Experiment 20000265 PARAMETER Experiment Name: At_Open_Flower_P Parameter: Tissue Value: Closed Flower vs. Whole Plant
  misc_feature: MA Experiment ID: 20000286 Result: Up-regulated in Transcription
  misc_feature: MA Experiment 20000286 PARAMETER Experiment Name: At_Open_Flower_P Parameter: Age (day) Value: 21
  misc_feature: MA Experiment 20000286 PARAMETER Experiment Name: At_Open_Flower_P Parameter: Plant Line Value: WS
  misc_feature: MA Experiment 20000286 PARAMETER Experiment Name: At_Open_Flower_P Parameter: Tissue Value: Half Open vs. Whole Plant
  misc_feature: MA Experiment ID: 20000438 Result: Down-regulated in Transcription
  misc_feature: MA Experiment 20000438 PARAMETER Experiment Name: At_Shoots__P Parameter: Age (day) Value: 14
  misc_feature: MA Experiment 20000438 PARAMETER Experiment Name: At_Shoots__P Parameter: Tissue Value: Shoots vs. Whole Plant
  misc_feature: MA Experiment ID: 20000443 Result: Down-regulated in Transcription
  misc_feature: MA Experiment 20000443 PARAMETER Experiment Name: At_1uM_BR-BRZ__P Parameter: Tissue Value: Shoot Apices
  misc_feature: MA Experiment 20000443 PARAMETER Experiment Name: At_1uM_BR-BRZ__P Parameter: Treatment Value: 1uM BRZ vs. No Treatment
  misc_feature: MA Experiment ID: 20000794 Result: Up-regulated in Transcription
  misc_feature: MA Experiment 20000794 PARAMETER Experiment Name: At_Petals_P Parameter: Age (day) Value: 23-25 days
  misc_feature: MA Experiment 20000794 PARAMETER Experiment Name: At_Petals_P Parameter: Plant Line Value: WS
  misc_feature: MA Experiment 20000794 PARAMETER Experiment Name: At_Petals_P Parameter: Tissue Value: Petals vs. Whole plant
  misc_feature: MA Experiment ID: 20001906 Result: Up-regulated in Transcription
  misc_feature: MA Experiment 20001906 PARAMETER Experiment Name: At_Drought_Reproduction_P Parameter: Age (day) Value: 35
  misc_feature: MA Experiment 20001906 PARAMETER Experiment Name: At_Drought_Reproduction_P Parameter: Organism Value: A. thaliana
  misc_feature: MA Experiment 20001906 PARAMETER Experiment Name: At_Drought_Reproduction_P Parameter: Plant Line Value: WS
  misc_feature: MA Experiment 20001906 PARAMETER Experiment Name: At_Drought_Reproduction_P Parameter: Timepoint (day) Value: 5
  misc_feature: MA Experiment 20001906 PARAMETER Experiment Name: At_Drought_Reproduction_P Parameter: Tissue Value: Siliques
  misc_feature: MA Experiment 20001906 PARAMETER Experiment Name: At_Drought_Reproduction_P Parameter: Treatment Value: Drought vs. No Drought
atttatcgtgtacgatactttattccttttatctattcttgaaaaaaagttaccaattcttgagaagaagaagaaatcagaatcaagagaaggagagagaaagatgggaagagggagagtggagatgaagaggatagagaacaagattaatagacaagtgaccttctcaaaaagaagaaacggtttgctgaagaaagcttatgagctttctgttctttgcgatgccgaagttgctctcatcatcttctcaagccgtggcaagctctacgagtttggtagtgttggaattgaaagcacaatcgaacggtataatcgttgttacaactgctctctaagcaataataagcctgaagagactacacagagttggtgtcaggaggtgacaaagcttaaatccaaatacgaatctcttgttcgtactaacaggaatttgcttggagaagatcttggagaaatgggtgtgaaggaactgcaagcgctcgagaggcagctcgaagccgctcttaccgcgactcgacagcgcaagacacaagttatgatggaagaaatggaagaccttaggaaaaaggagaggcaactaggagacataaacaaacaactcaagattaagtttgaaacggaaggccatgctttcaaaacctttcaagacttatgggcaaactcggcggcatcggtggccggggatccaaacaattctgaatttccggtagagccttctcatcctaatgtattggattgcaacaccgaaccctttttacaaatagggtttcaacaacattactacgtgcaaggtgaagggtcttcggtatcaaagagtaacgtggcaggtgagactaatttcgtccaaggttgggttctttgactctctgttgattagaccacgatgccacggtcaggccaatttcagctctctacagttgttcttttttcaaattagatttctgggtttttttttcctataagaaaaacttttgcactagatgtttgtcatttaatttccagctcgtgtgaatctatattcgcatgtatgtgctttgaagaatttctcctcttactcctacttgatctaaaacattatttttgttttggtttt

SEQ ID NO: 43296 - protein, 286 aa, Arabidopsis thaliana
  peptide (1)..(286): Ceres Seq. ID no. 13647060
  misc_feature (107)..(206): Pfam Name: K-box region Pfam Description: K-box region
  misc_feature (35)..(286): Homolog of NCBI NO: 27804371 NR Description: MADS-box transcription factor CDM104
  misc_feature (35)..(286): Homolog of NCBI NO: 7446517 NR Description: MADS box protein - rice
  misc_feature (35)..(286): Homolog of NCBI NO: 29467050 NR Description: MADS-box transcription factor SEP1 [Agapanthus
  misc_feature (35)..(286): Homolog of NCBI NO: 7544096 NR Description: pMADS4 [Petunia x hybrida]
  misc_feature (35)..(282): Homolog of NCBI NO: 15233045 NR Description: MADS-box protein, AGL13 [Arabidopsis thaliana]
  misc_feature (35)..(286): Homolog of NCBI NO: 3646340 NR Description: MADS-box protein [Malus x domestica]
  misc_feature (35)..(286): Homolog of NCBI NO: 20385586 NR Description: MADS-box protein 3 [Vitis vinifera]
  misc_feature (35)..(286): Homolog of NCBI NO: 23304692 NR Description: MADS-box protein AGL6-a [Brassica oleracea var.
  misc_feature (35)..(286): Homolog of NCBI NO: 23304710 NR Description: MADS-box protein AGL6-a [Brassica oleracea var.
  misc_feature (35)..(286): Homolog of NCBI NO: 15225532 NR Description: MADS-box protein (AGL6) [Arabidopsis thaliana]
FIVYDTLFLLSILEKKLPILEKKKKSESREGERKMGRGRVEMKRIENKINRQVTFSKRRNGLLKKAYELSVLCDAEVALIIFSSRGKLYEFGSVGIESTIERYNRCYNCSLSNNKPEETTQSWCQEVTKLKSKYESLVRTNRNLLGEDLGEMGVKELQALERQLEAALTATRQRKTQVMMEEMEDLRKKERQLGDINKQLKIKFETEGHAFKTFQDLWANSAASVAGDPNNSEFPVEPSHPNVLDCNTEPFLQIGFQQHYYVQGEGSSVSKSNVAGETNFVQGWVL

SEQ ID NO: 43297 - protein, 252 aa, Arabidopsis thaliana
  peptide (1)..(252): Ceres Seq. ID no. 13647061
  misc_feature (73)..(172): Pfam Name: K-box region Pfam Description: K-box region
  misc_feature (1)..(252): Homolog of NCBI NO: 27804371 NR Description: MADS-box transcription factor CDM104
  misc_feature (1)..(252): Homolog of NCBI NO: 7446517 NR Description: MADS box protein - rice
  misc_feature (1)..(252): Homolog of NCBI NO: 29467050 NR Description: MADS-box transcription factor SEP1 [Agapanthus
  misc_feature (1)..(252): Homolog of NCBI NO: 7544096 NR Description: pMADS4 [Petunia x hybrida]
  misc_feature (1)..(248): Homolog of NCBI NO: 15233045 NR Description: MADS-box protein, AGL13 [Arabidopsis thaliana]
  misc_feature (1)..(252): Homolog of NCBI NO: 3646340 NR Description: MADS-box protein [Malus x domestica]
  misc_feature (1)..(252): Homolog of NCBI NO: 20385586 NR Description: MADS-box protein 3 [Vitis vinifera]
  misc_feature (1)..(252): Homolog of NCBI NO: 23304692 NR Description: MADS-box protein AGL6-a [Brassica oleracea var.
  misc_feature (1)..(252): Homolog of NCBI NO: 23304710 NR Description: MADS-box protein AGL6-a [Brassica oleracea var.
  misc_feature (1)..(252): Homolog of NCBI NO: 15225532 NR Description: MADS-box protein (AGL6) [Arabidopsis thaliana]
MGRGRVEMKRIENKINRQVTFSKRRNGLLKKAYELSVLCDAEVALIIFSSRGKLYEFGSVGIESTIERYNRCYNCSLSNNKPEETTQSWCQEVTKLKSKYESLVRTNRNLLGEDLGEMGVKELQALERQLEAALTATRQRKTQVMMEEMEDLRKKERQLGDINKQLKIKFETEGHAFKTFQDLWANSAASVAGDPNNSEFPVEPSHPNVLDCNTEPFLQIGFQQHYYVQGEGSSVSKSNVAGETNFVQGWVL

SEQ ID NO: 43298 - protein, 245 aa, Arabidopsis thaliana
  peptide (1)..(245): Ceres Seq. ID no. 13647062
  misc_feature (66)..(165): Pfam Name: K-box region Pfam Description: K-box region
  misc_feature (1)..(245): Homolog of NCBI NO: 27804371 NR Description: MADS-box transcription factor CDM104
  misc_feature (1)..(245): Homolog of NCBI NO: 7446517 NR Description: MADS box protein - rice
  misc_feature (1)..(245): Homolog of NCBI NO: 29467050 NR Description: MADS-box transcription factor SEP1 [Agapanthus
  misc_feature (1)..(245): Homolog of NCBI NO: 7544096 NR Description: pMADS4 [Petunia x hybrida]
  misc_feature (1)..(241): Homolog of NCBI NO: 15233045 NR Description: MADS-box protein, AGL13 [Arabidopsis thaliana]
  misc_feature (1)..(245): Homolog of NCBI NO: 3646340 NR Description: MADS-box protein [Malus x domestica]
  misc_feature (1)..(245): Homolog of NCBI NO: 20385586 NR Description: MADS-box protein 3 [Vitis vinifera]
  misc_feature (1)..(245): Homolog of NCBI NO: 23304692 NR Description: MADS-box protein AGL6-a [Brassica oleracea var.
  misc_feature (1)..(245): Homolog of NCBI NO: 23304710 NR Description: MADS-box protein AGL6-a [Brassica oleracea var.
  misc_feature (1)..(245): Homolog of NCBI NO: 15225532 NR Description: MADS-box protein (AGL6) [Arabidopsis thaliana]
MKRIENKINRQVTFSKRRNGLLKKAYELSVLCDAEVALIIFSSRGKLYEFGSVGIESTIERYNRCYNCSLSNNKPEETTQSWCQEVTKLKSKYESLVRTNRNLLGEDLGEMGVKELQALERQLEAALTATRQRKTQVMMEEMEDLRKKERQLGDINKQLKIKFETEGHAFKTFQDLWANSAASVAGDPNNSEFPVEPSHPNVLDCNTEPFLQIGFQQHYYVQGEGSSVSKSNVAGETNFVQGWVL

SEQ ID NO: 43299 - DNA, 1678 bp, Arabidopsis thaliana
  misc_feature (1)..(1678): Ceres Seq. ID no. 12700553
  misc_feature: MA Experiment ID: 108572 Result: Down-regulated in Transcription
  misc_feature: MA Experiment 108572 PARAMETER Experiment Name: At_Drought_cDNA_P Parameter: Timepoint (hr) Value: 1
  misc_feature: MA Experiment 108572 PARAMETER Experiment Name: At_Drought_cDNA_P Parameter: Tissue Value: Aerial
  misc_feature: MA Experiment 108572 PARAMETER Experiment Name: At_Drought_cDNA_P Parameter: Treatment Value: Drought vs. No Drought
  misc_feature: MA Experiment ID: 108579 Result: Up-regulated in Transcription
  misc_feature: MA Experiment 108579 PARAMETER Experiment Name: At_4deg_Cold_cDNA_P Parameter: Temperature (deg C) Value: 4 vs. 22
  misc_feature: MA Experiment 108579 PARAMETER Experiment Name: At_4deg_Cold_cDNA_P Parameter: Timepoint (hr) Value: 6
  misc_feature: MA Experiment 108579 PARAMETER Experiment Name: At_4deg_Cold_cDNA_P Parameter: Tissue Value: Aerial
  misc_feature: MA Experiment ID: 108585 Result: Up-regulated in Transcription
  misc_feature: MA Experiment 108585 PARAMETER Experiment Name: At_5mM_NaNP_cDNA_P Parameter: Timepoint (hr) Value: 6
  misc_feature: MA Experiment 108585 PARAMETER Experiment Name: At_5mM_NaNP_cDNA_P Parameter: Tissue Value: Aerial
  misc_feature: MA Experiment 108585 PARAMETER Experiment Name: At_5mM_NaNP_cDNA_P Parameter: Treatment Value: null
  misc_feature: MA Experiment ID: 20000227 Result: Up-regulated in Transcription
  misc_feature: MA Experiment 20000227 PARAMETER Experiment Name: At_Root-Tips-vs-Tops_P Parameter: Tissue Value: Root Tips vs. Root Tops
  misc_feature: MA Experiment ID: 20000438 Result: Down-regulated in Transcription
  misc_feature: MA Experiment 20000438 PARAMETER Experiment Name: At_Shoots__P Parameter: Age (day) Value: 14
  misc_feature: MA Experiment 20000438 PARAMETER Experiment Name: At_Shoots__P Parameter: Tissue Value: Shoots vs. Whole Plant
  misc_feature: MA Experiment ID: 20001557 Result: Up-regulated in Transcription
  misc_feature: MA Experiment 20001557 PARAMETER Experiment Name: At_Drought_Soil_Dry_P Parameter: Age (day) Value: 27
  misc_feature: MA Experiment 20001557 PARAMETER Experiment Name: At_Drought_Soil_Dry_P Parameter: Organism Value: A. thaliana
  misc_feature: MA Experiment 20001557 PARAMETER Experiment Name: At_Drought_Soil_Dry_P Parameter: Plant Line Value: WS
  misc_feature: MA Experiment 20001557 PARAMETER Experiment Name: At_Drought_Soil_Dry_P Parameter: Post Timepoint (hr) Value: 3
  misc_feature: MA Experiment 20001557 PARAMETER Experiment Name: At_Drought_Soil_Dry_P Parameter: Post-Treatment Value: Re-Water vs. No Drought
  misc_feature: MA Experiment 20001557 PARAMETER Experiment Name: At_Drought_Soil_Dry_P Parameter: Timepoint (day) Value: 13
  misc_feature: MA Experiment 20001557 PARAMETER Experiment Name: At_Drought_Soil_Dry_P Parameter: Treatment Value: Drought vs. No Drought
  misc_feature: MA Experiment ID: 20001558 Result: Up-regulated in Transcription
  misc_feature: MA Experiment 20001558 PARAMETER Experiment Name: At_Drought_Soil_Dry_P Parameter: Age (day) Value: 27
  misc_feature: MA Experiment 20001558 PARAMETER Experiment Name: At_Drought_Soil_Dry_P Parameter: Organism Value: A. thaliana
  misc_feature: MA Experiment 20001558 PARAMETER Experiment Name: At_Drought_Soil_Dry_P Parameter: Plant Line Value: WS
  misc_feature: MA Experiment 20001558 PARAMETER Experiment Name: At_Drought_Soil_Dry_P Parameter: Post Timepoint (hr) Value: 6
  misc_feature: MA Experiment 20001558 PARAMETER Experiment Name: At_Drought_Soil_Dry_P Parameter: Post-Treatment Value: Re-Water vs. No Drought
  misc_feature: MA Experiment 20001558 PARAMETER Experiment Name: At_Drought_Soil_Dry_P Parameter: Timepoint (day) Value: 13
  misc_feature: MA Experiment 20001558 PARAMETER Experiment Name: At_Drought_Soil_Dry_P Parameter: Treatment Value: Drought vs. No Drought
  misc_feature: MA Experiment ID: 20001560 Result: Up-regulated in Transcription
  misc_feature: MA Experiment 20001560 PARAMETER Experiment Name: At_Drought_Soil_Dry_P Parameter: Age (day) Value: 28
  misc_feature: MA Experiment 20001560 PARAMETER Experiment Name: At_Drought_Soil_Dry_P Parameter: Organism Value: A. thaliana
  misc_feature: MA Experiment 20001560 PARAMETER Experiment Name: At_Drought_Soil_Dry_P Parameter: Plant Line Value: WS
  misc_feature: MA Experiment 20001560 PARAMETER Experiment Name: At_Drought_Soil_Dry_P Parameter: Post Timepoint (hr) Value: None
  misc_feature: MA Experiment 20001560 PARAMETER Experiment Name: At_Drought_Soil_Dry_P Parameter: Post-Treatment Value: None
  misc_feature: MA Experiment 20001560 PARAMETER Experiment Name: At_Drought_Soil_Dry_P Parameter: Timepoint (day) Value: 14
  misc_feature: MA Experiment 20001560 PARAMETER Experiment Name: At_Drought_Soil_Dry_P Parameter: Treatment Value: Drought vs. No Drought
ccttttaagaccaaatctctctctacctctatctctctctccgccattaccagagctcaacgagctctcactttctttacgcacacttgttggaacgaaatatattcatagagaagaagaatctcgaaactcttgaatctaaaacaactcggagactctgttttccctttccggagatcagatcggatcaagatgcagacaaccaacggctcagattcgacgttggcaacttccggagccacaccgccgaatcaacaaacccctcctccacctcagcagtggcagcagcagcaacagcaacagcaacagtggatggctgccatgcaatatccaccagcggcggcgatgatgatgatgcagcagcaacagatgctgatgtatcctcatcaatatgttccgtataatcaaggtccttatcagcagcatcatcctcagcttcaccaatacgggtcttatcaacagcaccagcaccagcaacacaaggctattgaccgtggatctggagatgatgtcaagactctttgggttggtgatcttcttcattggatggatgagacttatctccattcttgcttttctcacaccggcgaggtttcttctgtgaaagttatacgtaacaagctcacttctcaatcagaagggtatgggtttgttgagtttctttcacgtgctgcagctgaagaagttcttcagaactatagtggttcagtgatgccaaactcggaccaacccttccgtataaactgggcatcttttagtactggtgaaaaaagagcagtggaaaatggtccagacctatctgtttttgtgggagacttgtctccagatgtcactgacgttttattgcatgagaccttttctgatagatatccttctgtcaaaagcgccaaagttgtgattgattccaacaccggccggtccaaaggttatggttttgtgaggttcggtgatgaaaatgagaggtcaagggctttgacagaaatgaatggagcttactgttcgaacaggcaaatgcgtgtaggtattgcaactcccaaaagagcgattgctaatcagcaacaacattcttcacaagctgtgattctggctggtggacatggatcaaatggttccatgggttatggctcgcagtctgatggcgaatcaactaacgcaacaatatttgttggcggcattgaccctgatgttattgatgaagacctcagacaacctttttcccagtttggagaggttgtttcagtgaagatcccagtagggaaaggatgtggatttgtccaatttgctgacaggaagagtgctgaagatgctatcgagagtttgaacgggacagtcatcggcaagaacactgtcagactctcctggggacgaagcccaaacaagcagtggagaggagactcagggcagcagtggaatggaggatactcacgaggacatggttacaacaatggaggaggatatgctaaccaccacgactccaacaactatcatggggagaattgaagagactcatcaagtgatcatcttcatcatggtttcacatatcaaagctaaaacctgtagtcgaaagaagaattttgttagatggatttgattttgatagacttgttgtttggaggagattcaaaaattttggttactggtttgtctcagactaatataaatggttgcaacttgttgg

SEQ ID NO: 43300 - protein, 435 aa, Arabidopsis thaliana
  peptide (1)..(435): Ceres Seq. ID no. 12700554
  misc_feature (204)..(276): Pfam Name: RNA recognition motif. (a.k.a. RRM, RBD, or RNP domain) Pfam Description: RNA recognition motif. (a.k.a. RRM, RBD, or RNP
  misc_feature (1)..(431): Homolog of NCBI NO: 25386576 NR Description: probable RNA binding protein [imported] -
  misc_feature (1)..(431): Homolog of NCBI NO: 15594035 NR Description: nucleic acid binding protein [Nicotiana tabacum]
  misc_feature (28)..(422): Homolog of NCBI NO: 40804404 NR Description: DNA-binding protein [Lycopersicon esculentum]
  misc_feature (20)..(431): Homolog of NCBI NO: 7489112 NR Description: DNA binding protein ACBF - common tobacco
  misc_feature (20)..(431): Homolog of NCBI NO: 9663769 NR Description: RNA Binding Protein 47 [Nicotiana plumbaginifolia]
  misc_feature (20)..(431): Homolog of NCBI NO: 7489196 NR Description: RNA binding protein homolog - common tobacco
  misc_feature (1)..(431): Homolog of NCBI NO: 15222783 NR Description: RNA binding protein 47 (RBP47), putative; protein
  misc_feature (44)..(435): Homolog of NCBI NO: 21618243 NR Description: nuclear acid binding protein, putative
  misc_feature (1)..(435): Homolog of NCBI NO: 15230291 NR Description: RNA binding protein 47 (RBP47), putative
  misc_feature (1)..(397): Homolog of NCBI NO: 9294614 NR Description: DNA/RNA binding protein-like [Arabidopsis
MQTTNGSDSTLATSGATPPNQQTPPPPQQWQQQQQQQQQWMAAMQYPPAAAMMMMQQQQMLMYPHQYVPYNQGPYQQHHPQLHQYGSYQQHQHQQHKAIDRGSGDDVKTLWVGDLLHWMDETYLHSCFSHTGEVSSVKVIRNKLTSQSEGYGFVEFLSRAAAEEVLQNYSGSVMPNSDQPFRINWASFSTGEKRAVENGPDLSVFVGDLSPDVTDVLLHETFSDRYPSVKSAKVVIDSNTGRSKGYGFVRFGDENERSRALTEMNGAYCSNRQMRVGIATPKRAIANQQQHSSQAVILAGGHGSNGSMGYGSQSDGESTNATIFVGGIDPDVIDEDLRQPFSQFGEVVSVKIPVGKGCGFVQFADRKSAEDAIESLNGTVIGKNTVRLSWGRSPNKQWRGDSGQQWNGGYSRGHGYNNGGGYANHHDSNNYHGEN

SEQ ID NO: 43301 - protein, 395 aa, Arabidopsis thaliana; identical to SEQ ID NO: 41131
  peptide (1)..(395): Ceres Seq. ID no. 12700555
  misc_feature (164)..(236): Pfam Name: RNA recognition motif. (a.k.a. RRM, RBD, or RNP domain) Pfam Description: RNA recognition motif. (a.k.a. RRM, RBD, or RNP
  misc_feature (1)..(391): Homolog of NCBI NO: 25386576 NR Description: probable RNA binding protein [imported] -
  misc_feature (1)..(391): Homolog of NCBI NO: 15594035 NR Description: nucleic acid binding protein [Nicotiana tabacum]
  misc_feature (1)..(382): Homolog of NCBI NO: 40804404 NR Description: DNA-binding protein [Lycopersicon esculentum]
  misc_feature (1)..(391): Homolog of NCBI NO: 7489112 NR Description: DNA binding protein ACBF - common tobacco
  misc_feature (1)..(391): Homolog of NCBI NO: 9663769 NR Description: RNA Binding Protein 47 [Nicotiana plumbaginifolia]
  misc_feature (1)..(391): Homolog of NCBI NO: 7489196 NR Description: RNA binding protein homolog - common tobacco
  misc_feature (1)..(391): Homolog of NCBI NO: 15222783 NR Description: RNA binding protein 47 (RBP47), putative; protein
  misc_feature (4)..(395): Homolog of NCBI NO: 21618243 NR Description: nuclear acid binding protein, putative
  misc_feature (1)..(395): Homolog of NCBI NO: 15230291 NR Description: RNA binding protein 47 (RBP47), putative
  misc_feature (1)..(357): Homolog of NCBI NO: 9294614 NR Description: DNA/RNA binding protein-like [Arabidopsis

SEQ ID NO: 43302 - protein, 392 aa, Arabidopsis thaliana; identical to SEQ ID NO: 41132
  peptide (1)..(392): Ceres Seq. ID no. 12700556
  misc_feature (161)..(233): Pfam Name: RNA recognition motif. (a.k.a. RRM, RBD, or RNP domain) Pfam Description: RNA recognition motif. (a.k.a. RRM, RBD, or RNP
  misc_feature (1)..(388): Homolog of NCBI NO: 25386576 NR Description: probable RNA binding protein [imported] -
  misc_feature (1)..(388): Homolog of NCBI NO: 15594035 NR Description: nucleic acid binding protein [Nicotiana tabacum]
  misc_feature (1)..(379): Homolog of NCBI NO: 40804404 NR Description: DNA-binding protein [Lycopersicon esculentum]
  misc_feature (1)..(388): Homolog of NCBI NO: 7489112 NR Description: DNA binding protein ACBF - common tobacco
  misc_feature (1)..(388): Homolog of NCBI NO: 9663769 NR Description: RNA Binding Protein 47 [Nicotiana plumbaginifolia]
  misc_feature (1)..(388): Homolog of NCBI NO: 7489196 NR Description: RNA binding protein homolog - common tobacco
  misc_feature (1)..(388): Homolog of NCBI NO: 15222783 NR Description: RNA binding protein 47 (RBP47), putative; protein
  misc_feature (1)..(392): Homolog of NCBI NO: 21618243 NR Description: nuclear acid binding protein, putative
  misc_feature (1)..(392): Homolog of NCBI NO: 15230291 NR Description: RNA binding protein 47 (RBP47), putative
  misc_feature (1)..(354): Homolog of NCBI NO: 9294614 NR Description: DNA/RNA binding protein-like [Arabidopsis

SEQ ID NO: 43303 - DNA, 1903 bp, Arabidopsis thaliana; identical to SEQ ID NO: 40379
  misc_feature (1)..(1903): Ceres Seq. ID no. 12336176
  misc_feature: MA Experiment ID: 108579 Result: Down-regulated in Transcription
  misc_feature: MA Experiment 108579 PARAMETER Experiment Name: At_4deg_Cold_cDNA_P Parameter: Temperature (deg C) Value: 4 vs. 22
  misc_feature: MA Experiment 108579 PARAMETER Experiment Name: At_4deg_Cold_cDNA_P Parameter: Timepoint (hr) Value: 6
  misc_feature: MA Experiment 108579 PARAMETER Experiment Name: At_4deg_Cold_cDNA_P Parameter: Tissue Value: Aerial
  misc_feature: MA Experiment ID: 108594 Result: Up-regulated in Transcription
  misc_feature: MA Experiment 108594 PARAMETER Experiment Name: At_Ler-rhl_Root_cDNA_P Parameter: Plant Line Value: null
  misc_feature: MA Experiment ID: 20000307 Result: Up-regulated in Transcription
  misc_feature: MA Experiment 20000307 PARAMETER Experiment Name: At_Germinating_Seeds_Sub_P Parameter: Age (hr) Value: 24 vs. 0
  misc_feature: MA Experiment 20000307 PARAMETER Experiment Name: At_Germinating_Seeds_Sub_P Parameter: Organism Value: A. thaliana
  misc_feature: MA Experiment 20000307 PARAMETER Experiment Name: At_Germinating_Seeds_Sub_P Parameter: Plant Line Value: WS
  misc_feature: MA Experiment 20000307 PARAMETER Experiment Name: At_Germinating_Seeds_Sub_P Parameter: Tissue Value: Germinating Seeds
  misc_feature: MA Experiment ID: 20000440 Result: Up-regulated in Transcription
  misc_feature: MA Experiment 20000440 PARAMETER Experiment Name: At_Closed-Flower__Sub_P Parameter: Tissue Value: Closed Flower vs. Whole Plant
  misc_feature: MA Experiment ID: 20001806 Result: Up-regulated in Transcription
  misc_feature: MA Experiment 20001806 PARAMETER Experiment Name: At_50mM_NH4NO3_L-to-H_Sub_P Parameter: Timepoint (hr) Value: 4
  misc_feature: MA Experiment 20001806 PARAMETER Experiment Name: At_50mM_NH4NO3_L-to-H_Sub_P Parameter: Tissue Value: Leaf
  misc_feature: MA Experiment 20001806 PARAMETER Experiment Name: At_50mM_NH4NO3_L-to-H_Sub_P Parameter: Treatment Value: 50mM NH4NO3 vs 100mM Mannitol
  misc_feature: MA Experiment ID: 20001807 Result: Up-regulated in Transcription
  misc_feature: MA Experiment 20001807 PARAMETER Experiment Name: At_50mM_NH4NO3_L-to-H_Sub_P Parameter: Timepoint (hr) Value: 6
  misc_feature: MA Experiment 20001807 PARAMETER Experiment Name: At_50mM_NH4NO3_L-to-H_Sub_P Parameter: Tissue Value: Leaf
  misc_feature: MA Experiment 20001807 PARAMETER Experiment Name: At_50mM_NH4NO3_L-to-H_Sub_P Parameter: Treatment Value: 50mM NH4NO3 vs 100mM Mannitol

SEQ ID NO: 43304 - protein, 595 aa, Arabidopsis thaliana; identical to SEQ ID NO: 40380
  peptide (1)..(595): Ceres Seq. ID no. 12336177
  misc_feature (56)..(455): Homolog of NCBI NO: 22330822 NR Description: putative cationic amino acid transporter
  misc_feature (119)..(574): Homolog of NCBI NO: 19699365 NR Description: At2g34960/F19I3.19 [Arabidopsis thaliana]
  misc_feature (26)..(574): Homolog of NCBI NO: 15220035 NR Description: putative amino acid transporter
  misc_feature (26)..(580): Homolog of NCBI NO: 34903850 NR Description: unnamed protein product [Oryza sativa (japonica
  misc_feature (26)..(574): Homolog of NCBI NO: 15226868 NR Description: putative amino acid transporter
  misc_feature (61)..(594): Homolog of NCBI NO: 1076291 NR Description: amino acid transport protein AAT1 - Arabidopsis
  misc_feature (26)..(594): Homolog of NCBI NO: 30685317 NR Description: amino acid transport protein AAT1 [Arabidopsis
  misc_feature (28)..(578): Homolog of NCBI NO: 38345948 NR Description: OSJNBb0103I08.20 [Oryza sativa (japonica
  misc_feature (13)..(595): Homolog of NCBI NO: 15228334 NR Description: putative amino acid transporter; protein id:
  misc_feature (13)..(595): Homolog of NCBI NO: 15238312 NR Description: amino acid transport - like protein
  misc_feature (56)..(455): Homolog of NCBI NO: 22330822 NR Description: putative cationic amino acid transporter
  misc_feature (119)..(574): Homolog of NCBI NO: 19699365 NR Description: At2g34960/F19I3.19 [Arabidopsis thaliana]
  misc_feature (26)..(574): Homolog of NCBI NO: 15220035 NR Description: putative amino acid transporter
  misc_feature (26)..(580): Homolog of NCBI NO: 34903850 NR Description: unnamed protein product [Oryza sativa (japonica
  misc_feature (26)..(574): Homolog of NCBI NO: 15226868 NR Description: putative amino acid transporter
  misc_feature (61)..(594): Homolog of NCBI NO: 1076291 NR Description: amino acid transport protein AAT1 - Arabidopsis
  misc_feature (26)..(594): Homolog of NCBI NO: 30685317 NR Description: amino acid transport protein AAT1 [Arabidopsis
  misc_feature (28)..(578): Homolog of NCBI NO: 38345948 NR Description: OSJNBb0103I08.20 [Oryza sativa (japonica
  misc_feature (13)..(595): Homolog of NCBI NO: 15228334 NR Description: putative amino acid transporter; protein id:
  misc_feature (13)..(595): Homolog of NCBI NO: 15238312 NR Description: amino acid transport - like protein
  misc_feature (56)..(455): Homolog of NCBI NO: 22330822 NR Description: putative cationic amino acid transporter
  misc_feature (119)..(574): Homolog of NCBI NO: 19699365 NR Description: At2g34960/F19I3.19 [Arabidopsis thaliana]
  misc_feature (26)..(574): Homolog of NCBI NO: 15220035 NR Description: putative amino acid transporter
  misc_feature (26)..(580): Homolog of NCBI NO: 34903850 NR Description: unnamed protein product [Oryza sativa (japonica
  misc_feature (26)..(574): Homolog of NCBI NO: 15226868 NR Description: putative amino acid transporter
  misc_feature (61)..(594): Homolog of NCBI NO: 1076291 NR Description: amino acid transport protein AAT1 - Arabidopsis
  misc_feature (26)..(594): Homolog of NCBI NO: 30685317 NR Description: amino acid transport protein AAT1 [Arabidopsis
  misc_feature (28)..(578): Homolog of NCBI NO: 38345948 NR Description: OSJNBb0103I08.20 [Oryza sativa (japonica
  misc_feature (13)..(595): Homolog of NCBI NO: 15228334 NR Description: putative amino acid transporter; protein id:
  misc_feature (13)..(595): Homolog of NCBI NO: 15238312 NR Description: amino acid transport - like protein

SEQ ID NO: 43305 - protein, 583 aa, Arabidopsis thaliana; identical to SEQ ID NO: 40381
  peptide (1)..(583): Ceres Seq. ID no. 12336178
  misc_feature (44)..(443): Homolog of NCBI NO: 22330822 NR Description: putative cationic amino acid transporter
  misc_feature (107)..(562): Homolog of NCBI NO: 19699365 NR Description: At2g34960/F19I3.19 [Arabidopsis thaliana]
  misc_feature (14)..(562): Homolog of NCBI NO: 15220035 NR Description: putative amino acid transporter
  misc_feature (14)..(568): Homolog of NCBI NO: 34903850 NR Description: unnamed protein product [Oryza sativa (japonica
  misc_feature (14)..(562): Homolog of NCBI NO: 15226868 NR Description: putative amino acid transporter
  misc_feature (49)..(582): Homolog of NCBI NO: 1076291 NR Description: amino acid transport protein AAT1 - Arabidopsis
  misc_feature (14)..(582): Homolog of NCBI NO: 30685317 NR Description: amino acid transport protein AAT1 [Arabidopsis
  misc_feature (16)..(566): Homolog of NCBI NO: 38345948 NR Description: OSJNBb0103I08.20 [Oryza sativa (japonica
  misc_feature (1)..(583): Homolog of NCBI NO: 15228334 NR Description: putative amino acid transporter; protein id:
  misc_feature (1)..(583): Homolog of NCBI NO: 15238312 NR Description: amino acid transport - like protein
  misc_feature (44)..(443): Homolog of NCBI NO: 22330822 NR Description: putative cationic amino acid transporter
  misc_feature (107)..(562): Homolog of NCBI NO: 19699365 NR Description: At2g34960/F19I3.19 [Arabidopsis thaliana]
  misc_feature (14)..(562): Homolog of NCBI NO: 15220035 NR Description: putative amino acid transporter
  misc_feature (14)..(568): Homolog of NCBI NO: 34903850 NR Description: unnamed protein product [Oryza sativa (japonica
  misc_feature (14)..(562): Homolog of NCBI NO: 15226868 NR Description: putative amino acid transporter
  misc_feature (49)..(582): Homolog of NCBI NO: 1076291 NR Description: amino acid transport protein AAT1 - Arabidopsis
  misc_feature (14)..(582): Homolog of NCBI NO: 30685317 NR Description: amino acid transport protein AAT1 [Arabidopsis
  misc_feature (16)..(566): Homolog of NCBI NO: 38345948 NR Description: OSJNBb0103I08.20 [Oryza sativa (japonica
  misc_feature (1)..(583): Homolog of NCBI NO: 15228334 NR Description: putative amino acid transporter; protein id:
  misc_feature (1)..(583): Homolog of NCBI NO: 15238312 NR Description: amino acid transport - like protein
  misc_feature (44)..(443): Homolog of NCBI NO: 22330822 NR Description: putative cationic amino acid transporter
  misc_feature (107)..(562): Homolog of NCBI NO: 19699365 NR Description: At2g34960/F19I3.19 [Arabidopsis thaliana]
  misc_feature (14)..(562): Homolog of NCBI NO: 15220035 NR Description: putative amino acid transporter
  misc_feature (14)..(568): Homolog of NCBI NO: 34903850 NR Description: unnamed protein product [Oryza sativa (japonica
  misc_feature (14)..(562): Homolog of NCBI NO: 15226868 NR Description: putative amino acid transporter
  misc_feature (49)..(582): Homolog of NCBI NO: 1076291 NR Description: amino acid transport protein AAT1 - Arabidopsis
  misc_feature (14)..(582): Homolog of NCBI NO: 30685317 NR Description: amino acid transport protein AAT1 [Arabidopsis
  misc_feature (16)..(566): Homolog of NCBI NO: 38345948 NR Description: OSJNBb0103I08.20 [Oryza sativa (japonica
  misc_feature (1)..(583): Homolog of NCBI NO: 15228334 NR Description: putative amino acid transporter; protein id:
  misc_feature (1)..(583): Homolog of NCBI NO: 15238312 NR Description: amino acid transport - like protein

SEQ ID NO: 43306 - protein, 538 aa, Arabidopsis thaliana; identical to SEQ ID NO: 40382
  peptide (1)..(538): Ceres Seq. ID no. 12336179
  misc_feature (1)..(398): Homolog of NCBI NO: 22330822 NR Description: putative cationic amino acid transporter
  misc_feature (62)..(517): Homolog of NCBI NO: 19699365 NR Description: At2g34960/F19I3.19 [Arabidopsis thaliana]
  misc_feature (1)..(517): Homolog of NCBI NO: 15220035 NR Description: putative amino acid transporter
  misc_feature (1)..(523): Homolog of NCBI NO: 34903850 NR Description: unnamed protein product [Oryza sativa (japonica
  misc_feature (1)..(517): Homolog of NCBI NO: 15226868 NR Description: putative amino acid transporter
  misc_feature (4)..(537): Homolog of NCBI NO: 1076291 NR Description: amino acid transport protein AAT1 - Arabidopsis
  misc_feature (1)..(537): Homolog of NCBI NO: 30685317 NR Description: amino acid transport protein AAT1 [Arabidopsis
  misc_feature (1)..(521): Homolog of NCBI NO: 38345948 NR Description: OSJNBb0103I08.20 [Oryza sativa (japonica
  misc_feature (1)..(538): Homolog of NCBI NO: 15228334 NR Description: putative amino acid transporter; protein id:
  misc_feature (1)..(538): Homolog of NCBI NO: 15238312 NR Description: amino acid transport - like protein
  misc_feature (1)..(398): Homolog of NCBI NO: 22330822 NR Description: putative cationic amino acid transporter
  misc_feature (62)..(517): Homolog of NCBI NO: 19699365 NR Description: At2g34960/F19I3.19 [Arabidopsis thaliana]
  misc_feature (1)..(517): Homolog of NCBI NO: 15220035 NR Description: putative amino acid transporter
  misc_feature (1)..(523): Homolog of NCBI NO: 34903850 NR Description: unnamed protein product [Oryza sativa (japonica
  misc_feature (1)..(517): Homolog of NCBI NO: 15226868 NR Description: putative amino acid transporter
  misc_feature (4)..(537): Homolog of NCBI NO: 1076291 NR Description: amino acid transport protein AAT1 - Arabidopsis
  misc_feature (1)..(537): Homolog of NCBI NO: 30685317 NR Description: amino acid transport protein AAT1 [Arabidopsis
  misc_feature (1)..(521): Homolog of NCBI NO: 38345948 NR Description: OSJNBb0103I08.20 [Oryza sativa (japonica
  misc_feature (1)..(538): Homolog of NCBI NO: 15228334 NR Description: putative amino acid transporter; protein id:
  misc_feature (1)..(538): Homolog of NCBI NO: 15238312 NR Description: amino acid transport - like protein
  misc_feature (1)..(398): Homolog of NCBI NO: 22330822 NR Description: putative cationic amino acid transporter
  misc_feature (62)..(517): Homolog of NCBI NO: 19699365 NR Description: At2g34960/F19I3.19 [Arabidopsis thaliana]
  misc_feature (1)..(517): Homolog of NCBI NO: 15220035 NR Description: putative amino acid transporter
  misc_feature (1)..(523): Homolog of NCBI NO: 34903850 NR Description: unnamed protein product [Oryza sativa (japonica
  misc_feature (1)..(517): Homolog of NCBI NO: 15226868 NR Description: putative amino acid transporter
  misc_feature (4)..(537): Homolog of NCBI NO: 1076291 NR Description: amino acid transport protein AAT1 - Arabidopsis
  misc_feature (1)..(537): Homolog of NCBI NO: 30685317 NR Description: amino acid transport protein AAT1 [Arabidopsis
  misc_feature (1)..(521): Homolog of NCBI NO: 38345948 NR Description: OSJNBb0103I08.20 [Oryza sativa (japonica
  misc_feature (1)..(538): Homolog of NCBI NO: 15228334 NR Description: putative amino acid transporter; protein id:
  misc_feature (1)..(538): Homolog of NCBI NO: 15238312 NR Description: amino acid transport - like protein

SEQ ID NO: 43307 - DNA, 1279 bp, Arabidopsis thaliana
  misc_feature (1)..(1279): Ceres Seq. ID no. 12371362
  misc_feature: MA Experiment ID: 108474 Result: Up-regulated in Transcription
  misc_feature: MA Experiment 108474 PARAMETER Experiment Name: At_Drought_Flowers_cDNA_P Parameter: Timepoint (hr) Value: null
  misc_feature: MA Experiment 108474 PARAMETER Experiment Name: At_Drought_Flowers_cDNA_P Parameter: Treatment Value: Drought vs. No Drought
  misc_feature: MA Experiment ID: 108576 Result: Up-regulated in Transcription
  misc_feature: MA Experiment 108576 PARAMETER Experiment Name: At_42deg_Heat_cDNA_P Parameter: Temperature (deg C) Value: 42 vs. 22
  misc_feature: MA Experiment 108576 PARAMETER Experiment Name: At_42deg_Heat_cDNA_P Parameter: Timepoint (hr) Value: 1
  misc_feature: MA Experiment 108576 PARAMETER Experiment Name: At_42deg_Heat_cDNA_P Parameter: Tissue Value: Aerial
  misc_feature: MA Experiment ID: 108595 Result: Up-regulated in Transcription
  misc_feature: MA Experiment 108595 PARAMETER Experiment Name: At_Ler-pi_Ovule_cDNA_P Parameter: Plant Line Value: null
  misc_feature: MA Experiment ID: 20001450 Result: Up-regulated in Transcription
  misc_feature: MA Experiment 20001450 PARAMETER Experiment Name: At_Far-red-induction_P Parameter: Age (day) Value: 7
  misc_feature: MA Experiment 20001450 PARAMETER Experiment Name: At_Far-red-induction_P Parameter: Light Value: Far-red vs. White
  misc_feature: MA Experiment 20001450 PARAMETER Experiment Name: At_Far-red-induction_P Parameter: Organism Value: A. thaliana
  misc_feature: MA Experiment 20001450 PARAMETER Experiment Name: At_Far-red-induction_P Parameter: Plant Line Value: Columbia
  misc_feature: MA Experiment 20001450 PARAMETER Experiment Name: At_Far-red-induction_P Parameter: Timepoint (hr) Value: 8
  misc_feature: MA Experiment 20001450 PARAMETER Experiment Name: At_Far-red-induction_P Parameter: Tissue Value: Whole Plant
  misc_feature: MA Experiment ID: 20001556 Result: Down-regulated in Transcription
  misc_feature: MA Experiment 20001556 PARAMETER Experiment Name: At_Drought_Soil_Dry_P Parameter: Age (day) Value: 26
  misc_feature: MA Experiment 20001556 PARAMETER Experiment Name: At_Drought_Soil_Dry_P Parameter: Organism Value: A. thaliana
  misc_feature: MA Experiment 20001556 PARAMETER Experiment Name: At_Drought_Soil_Dry_P Parameter: Plant Line Value: WS
  misc_feature: MA Experiment 20001556 PARAMETER Experiment Name: At_Drought_Soil_Dry_P Parameter: Post Timepoint (hr) Value: None
  misc_feature: MA Experiment 20001556 PARAMETER Experiment Name: At_Drought_Soil_Dry_P Parameter: Post-Treatment Value: None
  misc_feature: MA Experiment 20001556 PARAMETER Experiment Name: At_Drought_Soil_Dry_P Parameter: Timepoint (day) Value: 12
  misc_feature: MA Experiment 20001556 PARAMETER Experiment Name: At_Drought_Soil_Dry_P Parameter: Treatment Value: Drought vs. No Drought
  misc_feature: MA Experiment ID: 20001557 Result: Down-regulated in Transcription
  misc_feature: MA Experiment 20001557 PARAMETER Experiment Name: At_Drought_Soil_Dry_P Parameter: Age (day) Value: 27
  misc_feature: MA Experiment 20001557 PARAMETER Experiment Name: At_Drought_Soil_Dry_P Parameter: Organism Value: A. thaliana
  misc_feature: MA Experiment 20001557 PARAMETER Experiment Name: At_Drought_Soil_Dry_P Parameter: Plant Line Value: WS
  misc_feature: MA Experiment 20001557 PARAMETER Experiment Name: At_Drought_Soil_Dry_P Parameter: Post Timepoint (hr) Value: 3
  misc_feature: MA Experiment 20001557 PARAMETER Experiment Name: At_Drought_Soil_Dry_P Parameter: Post-Treatment Value: Re-Water vs. No Drought
  misc_feature: MA Experiment 20001557 PARAMETER Experiment Name: At_Drought_Soil_Dry_P Parameter: Timepoint (day) Value: 13
  misc_feature: MA Experiment 20001557 PARAMETER Experiment Name: At_Drought_Soil_Dry_P Parameter: Treatment Value: Drought vs. No Drought
  misc_feature: MA Experiment ID: 20001558 Result: Down-regulated in Transcription
  misc_feature: MA Experiment 20001558 PARAMETER Experiment Name: At_Drought_Soil_Dry_P Parameter: Age (day) Value: 27
  misc_feature: MA Experiment 20001558 PARAMETER Experiment Name: At_Drought_Soil_Dry_P Parameter: Organism Value: A. thaliana
  misc_feature: MA Experiment 20001558 PARAMETER Experiment Name: At_Drought_Soil_Dry_P Parameter: Plant Line Value: WS
  misc_feature: MA Experiment 20001558 PARAMETER Experiment Name: At_Drought_Soil_Dry_P Parameter: Post Timepoint (hr) Value: 6
  misc_feature: MA Experiment 20001558 PARAMETER Experiment Name: At_Drought_Soil_Dry_P Parameter: Post-Treatment Value: Re-Water vs. No Drought
  misc_feature: MA Experiment 20001558 PARAMETER Experiment Name: At_Drought_Soil_Dry_P Parameter: Timepoint (day) Value: 13
  misc_feature: MA Experiment 20001558 PARAMETER Experiment Name: At_Drought_Soil_Dry_P Parameter: Treatment Value: Drought vs. No Drought
aactgaatttgaaagaaaaaaaaaaaagaaatcataaaatgagaatcaatatgttattcatagtggcattctcatttttagtctctgttcggtcattaccgatgagaccaactctaaagtacgagtcaatctttaattttggcgattctttaagcgataccggaaactttttattatccggtgatgttgactctccgaacattggaagactaccgtacggacaaaccttttttaaccgttccaccggtcgttgctctgacggacgtctcatcatcgatttcatcgctgaggctagtggactaccgtacattccaccgtatctccaaagcttacggacgaatgattcggtagatttcaagagaggtgcaaattttgcggtggctggagcaacagcgaacgaatttagcttctttaaaaacagaggtctttcagtaacattgttgacaaacaagacactggatattcaacttgattggttcaagaagttgaaaccttctctgtgtaaaaccaagccagaatgtgagcgatattttagaaaatctctatttctcgtcggagaaattagtggaaacgattataactaccctcttttggcattccgaagtttcaaacatgctatggatttggtaccatttgttattaacaaaatcatggacgtcacaagtgcattgatagaggaaggtgccatgacactaatagttccaggaaaccttccaatcggttgttctgcggctctactagagcggtttaatgataatagtggatggctttatgactcgaggaaccaatgctacatgccattgaacaatttggctaagcttcacaatgataagctcaagaaaggcctcgcggctctaagaaaaaagtacccttatgccaaaattatatatgctgattattacagttctgccatgcaattcttcaactcaccttccaaatacggtttcactggaagtgtcctaaaggcatgttgtggaggaggagatggaagatacaacgtgcaaccaaacgtgcggtgcggagaaaagggttcaaccacttgcgaagatccatcaacgtacgcaaattgggacggaattcacctcactgaagcggcttaccgccacattgcaactggtctcatctccggccgtttcaccatgcctacttataattaataacaattaagttactcataagttgtaactttttttttaacacacaaacttttcatataactcctaattgaaaacctataaatcgatcatatttatatcaagctcgttcgagagcataagcc

SEQ ID NO: 43308 - protein, 384 aa, Arabidopsis thaliana
  peptide (1)..(384): Ceres Seq. ID no. 12371363
  misc_feature (43)..(373): Pfam Name: GDSL-like Lipase/Acylhydrolase Pfam Description: GDSL-like Lipase/Acylhydrolase
  misc_feature (39)..(381): Homolog of NCBI NO: 34903994 NR Description: unnamed protein product [Oryza sativa (japonica
  misc_feature (15)..(384): Homolog of NCBI NO: 10764858 NR Description: F1K23.17 [Arabidopsis thaliana]
  misc_feature (15)..(384): Homolog of NCBI NO: 21593234 NR Description: lipase, putative [Arabidopsis thaliana]
  misc_feature (12)..(384): Homolog of NCBI NO: 10764854 NR Description: F1K23.13 [Arabidopsis thaliana]
  misc_feature (15)..(384): Homolog of NCBI NO: 15218753 NR Description: lipase, putative; protein id: At1g28650.1
  misc_feature (12)..(384): Homolog of NCBI NO: 15218756 NR Description: lipase; protein id: At1g28670.1, supported by
  misc_feature (13)..(381): Homolog of NCBI NO: 34903958 NR Description: OSJNBa0038J17.24 [Oryza sativa (japonica
  misc_feature (40)..(381): Homolog of NCBI NO: 34903978 NR Description: unnamed protein product [Oryza sativa (japonica
  misc_feature (17)..(384): Homolog of NCBI NO: 21553708 NR Description: GDSL-motif lipase/hydrolase-like protein
  misc_feature (13)..(384): Homolog of NCBI NO: 15242538 NR Description: GDSL-motif lipase/hydrolase-like protein
LNLKEKKKRNHKMRINMLFIVAFSFLVSVRSLPMRPTLKYESIFNFGDSLSDTGNFLLSGDVDSPNIGRLPYGQTFFNRSTGRCSDGRLIIDFIAEASGLPYIPPYLQSLRTNDSVDFKRGANFAVAGATANEFSFFKNRGLSVTLLTNKTLDIQLDWFKKLKPSLCKTKPECERYFRKSLFLVGEISGNDYNYPLLAFRSFKHAMDLVPFVINKIMDVTSALIEEGAMTLIVPGNLPIGCSAALLERFNDNSGWLYDSRNQCYMPLNNLAKLHNDKLKKGLAALRKKYPYAKIIYADYYSSAMQFFNSPSKYGFTGSVLKACCGGGDGRYNVQPNVRCGEKGSTTCEDPSTYANWDGIHLTEAAYRHIATGLISGRFTMPTYN

SEQ ID NO: 43309 - protein, 372 aa, Arabidopsis thaliana
  peptide (1)..(372): Ceres Seq. ID no. 12371364
  misc_feature (31)..(361): Pfam Name: GDSL-like Lipase/Acylhydrolase Pfam Description: GDSL-like Lipase/Acylhydrolase
  misc_feature (27)..(369): Homolog of NCBI NO: 34903994 NR Description: unnamed protein product [Oryza sativa (japonica
  misc_feature (3)..(372): Homolog of NCBI NO: 10764858 NR Description: F1K23.17 [Arabidopsis thaliana]
  misc_feature (3)..(372): Homolog of NCBI NO: 21593234 NR Description: lipase, putative [Arabidopsis thaliana]
  misc_feature (1)..(372): Homolog of NCBI NO: 10764854 NR Description: F1K23.13 [Arabidopsis thaliana]
  misc_feature (3)..(372): Homolog of NCBI NO: 15218753 NR Description: lipase, putative; protein id: At1g28650.1
  misc_feature (1)..(372): Homolog of NCBI NO: 15218756 NR Description: lipase; protein id: At1g28670.1, supported by
  misc_feature (1)..(369): Homolog of NCBI NO: 34903958 NR Description: OSJNBa0038J17.24 [Oryza sativa (japonica
  misc_feature (28)..(369): Homolog of NCBI NO: 34903978 NR Description: unnamed protein product [Oryza sativa (japonica
  misc_feature (5)..(372): Homolog of NCBI NO: 21553708 NR Description: GDSL-motif lipase/hydrolase-like protein
  misc_feature (1)..(372): Homolog of NCBI NO: 15242538 NR Description: GDSL-motif lipase/hydrolase-like protein
MRINMLFIVAFSFLVSVRSLPMRPTLKYESIFNFGDSLSDTGNFLLSGDVDSPNIGRLPYGQTFFNRSTGRCSDGRLIIDFIAEASGLPYIPPYLQSLRTNDSVDFKRGANFAVAGATANEFSFFKNRGLSVTLLTNKTLDIQLDWFKKLKPSLCKTKPECERYFRKSLFLVGEISGNDYNYPLLAFRSFKHAMDLVPFVINKIMDVTSALIEEGAMTLIVPGNLPIGCSAALLERFNDNSGWLYDSRNQCYMPLNNLAKLHNDKLKKGLAALRKKYPYAKIIYADYYSSAMQFFNSPSKYGFTGSVLKACCGGGDGRYNVQPNVRCGEKGSTTCEDPSTYANWDGIHLTEAAYRHIATGLISGRFTMPTYN

SEQ ID NO: 43310 - protein, 368 aa, Arabidopsis thaliana
  peptide (1)..(368): Ceres Seq. ID no. 12371365
  misc_feature (27)..(357): Pfam Name: GDSL-like Lipase/Acylhydrolase Pfam Description: GDSL-like Lipase/Acylhydrolase
  misc_feature (23)..(365): Homolog of NCBI NO: 34903994 NR Description: unnamed protein product [Oryza sativa (japonica
  misc_feature (1)..(368): Homolog of NCBI NO: 10764858 NR Description: F1K23.17 [Arabidopsis thaliana]
  misc_feature (1)..(368): Homolog of NCBI NO: 21593234 NR Description: lipase, putative [Arabidopsis thaliana]
  misc_feature (1)..(368): Homolog of NCBI NO: 10764854 NR Description: F1K23.13 [Arabidopsis thaliana]
  misc_feature (1)..(368): Homolog of NCBI NO: 15218753 NR Description: lipase, putative; protein id: At1g28650.1
  misc_feature (1)..(368): Homolog of NCBI NO: 15218756 NR Description: lipase; protein id: At1g28670.1, supported by
  misc_feature (1)..(365): Homolog of NCBI NO: 34903958 NR Description: OSJNBa0038J17.24 [Oryza sativa (japonica
  misc_feature (24)..(365): Homolog of NCBI NO: 34903978 NR Description: unnamed protein product [Oryza sativa (japonica
  misc_feature (1)..(368): Homolog of NCBI NO: 21553708 NR Description: GDSL-motif lipase/hydrolase-like protein
  misc_feature (1)..(368): Homolog of NCBI NO: 15242538 NR Description: GDSL-motif lipase/hydrolase-like protein
MLFIVAFSFLVSVRSLPMRPTLKYESIFNFGDSLSDTGNFLLSGDVDSPNIGRLPYGQTFFNRSTGRCSDGRLIIDFIAEASGLPYIPPYLQSLRTNDSVDFKRGANFAVAGATANEFSFFKNRGLSVTLLTNKTLDIQLDWFKKLKPSLCKTKPECERYFRKSLFLVGEISGNDYNYPLLAFRSFKHAMDLVPFVINKIMDVTSALIEEGAMTLIVPGNLPIGCSAALLERFNDNSGWLYDSRNQCYMPLNNLAKLHNDKLKKGLAALRKKYPYAKIIYADYYSSAMQFFNSPSKYGFTGSVLKACCGGGDGRYNVQPNVRCGEKGSTTCEDPSTYANWDGIHLTEAAYRHIATGLISGRFTMPTYN

SEQ ID NO: 43311 - DNA, 1620 bp, Arabidopsis thaliana
  misc_feature (1)..(1620): Ceres Seq. ID no. 12339135
  misc_feature: MA Experiment ID: 20000179 Result: Up-regulated in Transcription
  misc_feature: MA Experiment 20000179 PARAMETER Experiment Name: At_Germinating_Seeds_P Parameter: Age (hr) Value: 6 vs. 0
  misc_feature: MA Experiment 20000179 PARAMETER Experiment Name: At_Germinating_Seeds_P Parameter: Tissue Value: Germinating Seeds
  misc_feature: MA Experiment ID: 20000180 Result: Up-regulated in Transcription
  misc_feature: MA Experiment 20000180 PARAMETER Experiment Name: At_Germinating_Seeds_P Parameter: Age (hr) Value: 24 vs. 0
  misc_feature: MA Experiment 20000180 PARAMETER Experiment Name: At_Germinating_Seeds_P Parameter: Tissue Value: Germinating Seeds
  misc_feature: MA Experiment ID: 20000184 Result: Up-regulated in Transcription
  misc_feature: MA Experiment 20000184 PARAMETER Experiment Name: At_Shoots__P Parameter: Age (day) Value: 7
  misc_feature: MA Experiment 20000184 PARAMETER Experiment Name: At_Shoots__P Parameter: Tissue Value: Shoots vs. Whole Plant
  misc_feature: MA Experiment ID: 20000185 Result: Up-regulated in Transcription
  misc_feature: MA Experiment 20000185 PARAMETER Experiment Name: At_Roots__P Parameter: Age (day) Value: 7 vs. 21
  misc_feature: MA Experiment 20000185 PARAMETER Experiment Name: At_Roots__P Parameter: Organism Value: A. thaliana
  misc_feature: MA Experiment 20000185 PARAMETER Experiment Name: At_Roots__P Parameter: Tissue Value: Roots vs. Whole Plant
  misc_feature: MA Experiment ID: 20001450 Result: Up-regulated in Transcription
  misc_feature: MA Experiment 20001450 PARAMETER Experiment Name: At_Far-red-induction_P Parameter: Age (day) Value: 7
  misc_feature: MA Experiment 20001450 PARAMETER Experiment Name: At_Far-red-induction_P Parameter: Light Value: Far-red vs. White
  misc_feature: MA Experiment 20001450 PARAMETER Experiment Name: At_Far-red-induction_P Parameter: Organism Value: A. thaliana
  misc_feature: MA Experiment 20001450 PARAMETER Experiment Name: At_Far-red-induction_P Parameter: Plant Line Value: Columbia
  misc_feature: MA Experiment 20001450 PARAMETER Experiment Name: At_Far-red-induction_P Parameter: Timepoint (hr) Value: 8
  misc_feature: MA Experiment 20001450 PARAMETER Experiment Name: At_Far-red-induction_P Parameter: Tissue Value: Whole Plant
ctctgcctctcatctcttgttctctccgcccatctctgctctcttttattttcccagaaagttttttttttttcccgaattccgttaatctcattggggtttccattgatagcaatggcgacggctttcgctcccactaagctcactgccacggttcctctgcatggatcccatgagaatcgtctcttgctcccgatccgattggctcctccttcttctttcctcggatccacccgttccctctcccttcgcagactcaatcactccaacgccacccgtcgatctcccgtcgtctctgtccaggaagttgtcaaggagaagcaatccaccaataataccagcctgttgataaccaaagaggaaggattggagttgtatgaagatatgatactaggtagatctttcgaagacatgtgtgctcaaatgtattaccgaggcaagatgtttggttttgttcacttgtacaatggccaagaggctgtttctactggctttatcaagctccttaccaagtctgactctgtcgttagtacctaccgtgaccatgtccatgccctcagcaaaggtgtctctgctcgtgctgttatgagcgagctcttcggcaaggttactggatgctgcagaggccaaggtggatccatgcacatgttctccaaagaacacaacatgcttggtggctttgcttttattggtgaaggcattcctgtcgccactggtgctgcctttagctccaagtacaggagggaagtcttgaaacaggattgtgatgatgtcactgtcgcctttttcggagatggaacttgtaacaacggacagttcttcgagtgtctcaacatggctgctctctataaactgcctattatctttgttgtcgagaataacttgtgggccattgggatgtctcacttgagagccacttctgaccccgagatttggaagaaaggtcctgcatttgggatgcctggtgttcatgttgacggtatggatgtcttgaaggtcagggaagtcgctaaagaggctgtcactagagctagaagaggagaaggtccaaccttggttgaatgtgagacttatagatttagaggacactccttggctgatcccgatgagctccgtgatgctgctgagaaagccaaatacgcggctagagacccaatcgcagcattgaagaagtatttgatagagaacaagcttgcaaaggaagcagagctaaagtcaatagagaaaaagatagacagttggtggaggaagcggttgagtttgcagacgctagtccacagcccggtcgcagtcagttgctagagaatgtgtttgctgatccaaaaggatttggaattggacctgatggacggtacagatgtgaggaccccaagtttaccgaaggcacagctcaagtctgagaagacaagtttaaccataagctgtctactgtctcttcgatgtttctatatatcttattaagttaaatgctacagagaatcagtttgaatcatttgcactttttgctttttgtttggtgttactaaattatcacaaggttcttcttgtagttcgttgggttttcattggttaccacttaccagagaattgtatttttttttttaaagataattattttgc

SEQ ID NO: 43312 - protein, 433 aa, Arabidopsis thaliana
  peptide (1)..(433): Ceres Seq. ID no. 12339136
  misc_feature (127)..(412): Pfam Name: Dehydrogenase E1 component Pfam Description: Dehydrogenase E1 component
  misc_feature (111)..(411): Homolog of NCBI NO: 16331186 NR Description: pyruvate dehydrogenase E1 component, alpha
  misc_feature (117)..(412): Homolog of NCBI NO: 33861844 NR Description: Pyruvate dehydrogenase E1 alpha subunit
  misc_feature (110)..(412): Homolog of NCBI NO: 11465733 NR Description: pyruvate dehydrogenase E1 component alpha subunit
  misc_feature (117)..(413): Homolog of NCBI NO: 22298712 NR Description: pyruvate dehydrogenase E1 component, alpha
  misc_feature (111)..(411): Homolog of NCBI NO: 23128827 NR Description: hypothetical protein [Nostoc punctiforme]
  misc_feature (100)..(411): Homolog of NCBI NO: 17230200 NR Description: pyruvate dehydrogenase E1 component, alpha
  misc_feature (100)..(413): Homolog of NCBI NO: 23041416 NR Description: hypothetical protein [Trichodesmium erythraeum
  misc_feature (117)..(412): Homolog of NCBI NO: 38344868 NR Description: OSJNBa0020P07.11 [Oryza sativa (japonica
  misc_feature (39)..(412): Homolog of NCBI NO: 6715645 NR Description: T25K16.8 [Arabidopsis thaliana]
  misc_feature (39)..(412): Homolog of NCBI NO: 15223294 NR Description: pyruvate dehydrogenase E1 alpha subunit
LCLSSLVLSAHLCSLLFSQKVFFFSRIPLISLGFPLIAMATAFAPTKLTATVPLHGSHENRLLLPIRLAPPSSFLGSTRSLSLRRLNHSNATRRSPVVSVQEVVKEKQSTNNTSLLITKEEGLELYEDMILGRSFEDMCAQMYYRGKMFGFVHLYNGQEAVSTGFIKLLTKSDSVVSTYRDHVHALSKGVSARAVMSELFGKVTGCCRGQGGSMHMFSKEHNMLGGFAFIGEGIPVATGAAFSSKYRREVLKQDCDDVTVAFFGDGTCNNGQFFECLNMAALYKLPIIFVVENNLWAIGMSHLRATSDPEIWKKGPAFGMPGVHVDGMDVLKVREVAKEAVTRARRGEGPTLVECETYRFRGHSLADPDELRDAAEKAKYAARDPIAALKKYLIENKLAKEAELKSIEKKIDSWWRKRLSLQTLVHSPVAVSC

SEQ ID NO: 43313 - protein, 395 aa, Arabidopsis thaliana
  peptide (1)..(395): Ceres Seq. ID no. 12339138
  misc_feature (89)..(374): Pfam Name: Dehydrogenase E1 component Pfam Description: Dehydrogenase E1 component
  misc_feature (73)..(373): Homolog of NCBI NO: 16331186 NR Description: pyruvate dehydrogenase E1 component, alpha
  misc_feature (79)..(374): Homolog of NCBI NO: 33861844 NR Description: Pyruvate dehydrogenase E1 alpha subunit
  misc_feature (72)..(374): Homolog of NCBI NO: 11465733 NR Description: pyruvate dehydrogenase E1 component alpha subunit
  misc_feature (79)..(375): Homolog of NCBI NO: 22298712 NR Description: pyruvate dehydrogenase E1 component, alpha
  misc_feature (73)..(373): Homolog of NCBI NO: 23128827 NR Description: hypothetical protein [Nostoc punctiforme]
  misc_feature (62)..(373): Homolog of NCBI NO: 17230200 NR Description: pyruvate dehydrogenase E1 component, alpha
  misc_feature (62)..(375): Homolog of NCBI NO: 23041416 NR Description: hypothetical protein [Trichodesmium erythraeum
  misc_feature (79)..(374): Homolog of NCBI NO: 38344868 NR Description: OSJNBa0020P07.11 [Oryza sativa (japonica
  misc_feature (1)..(374): Homolog of NCBI NO: 6715645 NR Description: T25K16.8 [Arabidopsis thaliana]
  misc_feature (1)..(374): Homolog of NCBI NO: 15223294 NR Description: pyruvate dehydrogenase E1 alpha subunit
MATAFAPTKLTATVPLHGSHENRLLLPIRLAPPSSFLGSTRSLSLRRLNHSNATRRSPVVSVQEVVKEKQSTNNTSLLITKEEGLELYEDMILGRSFEDMCAQMYYRGKMFGFVHLYNGQEAVSTGFIKLLTKSDSVVSTYRDHVHALSKGVSARAVMSELFGKVTGCCRGQGGSMHMFSKEHNMLGGFAFIGEGIPVATGAAFSSKYRREVLKQDCDDVTVAFFGDGTCNNGQFFECLNMAALYKLPIIFVVENNLWAIGMSHLRATSDPEIWKKGPAFGMPGVHVDGMDVLKVREVAKEAVTRARRGEGPTLVECETYRFRGHSLADPDELRDAAEKAKYAARDPIAALKKYLIENKLAKEAELKSIEKKIDSWWRKRLSLQTLVHSPVAVSC

SEQ ID NO: 43314 - protein, 305 aa, Arabidopsis thaliana
  peptide (1)..(305): Ceres Seq. ID no. 12339139
  misc_feature (1)..(284): Pfam Name: Dehydrogenase E1 component Pfam Description: Dehydrogenase E1 component
  misc_feature (1)..(283): Homolog of NCBI NO: 16331186 NR Description: pyruvate dehydrogenase E1 component, alpha
  misc_feature (1)..(284): Homolog of NCBI NO: 33861844 NR Description: Pyruvate dehydrogenase E1 alpha subunit
  misc_feature (1)..(284): Homolog of NCBI NO: 11465733 NR Description: pyruvate dehydrogenase E1 component alpha subunit
  misc_feature (1)..(285): Homolog of NCBI NO: 22298712 NR Description: pyruvate dehydrogenase E1 component, alpha
  misc_feature (1)..(283): Homolog of NCBI NO: 23128827 NR Description: hypothetical protein [Nostoc punctiforme]
  misc_feature (1)..(283): Homolog of NCBI NO: 17230200 NR Description: pyruvate dehydrogenase E1 component, alpha
  misc_feature (1)..(285): Homolog of NCBI NO: 23041416 NR Description: hypothetical protein [Trichodesmium erythraeum
  misc_feature (1)..(284): Homolog of NCBI NO: 38344868 NR Description: OSJNBa0020P07.11 [Oryza sativa (japonica
  misc_feature (1)..(284): Homolog of NCBI NO: 6715645 NR Description: T25K16.8 [Arabidopsis thaliana]
  misc_feature (1)..(284): Homolog of NCBI NO: 15223294 NR Description: pyruvate dehydrogenase E1 alpha subunit
MILGRSFEDMCAQMYYRGKMFGFVHLYNGQEAVSTGFIKLLTKSDSVVSTYRDHVHALSKGVSARAVMSELFGKVTGCCRGQGGSMHMFSKEHNMLGGFAFIGEGIPVATGAAFSSKYRREVLKQDCDDVTVAFFGDGTCNNGQFFECLNMAALYKLPIIFVVENNLWAIGMSHLRATSDPEIWKKGPAFGMPGVHVDGMDVLKVREVAKEAVTRARRGEGPTLVECETYRFRGHSLADPDELRDAAEKAKYAARDPIAALKKYLIENKLAKEAELKSIEKKIDSWWRKRLSLQTLVHSPVAVSC

SEQ ID NO: 43315 - DNA, 1363 bp, Arabidopsis thaliana
  misc_feature (1)..(1363): Ceres Seq. ID no. 12326614
  misc_feature: MA Experiment ID: 108434 Result: Down-regulated in Transcription
  misc_feature: MA Experiment 108434 PARAMETER Experiment Name: At_Root_Tips_cDNA_P Parameter: Tissue Value: Root Tips
  misc_feature: MA Experiment ID: 108461 Result: Down-regulated in Transcription
  misc_feature: MA Experiment 108461 PARAMETER Experiment Name: At_Germinating_Seeds_cDNA_P Parameter: Age (day) Value: 1 vs. 0
  misc_feature: MA Experiment 108461 PARAMETER Experiment Name: At_Germinating_Seeds_cDNA_P Parameter: Tissue Value: Germinating Seeds
  misc_feature: MA Experiment ID: 108573 Result: Up-regulated in Transcription
  misc_feature: MA Experiment 108573 PARAMETER Experiment Name: At_Drought_cDNA_P Parameter: Timepoint (hr) Value: 6
  misc_feature: MA Experiment 108573 PARAMETER Experiment Name: At_Drought_cDNA_P Parameter: Tissue Value: Aerial
  misc_feature: MA Experiment 108573 PARAMETER Experiment Name: At_Drought_cDNA_P Parameter: Treatment Value: Drought vs. No Drought
  misc_feature: MA Experiment ID: 108668 Result: Up-regulated in Transcription
  misc_feature: MA Experiment 108668 PARAMETER Experiment Name: At_2mM_SA_cDNA_P Parameter: Plant Line Value: WS
  misc_feature: MA Experiment 108668 PARAMETER Experiment Name: At_2mM_SA_cDNA_P Parameter: Timepoint (hr) Value: 6
  misc_feature: MA Experiment 108668 PARAMETER Experiment Name: At_2mM_SA_cDNA_P Parameter: Treatment Value: 2mM SA vs. No Treatment
  misc_feature: MA Experiment ID: 20000068 Result: Up-regulated in Transcription
  misc_feature: MA Experiment ID: 20000224 Result: Up-regulated in Transcription
  misc_feature: MA Experiment ID: 20000315 Result: Down-regulated in Transcription
  misc_feature: MA Experiment 20000315 PARAMETER Experiment Name: At_14day_Shoots-Roots_Sub_P Parameter: Age (day) Value: 14
  misc_feature: MA Experiment 20000315 PARAMETER Experiment Name: At_14day_Shoots-Roots_Sub_P Parameter: Organism Value: A. thaliana
  misc_feature: MA Experiment 20000315 PARAMETER Experiment Name: At_14day_Shoots-Roots_Sub_P Parameter: Plant Line Value: WS
  misc_feature: MA Experiment 20000315 PARAMETER Experiment Name: At_14day_Shoots-Roots_Sub_P Parameter: Tissue Value: Shoots vs. Whole Plant
  misc_feature: MA Experiment ID: 20000328 Result: Down-regulated in Transcription
  misc_feature: MA Experiment 20000328 PARAMETER Experiment Name: At_42deg_Heat_Sub_P Parameter: Age (day) Value: 14
  misc_feature: MA Experiment 20000328 PARAMETER Experiment Name: At_42deg_Heat_Sub_P Parameter: Organism Value: A. thaliana
  misc_feature: MA Experiment 20000328 PARAMETER Experiment Name: At_42deg_Heat_Sub_P Parameter: Plant Line Value: WS
  misc_feature: MA Experiment 20000328 PARAMETER Experiment Name: At_42deg_Heat_Sub_P Parameter: Temperature (deg C) Value: 42 vs. 22
  misc_feature: MA Experiment 20000328 PARAMETER Experiment Name: At_42deg_Heat_Sub_P Parameter: Timepoint (hr) Value: 6
  misc_feature: MA Experiment 20000328 PARAMETER Experiment Name: At_42deg_Heat_Sub_P Parameter: Tissue Value: Aerial
  misc_feature: MA Experiment ID: 20000347 Result: Up-regulated in Transcription
  misc_feature: MA Experiment 20000347 PARAMETER Experiment Name: At_2mM_SA_Sub_P Parameter: Age (day) Value: 14
  misc_feature: MA Experiment 20000347 PARAMETER Experiment Name: At_2mM_SA_Sub_P Parameter: Organism Value: A. thaliana
  misc_feature: MA Experiment 20000347 PARAMETER Experiment Name: At_2mM_SA_Sub_P Parameter: Plant Line Value: WS
  misc_feature: MA Experiment 20000347 PARAMETER Experiment Name: At_2mM_SA_Sub_P Parameter: Timepoint (hr) Value: 6
  misc_feature: MA Experiment 20000347 PARAMETER Experiment Name: At_2mM_SA_Sub_P Parameter: Tissue Value: Aerial
  misc_feature: MA Experiment 20000347 PARAMETER Experiment Name: At_2mM_SA_Sub_P Parameter: Treatment Value: 2mM SA vs. No Treatment
  misc_feature: MA Experiment ID: 20000355 Result: Down-regulated in Transcription
  misc_feature: MA Experiment 20000355 PARAMETER Experiment Name: At_Siliques_Sub_P Parameter: Age (day) Value: 21
  misc_feature: MA Experiment 20000355 PARAMETER Experiment Name: At_Siliques_Sub_P Parameter: Organism Value: A. thaliana
  misc_feature: MA Experiment 20000355 PARAMETER Experiment Name: At_Siliques_Sub_P Parameter: Plant Line Value: WS
  misc_feature: MA Experiment 20000355 PARAMETER Experiment Name: At_Siliques_Sub_P Parameter: Tissue Value: Less Than 5mm Siliques vs. Whole Plant
  misc_feature: MA Experiment ID: 20000440 Result: Down-regulated in Transcription
  misc_feature: MA Experiment 20000440 PARAMETER Experiment Name: At_Closed-Flower__Sub_P Parameter: Tissue Value: Closed Flower vs. Whole Plant
attcttccacaatggattcttcatcttcagtaaaaatcgtctcgaaaagcttcgtgaaacccaaaaccataccagaagagtcaaagcaaccatactatttatctccatgggactacgcaatgctctctgttcagtacatccaaaaaggtcttctctttcataagccaccacttgactccattgacactcttcttgagaagctaaaagattctctggccgtcacactagtccatttctaccctctcgcgggtcgcctctcatcgttagcaacggaaaacccgaaatcttactctgtttttgttgattgtaacgatagccctggcgcggggtttatctacgcgacctcagatttatgtgtagaagatattgtgggtgctaagtatgtcccttcaattgttcaatctttctttgaccaccacaaagctgtgaatcatgatggacacaccatgagcctcttatcggtccaggtgacagaattggtagatggaattttcataggactgtctatgaaccatgcgatgggagacggtactgcgttctggaagttctttaccgcatggtccgaaatcttccaaggacaagagagcaacaaaaacaatgacttgtgtcttaagaatccacccgtcttaaagcgttacatccctgaaggatacggtcctctattcagccttccatatagccatccagatgaatttatcagaacctacgaatctccaatcctcaaggagagaatgttctgtttctcatcagaaaccataagattgcttaaaacaaaggtcaaccaaatatgtggaacaacctccatctcatctttccaatcgctaaccgcggttatatggagatgcataacaagggcgaggagattacctctcgatcgagaaacaagttgtagagttgctgctgataacagaggaagaatgtatccaccgcttcacaaggattacttcggaaactgcctctctgctttgagaacggctgcaaaagctggtgaactattggagaatgatcttggatttgctgctttgaaagtgcatcaagcagtagctgaacatacgagcgaaaaggtatctcaaatgattgatcaatggctaaagtctccttatatttaccatattgatcggctatttgaaccgatgagcgttatgatgggaagctcgccgaggtttaataagtatggttgtgaatttgggatgggaaaaggagtgacgcttagaagtggctatgcgcataagttcgatggaaaggtatctgcttacccgggaagagaaggagggggaagtatagatttggaggtatgtcttgttccagagtttatggaagctttggaatcagatgaagagttcatgtcacttgtttctctttg

SEQ ID NO: 43316 - protein, 453 aa, Arabidopsis thaliana
  peptide (1)..(453): Ceres Seq. ID no. 12326615
  misc_feature (8)..(448): Pfam Name: Transferase family Pfam Description: Transferase family
  misc_feature (264)..(452): Homolog of NCBI NO: 21666314 NR Description: AER [Nicotiana tabacum]
  misc_feature (7)..(260): Homolog of NCBI NO: 21666314 NR Description: AER [Nicotiana tabacum]
  misc_feature (3)..(452): Homolog of NCBI NO: 34899602 NR Description: N-hydroxycinnamoyl benzoyltransferase-like
  misc_feature (268)..(452): Homolog of NCBI NO: 15225603 NR Description: putative anthocyanin 5-aromatic acyltransferase
  misc_feature (9)..(261): Homolog of NCBI NO: 15225603 NR Description: putative anthocyanin 5-aromatic acyltransferase
  misc_feature (4)..(452): Homolog of NCBI NO: 24413968 NR Description: N-hydroxycinnamoyl/benzoyltransferase-like
  misc_feature (4)..(452): Homolog of NCBI NO: 15241431 NR Description: N-hydroxycinnamoyl benzoyltransferase - like
  misc_feature (4)..(452): Homolog of NCBI NO: 15241433 NR Description: N-hydroxycinnamoyl benzoyltransferase - like
  misc_feature (4)..(452): Homolog of NCBI NO: 15240871 NR Description: proanthranilate N-benzoyltransferase -like protein
  misc_feature (4)..(452): Homolog of NCBI NO: 15239072 NR Description: N-hydroxycinnamoyl benzoyltransferase-like protein
SSTMDSSSSVKIVSKSFVKPKTIPEESKQPYYLSPWDYAMLSVQYIQKGLLFHKPPLDSIDTLLEKLKDSLAVTLVHFYPLAGRLSSLATENPKSYSVFVDCNDSPGAGFIYATSDLCVEDIVGAKYVPSIVQSFFDHHKAVNHDGHTMSLLSVQVTELVDGIFIGLSMNHAMGDGTAFWKFFTAWSEIFQGQESNKNNDLCLKNPPVLKRYIPEGYGPLFSLPYSHPDEFIRTYESPILKERMFCFSSETIRLLKTKVNQICGTTSISSFQSLTAVIWRCITRARRLPLDRETSCRVAADNRGRMYPPLHKDYFGNCLSALRTAAKAGELLENDLGFAALKVHQAVAEHTSEKVSQMIDQWLKSPYIYHIDRLFEPMSVMMGSSPRFNKYGCEFGMGKGVTLRSGYAHKFDGKVSAYPGREGGGSIDLEVCLVPEFMEALESDEEFMSLVSL

SEQ ID NO: 43317 - protein, 450 aa, Arabidopsis thaliana
  peptide (1)..(450): Ceres Seq. ID no. 12326616
  misc_feature (5)..(445): Pfam Name: Transferase family Pfam Description: Transferase family
  misc_feature (261)..(449): Homolog of NCBI NO: 21666314 NR Description: AER [Nicotiana tabacum]
  misc_feature (4)..(257): Homolog of NCBI NO: 21666314 NR Description: AER [Nicotiana tabacum]
  misc_feature (1)..(449): Homolog of NCBI NO: 34899602 NR Description: N-hydroxycinnamoyl benzoyltransferase-like
  misc_feature (265)..(449): Homolog of NCBI NO: 15225603 NR Description: putative anthocyanin 5-aromatic acyltransferase
  misc_feature (6)..(258): Homolog of NCBI NO: 15225603 NR Description: putative anthocyanin 5-aromatic acyltransferase
  misc_feature (1)..(449): Homolog of NCBI NO: 24413968 NR Description: N-hydroxycinnamoyl/benzoyltransferase-like
  misc_feature (1)..(449): Homolog of NCBI NO: 15241431 NR Description: N-hydroxycinnamoyl benzoyltransferase - like
  misc_feature (1)..(449): Homolog of NCBI NO: 15241433 NR Description: N-hydroxycinnamoyl benzoyltransferase - like
  misc_feature (1)..(449): Homolog of NCBI NO: 15240871 NR Description: proanthranilate N-benzoyltransferase -like protein
  misc_feature (1)..(449): Homolog of NCBI NO: 15239072 NR Description: N-hydroxycinnamoyl benzoyltransferase-like protein
MDSSSSVKIVSKSFVKPKTIPEESKQPYYLSPWDYAMLSVQYIQKGLLFHKPPLDSIDTLLEKLKDSLAVTLVHFYPLAGRLSSLATENPKSYSVFVDCNDSPGAGFIYATSDLCVEDIVGAKYVPSIVQSFFDHHKAVNHDGHTMSLLSVQVTELVDGIFIGLSMNHAMGDGTAFWKFFTAWSEIFQGQESNKNNDLCLKNPPVLKRYIPEGYGPLFSLPYSHPDEFIRTYESPILKERMFCFSSETIRLLKTKVNQICGTTSISSFQSLTAVIWRCITRARRLPLDRETSCRVAADNRGRMYPPLHKDYFGNCLSALRTAAKAGELLENDLGFAALKVHQAVAEHTSEKVSQMIDQWLKSPYIYHIDRLFEPMSVMMGSSPRFNKYGCEFGMGKGVTLRSGYAHKFDGKVSAYPGREGGGSIDLEVCLVPEFMEALESDEEFMSLVSL

SEQ ID NO: 43318 - protein, 414 aa, Arabidopsis thaliana
  peptide (1)..(414): Ceres Seq. ID no. 12326617
  misc_feature (1)..(409): Pfam Name: Transferase family Pfam Description: Transferase family
  misc_feature (225)..(413): Homolog of NCBI NO: 21666314 NR Description: AER [Nicotiana tabacum]
  misc_feature (1)..(221): Homolog of NCBI NO: 21666314 NR Description: AER [Nicotiana tabacum]
  misc_feature (1)..(413): Homolog of NCBI NO: 34899602 NR Description: N-hydroxycinnamoyl benzoyltransferase-like
  misc_feature (229)..(413): Homolog of NCBI NO: 15225603 NR Description: putative anthocyanin 5-aromatic acyltransferase
  misc_feature (1)..(222): Homolog of NCBI NO: 15225603 NR Description: putative anthocyanin 5-aromatic acyltransferase
  misc_feature (1)..(413): Homolog of NCBI NO: 24413968 NR Description: N-hydroxycinnamoyl/benzoyltransferase-like
  misc_feature (1)..(413): Homolog of NCBI NO: 15241431 NR Description: N-hydroxycinnamoyl benzoyltransferase - like
  misc_feature (1)..(413): Homolog of NCBI NO: 15241433 NR Description: N-hydroxycinnamoyl benzoyltransferase - like
  misc_feature (1)..(413): Homolog of NCBI NO: 15240871 NR Description: proanthranilate N-benzoyltransferase -like protein
  misc_feature (1)..(413): Homolog of NCBI NO: 15239072 NR Description: N-hydroxycinnamoyl benzoyltransferase-like protein
MLSVQYIQKGLLFHKPPLDSIDTLLEKLKDSLAVTLVHFYPLAGRLSSLATENPKSYSVFVDCNDSPGAGFIYATSDLCVEDIVGAKYVPSIVQSFFDHHKAVNHDGHTMSLLSVQVTELVDGIFIGLSMNHAMGDGTAFWKFFTAWSEIFQGQESNKNNDLCLKNPPVLKRYIPEGYGPLFSLPYSHPDEFIRTYESPILKERMFCFSSETIRLLKTKVNQICGTTSISSFQSLTAVIWRCITRARRLPLDRETSCRVAADNRGRMYPPLHKDYFGNCLSALRTAAKAGELLENDLGFAALKVHQAVAEHTSEKVSQMIDQWLKSPYIYHIDRLFEPMSVMMGSSPRFNKYGCEFGMGKGVTLRSGYAHKFDGKVSAYPGREGGGSIDLEVCLVPEFMEALESDEEFMSLVSL

SEQ ID NO: 43319 - DNA, 1636 bp, Arabidopsis thaliana
  misc_feature (1)..(1636): Ceres Seq. ID no. 12336180
  misc_feature: MA Experiment ID: 108434 Result: Down-regulated in Transcription
  misc_feature: MA Experiment 108434 PARAMETER Experiment Name: At_Root_Tips_cDNA_P Parameter: Tissue Value: Root Tips
  misc_feature: MA Experiment ID: 108462 Result: Down-regulated in Transcription
  misc_feature: MA Experiment 108462 PARAMETER Experiment Name: At_Germinating_Seeds_cDNA_P Parameter: Age (day) Value: 2 vs. 0
  misc_feature: MA Experiment 108462 PARAMETER Experiment Name: At_Germinating_Seeds_cDNA_P Parameter: Tissue Value: Germinating Seeds
  misc_feature: MA Experiment ID: 108463 Result: Down-regulated in Transcription
  misc_feature: MA Experiment 108463 PARAMETER Experiment Name: At_Germinating_Seeds_cDNA_P Parameter: Age (day) Value: 3 vs. 0
  misc_feature: MA Experiment 108463 PARAMETER Experiment Name: At_Germinating_Seeds_cDNA_P Parameter: Tissue Value: Germinating Seeds
  misc_feature: MA Experiment ID: 108464 Result: Down-regulated in Transcription
  misc_feature: MA Experiment 108464 PARAMETER Experiment Name: At_Germinating_Seeds_cDNA_P Parameter: Age (day) Value: 4 vs. 0
  misc_feature: MA Experiment 108464 PARAMETER Experiment Name: At_Germinating_Seeds_cDNA_P Parameter: Tissue Value: Germinating Seeds
  misc_feature: MA Experiment ID: 108573 Result: Up-regulated in Transcription
  misc_feature: MA Experiment 108573 PARAMETER Experiment Name: At_Drought_cDNA_P Parameter: Timepoint (hr) Value: 6
  misc_feature: MA Experiment 108573 PARAMETER Experiment Name: At_Drought_cDNA_P Parameter: Tissue Value: Aerial
  misc_feature: MA Experiment 108573 PARAMETER Experiment Name: At_Drought_cDNA_P Parameter: Treatment Value: Drought vs. No Drought
  misc_feature: MA Experiment ID: 108577 Result: Up-regulated in Transcription
  misc_feature: MA Experiment 108577 PARAMETER Experiment Name: At_42deg_Heat_cDNA_P Parameter: Temperature (deg C) Value: 42 vs. 22
  misc_feature: MA Experiment 108577 PARAMETER Experiment Name: At_42deg_Heat_cDNA_P Parameter: Timepoint (hr) Value: 6
  misc_feature: MA Experiment 108577 PARAMETER Experiment Name: At_42deg_Heat_cDNA_P Parameter: Tissue Value: Aerial
  misc_feature: MA Experiment ID: 108579 Result: Up-regulated in Transcription
  misc_feature: MA Experiment 108579 PARAMETER Experiment Name: At_4deg_Cold_cDNA_P Parameter: Temperature (deg C) Value: 4 vs. 22
  misc_feature: MA Experiment 108579 PARAMETER Experiment Name: At_4deg_Cold_cDNA_P Parameter: Timepoint (hr) Value: 6
  misc_feature: MA Experiment 108579 PARAMETER Experiment Name: At_4deg_Cold_cDNA_P Parameter: Tissue Value: Aerial
  misc_feature: MA Experiment ID: 108608 Result: Down-regulated in Transcription
  misc_feature: MA Experiment 108608 PARAMETER Experiment Name: At_100uM_ABA_cDNA_P Parameter: Timepoint (hr) Value: 1
  misc_feature: MA Experiment 108608 PARAMETER Experiment Name: At_100uM_ABA_cDNA_P Parameter: Tissue Value: Aerial
  misc_feature: MA Experiment 108608 PARAMETER Experiment Name: At_100uM_ABA_cDNA_P Parameter: Treatment Value: 100uM ABA vs. No Treatment
  misc_feature: MA Experiment ID: 20000111 Result: Up-regulated in Transcription
  misc_feature: MA Experiment 20000111 PARAMETER Experiment Name: At_42deg_Heat_cDNA_P Parameter: Temperature (deg C) Value: 42 vs. 22
  misc_feature: MA Experiment 20000111 PARAMETER Experiment Name: At_42deg_Heat_cDNA_P Parameter: Timepoint (hr) Value: 6
  misc_feature: MA Experiment 20000111 PARAMETER Experiment Name: At_42deg_Heat_cDNA_P Parameter: Tissue Value: Aerial
  misc_feature: MA Experiment ID: 20000112 Result: Up-regulated in Transcription
  misc_feature: MA Experiment 20000112 PARAMETER Experiment Name: At_42deg_Heat_cDNA_P Parameter: Temperature (deg C) Value: 42 vs. 22
  misc_feature: MA Experiment 20000112 PARAMETER Experiment Name: At_42deg_Heat_cDNA_P Parameter: Timepoint (hr) Value: 2
  misc_feature: MA Experiment 20000112 PARAMETER Experiment Name: At_42deg_Heat_cDNA_P Parameter: Tissue Value: Aerial
  misc_feature: MA Experiment ID: 20000166 Result: Down-regulated in Transcription
  misc_feature: MA Experiment 20000166 PARAMETER Experiment Name: At_100uM_ABA_P Parameter: Age (day) Value: 14
  misc_feature: MA Experiment 20000166 PARAMETER Experiment Name: At_100uM_ABA_P Parameter: Organism Value: A. thaliana
  misc_feature: MA Experiment 20000166 PARAMETER Experiment Name: At_100uM_ABA_P Parameter: Plant Line Value: WS
  misc_feature: MA Experiment 20000166 PARAMETER Experiment Name: At_100uM_ABA_P Parameter: Timepoint (hr) Value: 1
  misc_feature: MA Experiment 20000166 PARAMETER Experiment Name: At_100uM_ABA_P Parameter: Tissue Value: Aerial
  misc_feature: MA Experiment 20000166 PARAMETER Experiment Name: At_100uM_ABA_P Parameter: Treatment Value: 100uM ABA vs. No Treatment
  misc_feature: MA Experiment ID: 20000441 Result: Up-regulated in Transcription
  misc_feature: MA Experiment 20000441 PARAMETER Experiment Name: At_1uM_BR-BRZ__P Parameter: Tissue Value: Shoot Apices
  misc_feature: MA Experiment 20000441 PARAMETER Experiment Name: At_1uM_BR-BRZ__P Parameter: Treatment Value: 1uM BR vs. No Treatment
  misc_feature: MA Experiment ID: 20000573 Result: Up-regulated in Transcription
  misc_feature: MA Experiment 20000573 PARAMETER Experiment Name: At_100uM_ABA_Mutants__P Parameter: Organism Value: A. thaliana
  misc_feature: MA Experiment 20000573 PARAMETER Experiment Name: At_100uM_ABA_Mutants__P Parameter: Plant Line Value: CS22 vs. Ler wt
  misc_feature: MA Experiment 20000573 PARAMETER Experiment Name: At_100uM_ABA_Mutants__P Parameter: Timepoint (hr) Value: N/A
  misc_feature: MA Experiment 20000573 PARAMETER Experiment Name: At_100uM_ABA_Mutants__P Parameter: Tissue Value: Whole Plant
  misc_feature: MA Experiment 20000573 PARAMETER Experiment Name: At_100uM_ABA_Mutants__P Parameter: Treatment Value: None
  misc_feature: MA Experiment ID: 20001911 Result: Up-regulated in Transcription
  misc_feature: MA Experiment 20001911 PARAMETER Experiment Name: At_Drought_Reproduction_P Parameter: Age (day) Value: 40
  misc_feature: MA Experiment 20001911 PARAMETER Experiment Name: At_Drought_Reproduction_P Parameter: Organism Value: A. thaliana
  misc_feature: MA Experiment 20001911 PARAMETER Experiment Name: At_Drought_Reproduction_P Parameter: Plant Line Value: WS
  misc_feature: MA Experiment 20001911 PARAMETER Experiment Name: At_Drought_Reproduction_P Parameter: Timepoint (day) Value: 10
  misc_feature: MA Experiment 20001911 PARAMETER Experiment Name: At_Drought_Reproduction_P Parameter: Tissue Value: Flowers
  misc_feature: MA Experiment 20001911 PARAMETER Experiment Name: At_Drought_Reproduction_P Parameter: Treatment Value: Drought vs. No Drought
ggagagtaacatcgagacaaagaagaaaagctaaaaaagagaaccccaaagaatcgaatatttattatttcgccccgaagattctatttctgatcatttacacccctaaaaagagtagagctttcgtgaagccaccatgtgtggaggagctataatctccgatttcatacctccgccgaggtccctccgcgtcactaacgagtttatctggccggatctgaaaaacaaagtgaaagcttcaaagaagagatcgaataagcgatccgatttcttcgatcttgacgatgatttcgaagctgatttccaagggtttaaggatgactcggcttttgactgcgaagacgatgatgatgtcttcgtcaatgttaagcctttcgtcttcaccgcaactactaagcccgtagcttccgctttcgtctccactggtatatatttggtaggttcagcatatgccaagaaaactgtagagtccgctgagcaagctgagaaatcttctaagaggaagaggaagaatcagtaccgagggattaggcagcgtccttggggaaaatgggctgcggagatccgtgatccgagaaaaggctcccgagaatggcttggaacattcgacactgctgaggaagcagcaagagcttatgatgctgcagcacgcagaatccgtggcacgaaagctaaggtgaattttcccgaggagaagaaccctagcgtcgtatcccagaaacgtcctagtgctaagactaataatcttcagaaatcagtggctaaaccaaacaaaagcgtaactttggttcagcagccaacacatctgagtcagcagtactgcaacaactcctttgacaactcttttggtgatatgagtttcatggaagagaagcctcagatgtacaacaatcagtttgggttaacaaactcgttcgatgctggaggtaacaatggataccagtatttcagttccgatcagggcagtaactccttcgactgttctgagttcgggtggagtgatcacggccctaaaacacccgagatctcttcaatgcttgtcaataacaacgaagcatcatttgttgaagaaaccaatgcagccaagaagctcaaaccaaactctgatgagtcagacgatctgatggcataccttgacaacgccttgtgggacaccccactagaagtggaagccatgcttggcgcagatgctggtgctgtgactcaggaagaggaaaacccagtggagctatggagcttagatgagatcaatttcatgctggaaggagacttttgaagtgatcgatggttccttagtttgtaaataaagctgtgttggattttgctgttgggggatggtacaagtcacacctcaagctctatgcattggtatctcatgagccttctcttccatagagagtttctcttttaattttgtcgaaataaaaaaggtgtgatgaagtaaatagaggtataataatatctatctattaagtcttgttttgttctttcatttttgtatttcttttctatttaaaagacagtttattagtcttctgagctctctttttgatctttgttatagcgtatcatcaccctcgaaagtgtaatgttttgtacccccaaacttgtttagcattataataaagtctctttg

SEQ ID NO: 43320 - protein, 379 aa, Arabidopsis thaliana
  peptide (1)..(379): Ceres Seq. ID no. 12336181
  misc_feature (125)..(189): Pfam Name: AP2 domain Pfam Description: AP2 domain
  misc_feature (1)..(328): Homolog of NCBI NO: 37538128 NR Description: JERF3 [Lycopersicon esculentum]
  misc_feature (1)..(328): Homolog of NCBI NO: 30961941 NR Description: C-repeat/DRE-binding factor [Nicotiana tabacum]
  misc_feature (42)..(354): Homolog of NCBI NO: 2281649 NR Description: AP2 domain containing protein RAP2.12
  misc_feature (1)..(354): Homolog of NCBI NO: 15220971 NR Description: AP2 domain protein RAP2.12
  misc_feature (1)..(354): Homolog of NCBI NO: 21593779 NR Description: AP2 domain containing protein, putative
  misc_feature (134)..(379): Homolog of NCBI NO: 2281629 NR Description: AP2 domain containing protein RAP2.2 [Arabidopsis
  misc_feature (1)..(379): Homolog of NCBI NO: 30683064 NR Description: AP2 domain protein RAP2.2 [Arabidopsis thaliana]
  misc_feature (1)..(379): Homolog of NCBI NO: 30683059 NR Description: AP2 domain protein RAP2.2 [Arabidopsis thaliana]
  misc_feature (1)..(379): Homolog of NCBI NO: 21553709 NR Description: DNA-binding protein [Arabidopsis thaliana]
  misc_feature (1)..(379): Homolog of NCBI NO: 18400321 NR Description: AP2 domain protein RAP2.2
MCGGAIISDFIPPPRSLRVTNEFIWPDLKNKVKASKKRSNKRSDFFDLDDDFEADFQGFKDDSAFDCEDDDDVFVNVKPFVFTATTKPVASAFVSTGIYLVGSAYAKKTVESAEQAEKSSKRKRKNQYRGIRQRPWGKWAAEIRDPRKGSREWLGTFDTAEEAARAYDAAARRIRGTKAKVNFPEEKNPSVVSQKRPSAKTNNLQKSVAKPNKSVTLVQQPTHLSQQYCNNSFDNSFGDMSFMEEKPQMYNNQFGLTNSFDAGGNNGYQYFSSDQGSNSFDCSEFGWSDHGPKTPEISSMLVNNNEASFVEETNAAKKLKPNSDESDDLMAYLDNALWDTPLEVEAMLGADAGAVTQEEENPVELWSLDEINFMLEGDF

SEQ ID NO: 43321 - DNA, 1251 bp, Arabidopsis thaliana
  misc_feature (1)..(1251): Ceres Seq. ID no. 12389121
  misc_feature: MA Experiment ID: 20000314 Result: Up-regulated in Transcription
  misc_feature: MA Experiment 20000314 PARAMETER Experiment Name: At_14day_Shoots-Roots_Sub_P Parameter: Age (day) Value: 14
  misc_feature: MA Experiment 20000314 PARAMETER Experiment Name: At_14day_Shoots-Roots_Sub_P Parameter: Organism Value: A. thaliana
  misc_feature: MA Experiment 20000314 PARAMETER Experiment Name: At_14day_Shoots-Roots_Sub_P Parameter: Plant Line Value: WS
  misc_feature: MA Experiment 20000314 PARAMETER Experiment Name: At_14day_Shoots-Roots_Sub_P Parameter: Tissue Value: Roots vs. Whole Plant
  misc_feature: MA Experiment ID: 20000315 Result: Down-regulated in Transcription
  misc_feature: MA Experiment 20000315 PARAMETER Experiment Name: At_14day_Shoots-Roots_Sub_P Parameter: Age (day) Value: 14
  misc_feature: MA Experiment 20000315 PARAMETER Experiment Name: At_14day_Shoots-Roots_Sub_P Parameter: Organism Value: A. thaliana
  misc_feature: MA Experiment 20000315 PARAMETER Experiment Name: At_14day_Shoots-Roots_Sub_P Parameter: Plant Line Value: WS
  misc_feature: MA Experiment 20000315 PARAMETER Experiment Name: At_14day_Shoots-Roots_Sub_P Parameter: Tissue Value: Shoots vs. Whole Plant
cttttacaattgaaaatattttgtaataccatctctaaatctccctcttttgatctccaagtcctccatggttttagggcttttgctttgccgattgatacctaggctctgatttgatttttcctttagaaaactttcaaaaagtttcagtagattggcttaattggctctgttggtccttgtaaagaggataccttttcgtggttggaaaaaaagtcacgttttggcgaaacgctagtttaatgagatagagacgtggccatctttgaaaagtcaacgtttggtcgcaatcggtgacccatggatgttatgattcactcttcaagctttctcctcccttgcgacgaaactagtacagggacgagatacgctctcgttgttctgaaccagagtttgccacgattcactcctcttctctgggaacatgcaaaacttcgtctctgtgctgatggaggcgctaatcgcatctacgacgaattgcctctcttcttccctaatgaagacgctttggccattcgaaacaggtataagccggatgttatcaaaggagatatggattctatacgtcgtgacgtcctcgacttttatataaacttgggaactaaggttatagatgaatctcatgatcaagacaccacagatcttgataaatgcattttgtatatccgtcactctactttgaatcaagagacttccggactccagattcttgccactggagcacttggaggaagatttgatcatgaagccggtaatctcaacgtcttatatcgatatccagatacaaggatagtccttttatctgacgattgcctcatccaactccttccaaagactcatcgacatgaaatacatattcagtcttctctagaagggcctcactgtggactcatacccattggaactccatctgctaaaaccacaacctcagggcttcaatgggatctcagcaacactgagatgagatttggtgggttgataagtacatccaacttggttaaagaagagaaaatcacagtcgaatcggattcggatcttctctggactatatccatcaagaaaacaggactttccatacaagaccatacaccttaggcccggtaacaaaacacactttagtatattatacgctactatgatgttcctgatgcaacgaactagttcaacattattgtgttgatttgttgttcactgtactagctaataatacttgtaccattactgtcgttatacattaagatgcttttttct

SEQ ID NO: 43322 - protein, 264 aa, Arabidopsis thaliana
  peptide (1)..(264): Ceres Seq. ID no. 12389122
  misc_feature (29)..(169): Pfam Name: Thiamin pyrophosphokinase, catalytic domain Pfam Description: Thiamin pyrophosphokinase, catalytic domain
  misc_feature (4)..(253): Homolog of NCBI NO: 21362110 NR Description: thiamin pyrophosphokinase 1
  misc_feature (4)..(253): Homolog of NCBI NO: 34907130 NR Description: putative thiamine pyrophosphokinase
  misc_feature (1)..(75): Homolog of NCBI NO: 34915046 NR Description: putative thiamin pyrophosphokinase
  misc_feature (100)..(253): Homolog of NCBI NO: 34915046 NR Description: putative thiamin pyrophosphokinase
  misc_feature (75)..(264): Homolog of NCBI NO: 30678410 NR Description: thiamin pyrophosphokinase -related [Arabidopsis
  misc_feature (1)..(264): Homolog of NCBI NO: 18406621 NR Description: putative thiamin pyrophosphokinase
  misc_feature (1)..(264): Homolog of NCBI NO: 30689827 NR Description: thiamin pyrophosphokinase -related [Arabidopsis
  misc_feature (1)..(264): Homolog of NCBI NO: 7488367 NR Description: probable thiamin pyrophosphokinase At2g44750
  misc_feature (1)..(264): Homolog of NCBI NO: 30678415 NR Description: thiamin pyrophosphokinase -related [Arabidopsis
  misc_feature (1)..(264): Homolog of NCBI NO: 18379026 NR Description: thiamin pyrophosphokinase, putative
MDVMIHSSSFLLPCDETSTGTRYALVVLNQSLPRFTPLLWEHAKLRLCADGGANRIYDELPLFFPNEDALAIRNRYKPDVIKGDMDSIRRDVLDFYINLGTKVIDESHDQDTTDLDKCILYIRHSTLNQETSGLQILATGALGGRFDHEAGNLNVLYRYPDTRIVLLSDDCLIQLLPKTHRHEIHIQSSLEGPHCGLIPIGTPSAKTTTSGLQWDLSNTEMRFGGLISTSNLVKEEKITVESDSDLLWTISIKKTGLSIQDHTP

SEQ ID NO: 43323 - protein, 261 aa, Arabidopsis thaliana
  peptide (1)..(261): Ceres Seq. ID no. 12389123
  misc_feature (26)..(166): Pfam Name: Thiamin pyrophosphokinase, catalytic domain Pfam Description: Thiamin pyrophosphokinase, catalytic domain
  misc_feature (1)..(250): Homolog of NCBI NO: 21362110 NR Description: thiamin pyrophosphokinase 1
  misc_feature (1)..(250): Homolog of NCBI NO: 34907130 NR Description: putative thiamine pyrophosphokinase
  misc_feature (1)..(72): Homolog of NCBI NO: 34915046 NR Description: putative thiamin pyrophosphokinase
  misc_feature (97)..(250): Homolog of NCBI NO: 34915046 NR Description: putative thiamin pyrophosphokinase
  misc_feature (72)..(261): Homolog of NCBI NO: 30678410 NR Description: thiamin pyrophosphokinase -related [Arabidopsis
  misc_feature (1)..(261): Homolog of NCBI NO: 18406621 NR Description: putative thiamin pyrophosphokinase
  misc_feature (1)..(261): Homolog of NCBI NO: 30689827 NR Description: thiamin pyrophosphokinase -related [Arabidopsis
  misc_feature (1)..(261): Homolog of NCBI NO: 7488367 NR Description: probable thiamin pyrophosphokinase At2g44750
  misc_feature (1)..(261): Homolog of NCBI NO: 30678415 NR Description: thiamin pyrophosphokinase -related [Arabidopsis
  misc_feature (1)..(261): Homolog of NCBI NO: 18379026 NR Description: thiamin pyrophosphokinase, putative
MIHSSSFLLPCDETSTGTRYALVVLNQSLPRFTPLLWEHAKLRLCADGGANRIYDELPLFFPNEDALAIRNRYKPDVIKGDMDSIRRDVLDFYINLGTKVIDESHDQDTTDLDKCILYIRHSTLNQETSGLQILATGALGGRFDHEAGNLNVLYRYPDTRIVLLSDDCLIQLLPKTHRHEIHIQSSLEGPHCGLIPIGTPSAKTTTSGLQWDLSNTEMRFGGLISTSNLVKEEKITVESDSDLLWTISIKKTGLSIQDHTP

SEQ ID NO: 43324 - protein, 180 aa, Arabidopsis thaliana
  peptide (1)..(180): Ceres Seq. ID no. 12389124
  misc_feature (1)..(85): Pfam Name: Thiamin pyrophosphokinase, catalytic domain Pfam Description: Thiamin pyrophosphokinase, catalytic domain
  misc_feature (1)..(169): Homolog of NCBI NO: 39644700 NR Description: TPK1 protein [Homo sapiens]
  misc_feature (1)..(169): Homolog of NCBI NO: 21362110 NR Description: thiamin pyrophosphokinase 1
  misc_feature (1)..(169): Homolog of NCBI NO: 34907130 NR Description: putative thiamine pyrophosphokinase
  misc_feature (16)..(169): Homolog of NCBI NO: 34915046 NR Description: putative thiamin pyrophosphokinase
  misc_feature (1)..(180): Homolog of NCBI NO: 30678410 NR Description: thiamin pyrophosphokinase -related [Arabidopsis
  misc_feature (1)..(180): Homolog of NCBI NO: 18406621 NR Description: putative thiamin pyrophosphokinase
  misc_feature (1)..(180): Homolog of NCBI NO: 30689827 NR Description: thiamin pyrophosphokinase -related [Arabidopsis
  misc_feature (1)..(180): Homolog of NCBI NO: 7488367 NR Description: probable thiamin pyrophosphokinase At2g44750
  misc_feature (1)..(180): Homolog of NCBI NO: 30678415 NR Description: thiamin pyrophosphokinase -related [Arabidopsis
  misc_feature (1)..(180): Homolog of NCBI NO: 18379026 NR Description: thiamin pyrophosphokinase, putative
MDSIRRDVLDFYINLGTKVIDESHDQDTTDLDKCILYIRHSTLNQETSGLQILATGALGGRFDHEAGNLNVLYRYPDTRIVLLSDDCLIQLLPKTHRHEIHIQSSLEGPHCGLIPIGTPSAKTTTSGLQWDLSNTEMRFGGLISTSNLVKEEKITVESDSDLLWTISIKKTGLSIQDHTP

SEQ ID NO: 43325 - DNA, 1459 bp, Arabidopsis thaliana
  misc_feature (1)..(1459): Ceres Seq. ID no. 12488248
  misc_feature: MA Experiment ID: 20000306 Result: Down-regulated in Transcription
  misc_feature: MA Experiment 20000306 PARAMETER Experiment Name: At_Germinating_Seeds_Sub_P Parameter: Age (hr) Value: 6 vs. 0
  misc_feature: MA Experiment 20000306 PARAMETER Experiment Name: At_Germinating_Seeds_Sub_P Parameter: Organism Value: A. thaliana
  misc_feature: MA Experiment 20000306 PARAMETER Experiment Name: At_Germinating_Seeds_Sub_P Parameter: Plant Line Value: WS
  misc_feature: MA Experiment 20000306 PARAMETER Experiment Name: At_Germinating_Seeds_Sub_P Parameter: Tissue Value: Germinating Seeds
  misc_feature: MA Experiment ID: 20000307 Result: Down-regulated in Transcription
  misc_feature: MA Experiment 20000307 PARAMETER Experiment Name: At_Germinating_Seeds_Sub_P Parameter: Age (hr) Value: 24 vs. 0
  misc_feature: MA Experiment 20000307 PARAMETER Experiment Name: At_Germinating_Seeds_Sub_P Parameter: Organism Value: A. thaliana
  misc_feature: MA Experiment 20000307 PARAMETER Experiment Name: At_Germinating_Seeds_Sub_P Parameter: Plant Line Value: WS
  misc_feature: MA Experiment 20000307 PARAMETER Experiment Name: At_Germinating_Seeds_Sub_P Parameter: Tissue Value: Germinating Seeds
  misc_feature: MA Experiment ID: 20000315 Result: Down-regulated in Transcription
  misc_feature: MA Experiment 20000315 PARAMETER Experiment Name: At_14day_Shoots-Roots_Sub_P Parameter: Age (day) Value: 14
  misc_feature: MA Experiment 20000315 PARAMETER Experiment Name: At_14day_Shoots-Roots_Sub_P Parameter: Organism Value: A. thaliana
  misc_feature: MA Experiment 20000315 PARAMETER Experiment Name: At_14day_Shoots-Roots_Sub_P Parameter: Plant Line Value: WS
  misc_feature: MA Experiment 20000315 PARAMETER Experiment Name: At_14day_Shoots-Roots_Sub_P Parameter: Tissue Value: Shoots vs. Whole Plant
  misc_feature: MA Experiment ID: 20000346 Result: Up-regulated in Transcription
  misc_feature: MA Experiment 20000346 PARAMETER Experiment Name: At_2mM_SA_Sub_P Parameter: Age (day) Value: 14
  misc_feature: MA Experiment 20000346 PARAMETER Experiment Name: At_2mM_SA_Sub_P Parameter: Organism Value: A. thaliana
  misc_feature: MA Experiment 20000346 PARAMETER Experiment Name: At_2mM_SA_Sub_P Parameter: Plant Line Value: WS
  misc_feature: MA Experiment 20000346 PARAMETER Experiment Name: At_2mM_SA_Sub_P Parameter: Timepoint (hr) Value: 1
  misc_feature: MA Experiment 20000346 PARAMETER Experiment Name: At_2mM_SA_Sub_P Parameter: Tissue Value: Aerial
  misc_feature: MA Experiment 20000346 PARAMETER Experiment Name: At_2mM_SA_Sub_P Parameter: Treatment Value: 2mM SA vs. No Treatment
  misc_feature: MA Experiment ID: 20000347 Result: Up-regulated in Transcription
  misc_feature: MA Experiment 20000347 PARAMETER Experiment Name: At_2mM_SA_Sub_P Parameter: Age (day) Value: 14
  misc_feature: MA Experiment 20000347 PARAMETER Experiment Name: At_2mM_SA_Sub_P Parameter: Organism Value: A. thaliana
  misc_feature: MA Experiment 20000347 PARAMETER Experiment Name: At_2mM_SA_Sub_P Parameter: Plant Line Value: WS
  misc_feature: MA Experiment 20000347 PARAMETER Experiment Name: At_2mM_SA_Sub_P Parameter: Timepoint (hr) Value: 6
  misc_feature: MA Experiment 20000347 PARAMETER Experiment Name: At_2mM_SA_Sub_P Parameter: Tissue Value: Aerial
  misc_feature: MA Experiment 20000347 PARAMETER Experiment Name: At_2mM_SA_Sub_P Parameter: Treatment Value: 2mM SA vs. No Treatment
atgagagaaggatctcatcttatcgtcttgcctttcccaggacaaggccacataactccaatgtcccagttctgcaaacgcttagcctcaaaaggtcttaagctcactctggtcctcgtctccgacaaaccctctcctccatacaaaacagagcacgactcaatcactgtcttccccatctccaacggcttccaagaaggcgaggaaccattacaagacctcgatgattacatggaaagagtagaaaccagcatcaaaaacaccttaccgaagttggttgaagacatgaaactgtcgggaaatccacctagggctatcgtgtacgactccaccatgccatggcttcttgatgtagctcatagttatggattgagcggtgccgtgtttttcacgcaaccttggcttgtcacagctatttactaccatgttttcaagggttcgttctctgtaccgtctacaaagtacggtcactcgacattagcatctttcccttcgttcccgatgctgactgcaaatgatttgccgtctttcctctgcgaatcgtcctcatacccgaatatactgaggattgtggtggatcagctctcaaacattgatcgagtcgacatagtgttgtgcaacactttcgataaattggaggaaaagttgttgaaatgggtccaaagcttgtggccagtcttgaatattggaccaacggttccatcgatgtatttagacaaacgactgtctgaagacaagaactacggttttagcctcttcaatgcgaaagtcgctgaatgcatggagtggctaaactcaaaggagcctaattctgttgtctatttatcattcggaagtttggtgattctaaaagaagatcaaatgttggaactcgctgcgggtctgaaacagagcggacgtttctttctgtgggttgtgagagagacagagacacacaaacttccaagaaactatgtcgaggaaatcggtgaaaaaggacttattgtaagctggagtcctcagcttgacgtacttgcacataaatcaatcggttgtttcttgacacactgtggatggaactcgacgttagagggattgagtttgggagttccaatgattggtatgccacactggactgatcagcccacgaatgctaagttcatgcaggatgtgtggaaggttggggtaagggttaaggcagaaggtgatgggtttgtgagaagagaagagattatgagaagtgtggaagaagttatggagggagagaaagggaaagagattagaaagaatgctgagaaatggaaagtgttggctcaagaggcagtttctgaaggaggtagctctgataagagcatcaatgagtttgtttctatgttttgttgaatgatttaaattgatatgttcaaaagtacatcgtcttttgcaagtccaattgtaattcttgttgttgttgtagtaataactaataatatagtttctc

SEQ ID NO: 43326 - protein, 453 aa, Arabidopsis thaliana
  peptide (1)..(453): Ceres Seq. ID no. 12488249
  misc_feature (5)..(453): Pfam Name: UDP-glucoronosyl and UDP-glucosyl transferase Pfam Description: UDP-glucoronosyl and UDP-glucosyl transferase
  misc_feature (6)..(449): Homolog of NCBI NO: 15824451 NR Description: thiohydroximate S-glucosyltransferase [Brassica
  misc_feature (6)..(453): Homolog of NCBI NO: 33114570 NR Description: glucosyltransferase 2 [Crocus sativus]
  misc_feature (6)..(450): Homolog of NCBI NO: 15224372 NR Description: putative glucosyltransferase; protein id:
  misc_feature (6)..(450): Homolog of NCBI NO: 15224368 NR Description: putative glucosyltransferase
  misc_feature (5)..(450): Homolog of NCBI NO: 7385017 NR Description: UDP-glucose:salicylic acid glucosyltransferase
  misc_feature (5)..(450): Homolog of NCBI NO: 15225134 NR Description: putative glucosyltransferase
  misc_feature (5)..(450): Homolog of NCBI NO: 21536917 NR Description: putative glucosyltransferase [Arabidopsis
  misc_feature (6)..(451): Homolog of NCBI NO: 15225138 NR Description: UDP-glycosyltransferase family
  misc_feature (1)..(416): Homolog of NCBI NO: 15221232 NR Description: putative indole-3-acetate beta-glucosyltransferase
  misc_feature (1)..(453): Homolog of NCBI NO: 15221233 NR Description: putative indole-3-acetate beta-glucosyltransferase
MREGSHLIVLPFPGQGHITPMSQFCKRLASKGLKLTLVLVSDKPSPPYKTEHDSITVFPISNGFQEGEEPLQDLDDYMERVETSIKNTLPKLVEDMKLSGNPPRAIVYDSTMPWLLDVAHSYGLSGAVFFTQPWLVTAIYYHVFKGSFSVPSTKYGHSTLASFPSFPMLTANDLPSFLCESSSYPNILRIVVDQLSNIDRVDIVLCNTFDKLEEKLLKWVQSLWPVLNIGPTVPSMYLDKRLSEDKNYGFSLFNAKVAECMEWLNSKEPNSVVYLSFGSLVILKEDQMLELAAGLKQSGRFFLWVVRETETHKLPRNYVEEIGEKGLIVSWSPQLDVLAHKSIGCFLTHCGWNSTLEGLSLGVPMIGMPHWTDQPTNAKFMQDVWKVGVRVKAEGDGFVRREEIMRSVEEVMEGEKGKEIRKNAEKWKVLAQEAVSEGGSSDKSINEFVSMFC

SEQ ID NO: 43327 - protein, 433 aa, Arabidopsis thaliana
  peptide (1)..(433): Ceres Seq. ID no. 12488250
  misc_feature (1)..(433): Pfam Name: UDP-glucoronosyl and UDP-glucosyl transferase Pfam Description: UDP-glucoronosyl and UDP-glucosyl transferase
  misc_feature (1)..(429): Homolog of NCBI NO: 15824451 NR Description: thiohydroximate S-glucosyltransferase [Brassica
  misc_feature (1)..(433): Homolog of NCBI NO: 33114570 NR Description: glucosyltransferase 2 [Crocus sativus]
  misc_feature (1)..(430): Homolog of NCBI NO: 15224372 NR Description: putative glucosyltransferase; protein id:
  misc_feature (1)..(430): Homolog of NCBI NO: 15224368 NR Description: putative glucosyltransferase
  misc_feature (1)..(430): Homolog of NCBI NO: 7385017 NR Description: UDP-glucose:salicylic acid glucosyltransferase
  misc_feature (1)..(430): Homolog of NCBI NO: 15225134 NR Description: putative glucosyltransferase
  misc_feature (1)..(430): Homolog of NCBI NO: 21536917 NR Description: putative glucosyltransferase [Arabidopsis
  misc_feature (1)..(431): Homolog of NCBI NO: 15225138 NR Description: UDP-glycosyltransferase family
  misc_feature (1)..(396): Homolog of NCBI NO: 15221232 NR Description: putative indole-3-acetate beta-glucosyltransferase
  misc_feature (1)..(433): Homolog of NCBI NO: 15221233 NR Description: putative indole-3-acetate beta-glucosyltransferase
MSQFCKRLASKGLKLTLVLVSDKPSPPYKTEHDSITVFPISNGFQEGEEPLQDLDDYMERVETSIKNTLPKLVEDMKLSGNPPRAIVYDSTMPWLLDVAHSYGLSGAVFFTQPWLVTAIYYHVFKGSFSVPSTKYGHSTLASFPSFPMLTANDLPSFLCESSSYPNILRIVVDQLSNIDRVDIVLCNTFDKLEEKLLKWVQSLWPVLNIGPTVPSMYLDKRLSEDKNYGFSLFNAKVAECMEWLNSKEPNSVVYLSFGSLVILKEDQMLELAAGLKQSGRFFLWVVRETETHKLPRNYVEEIGEKGLIVSWSPQLDVLAHKSIGCFLTHCGWNSTLEGLSLGVPMIGMPHWTDQPTNAKFMQDVWKVGVRVKAEGDGFVRREEIMRSVEEVMEGEKGKEIRKNAEKWKVLAQEAVSEGGSSDKSINEFVSMFC

SEQ ID NO: 43328 - protein, 376 aa, Arabidopsis thaliana
  peptide (1)..(376): Ceres Seq. ID no. 12488251
  misc_feature (1)..(376): Pfam Name: UDP-glucoronosyl and UDP-glucosyl transferase Pfam Description: UDP-glucoronosyl and UDP-glucosyl transferase
  misc_feature (1)..(372): Homolog of NCBI NO: 15824451 NR Description: thiohydroximate S-glucosyltransferase [Brassica
  misc_feature (1)..(376): Homolog of NCBI NO: 33114570 NR Description: glucosyltransferase 2 [Crocus sativus]
  misc_feature (1)..(373): Homolog of NCBI NO: 15224372 NR Description: putative glucosyltransferase; protein id:
  misc_feature (1)..(373): Homolog of NCBI NO: 15224368 NR Description: putative glucosyltransferase
  misc_feature (1)..(373): Homolog of NCBI NO: 7385017 NR Description: UDP-glucose:salicylic acid glucosyltransferase
  misc_feature (1)..(373): Homolog of NCBI NO: 15225134 NR Description: putative glucosyltransferase
  misc_feature (1)..(373): Homolog of NCBI NO: 21536917 NR Description: putative glucosyltransferase [Arabidopsis
  misc_feature (1)..(374): Homolog of NCBI NO: 15225138 NR Description: UDP-glycosyltransferase family
  misc_feature (1)..(339): Homolog of NCBI NO: 15221232 NR Description: putative indole-3-acetate beta-glucosyltransferase
  misc_feature (1)..(376): Homolog of NCBI NO: 15221233 NR Description: putative indole-3-acetate beta-glucosyltransferase
MERVETSIKNTLPKLVEDMKLSGNPPRAIVYDSTMPWLLDVAHSYGLSGAVFFTQPWLVTAIYYHVFKGSFSVPSTKYGHSTLASFPSFPMLTANDLPSFLCESSSYPNILRIVVDQLSNIDRVDIVLCNTFDKLEEKLLKWVQSLWPVLNIGPTVPSMYLDKRLSEDKNYGFSLFNAKVAECMEWLNSKEPNSVVYLSFGSLVILKEDQMLELAAGLKQSGRFFLWVVRETETHKLPRNYVEEIGEKGLIVSWSPQLDVLAHKSIGCFLTHCGWNSTLEGLSLGVPMIGMPHWTDQPTNAKFMQDVWKVGVRVKAEGDGFVRREEIMRSVEEVMEGEKGKEIRKNAEKWKVLAQEAVSEGGSSDKSINEFVSMFC

SEQ ID NO: 43329 - DNA, 877 bp, Arabidopsis thaliana
  misc_feature (1)..(877): Ceres Seq. ID no. 13497392
  misc_feature: MA Experiment ID: 108434 Result: Down-regulated in Transcription
  misc_feature: MA Experiment 108434 PARAMETER Experiment Name: At_Root_Tips_cDNA_P Parameter: Tissue Value: Root Tips
  misc_feature: MA Experiment ID: 108435 Result: Down-regulated in Transcription
  misc_feature: MA Experiment 108435 PARAMETER Experiment Name: At_stm_Mutants_cDNA_P Parameter: Plant Line Value: wt Landsburg vs stm
  misc_feature: MA Experiment 108435 PARAMETER Experiment Name: At_stm_Mutants_cDNA_P Parameter: Tissue Value: Shoot Apical Meristem Region
  misc_feature: MA Experiment ID: 108461 Result: Down-regulated in Transcription
  misc_feature: MA Experiment 108461 PARAMETER Experiment Name: At_Germinating_Seeds_cDNA_P Parameter: Age (day) Value: 1 vs. 0
  misc_feature: MA Experiment 108461 PARAMETER Experiment Name: At_Germinating_Seeds_cDNA_P Parameter: Tissue Value: Germinating Seeds
  misc_feature: MA Experiment ID: 108462 Result: Down-regulated in Transcription
  misc_feature: MA Experiment 108462 PARAMETER Experiment Name: At_Germinating_Seeds_cDNA_P Parameter: Age (day) Value: 2 vs. 0
  misc_feature: MA Experiment 108462 PARAMETER Experiment Name: At_Germinating_Seeds_cDNA_P Parameter: Tissue Value: Germinating Seeds
  misc_feature: MA Experiment ID: 108463 Result: Down-regulated in Transcription
  misc_feature: MA Experiment 108463 PARAMETER Experiment Name: At_Germinating_Seeds_cDNA_P Parameter: Age (day) Value: 3 vs. 0
  misc_feature: MA Experiment 108463 PARAMETER Experiment Name: At_Germinating_Seeds_cDNA_P Parameter: Tissue Value: Germinating Seeds
  misc_feature: MA Experiment ID: 108464 Result: Down-regulated in Transcription
  misc_feature: MA Experiment 108464 PARAMETER Experiment Name: At_Germinating_Seeds_cDNA_P Parameter: Age (day) Value: 4 vs. 0
  misc_feature: MA Experiment 108464 PARAMETER Experiment Name: At_Germinating_Seeds_cDNA_P Parameter: Tissue Value: Germinating Seeds
  misc_feature: MA Experiment ID: 108469 Result: Up-regulated in Transcription
  misc_feature: MA Experiment ID: 108474 Result: Down-regulated in Transcription
  misc_feature: MA Experiment 108474 PARAMETER Experiment Name: At_Drought_Flowers_cDNA_P Parameter: Timepoint (hr) Value: null
  misc_feature: MA Experiment 108474 PARAMETER Experiment Name: At_Drought_Flowers_cDNA_P Parameter: Treatment Value: Drought vs. No Drought
  misc_feature: MA Experiment ID: 108488 Result: Up-regulated in Transcription
  misc_feature: MA Experiment ID: 108501 Result: Up-regulated in Transcription
  misc_feature: MA Experiment 108501 PARAMETER Experiment Name: At_ap2_floral_buds_cDNA_P Parameter: Plant Line Value: ap2 (Ler.)
  misc_feature: MA Experiment 108501 PARAMETER Experiment Name: At_ap2_floral_buds_cDNA_P Parameter: Tissue Value: Closed Flower
  misc_feature: MA Experiment ID: 108569 Result: Up-regulated in Transcription
  misc_feature: MA Experiment 108569 PARAMETER Experiment Name: At_0.001%_MeJA__cDNA_P Parameter: Timepoint (hr) Value: 6
  misc_feature: MA Experiment 108569 PARAMETER Experiment Name: At_0.001%_MeJA__cDNA_P Parameter: Tissue Value: Aerial
  misc_feature: MA Experiment 108569 PARAMETER Experiment Name: At_0.001%_MeJA__cDNA_P Parameter: Treatment Value: 0.001% MeJA vs. No Treatment
  misc_feature: MA Experiment ID: 108573 Result: Up-regulated in Transcription
  misc_feature: MA Experiment 108573 PARAMETER Experiment Name: At_Drought_cDNA_P Parameter: Timepoint (hr) Value: 6
  misc_feature: MA Experiment 108573 PARAMETER Experiment Name: At_Drought_cDNA_P Parameter: Tissue Value: Aerial
  misc_feature: MA Experiment 108573 PARAMETER Experiment Name: At_Drought_cDNA_P Parameter: Treatment Value: Drought vs. No Drought
  misc_feature: MA Experiment ID: 108585 Result: Up-regulated in Transcription
  misc_feature: MA Experiment 108585 PARAMETER Experiment Name: At_5mM_NaNP_cDNA_P Parameter: Timepoint (hr) Value: 6
  misc_feature: MA Experiment 108585 PARAMETER Experiment Name: At_5mM_NaNP_cDNA_P Parameter: Tissue Value: Aerial
  misc_feature: MA Experiment 108585 PARAMETER Experiment Name: At_5mM_NaNP_cDNA_P Parameter: Treatment Value: null
  misc_feature: MA Experiment ID: 108595 Result: Down-regulated in Transcription
  misc_feature: MA Experiment 108595 PARAMETER Experiment Name: At_Ler-pi_Ovule_cDNA_P Parameter: Plant Line Value: null
  misc_feature: MA Experiment ID: 108605 Result: Up-regulated in Transcription
  misc_feature: MA Experiment 108605 PARAMETER Experiment Name: At_100uM_ABA_cDNA_P Parameter: Timepoint (hr) Value: 6
  misc_feature: MA Experiment 108605 PARAMETER Experiment Name: At_100uM_ABA_cDNA_P Parameter: Tissue Value: Aerial
  misc_feature: MA Experiment 108605 PARAMETER Experiment Name: At_100uM_ABA_cDNA_P Parameter: Treatment Value: 100uM ABA vs. No Treatment
  misc_feature: MA Experiment ID: 108668 Result: Up-regulated in Transcription
  misc_feature: MA Experiment 108668 PARAMETER Experiment Name: At_2mM_SA_cDNA_P Parameter: Plant Line Value: WS
  misc_feature: MA Experiment 108668 PARAMETER Experiment Name: At_2mM_SA_cDNA_P Parameter: Timepoint (hr) Value: 6
  misc_feature: MA Experiment 108668 PARAMETER Experiment Name: At_2mM_SA_cDNA_P Parameter: Treatment Value: 2mM SA vs. No Treatment
  misc_feature: MA Experiment ID: 20000030 Result: Up-regulated in Transcription
  misc_feature: MA Experiment 20000030 PARAMETER Experiment Name: At_CS6630_Roots_cDNA_P Parameter: Plant Line Value: CS6630 vs. WS
  misc_feature: MA Experiment 20000030 PARAMETER Experiment Name: At_CS6630_Roots_cDNA_P Parameter: Tissue Value: Roots
  misc_feature: MA Experiment ID: 20000069 Result: Up-regulated in Transcription
  misc_feature: MA Experiment 20000069 PARAMETER Experiment Name: At_100uM_ABA_Mutants_cDNA_P Parameter: Plant Line Value: CS23
  misc_feature: MA Experiment 20000069 PARAMETER Experiment Name: At_100uM_ABA_Mutants_cDNA_P Parameter: Timepoint (hr) Value: 6
  misc_feature: MA Experiment 20000069 PARAMETER Experiment Name: At_100uM_ABA_Mutants_cDNA_P Parameter: Tissue Value: Aerial
  misc_feature: MA Experiment 20000069 PARAMETER Experiment Name: At_100uM_ABA_Mutants_cDNA_P Parameter: Treatment Value: 100uM ABA vs. No Treatment
  misc_feature: MA Experiment ID: 20000070 Result: Up-regulated in Transcription
  misc_feature: MA Experiment 20000070 PARAMETER Experiment Name: At_100uM_ABA_Mutants_cDNA_P Parameter: Plant Line Value: CS24
  misc_feature: MA Experiment 20000070 PARAMETER Experiment Name: At_100uM_ABA_Mutants_cDNA_P Parameter: Timepoint (hr) Value: 6
  misc_feature: MA Experiment 20000070 PARAMETER Experiment Name: At_100uM_ABA_Mutants_cDNA_P Parameter: Tissue Value: Aerial
  misc_feature: MA Experiment 20000070 PARAMETER Experiment Name: At_100uM_ABA_Mutants_cDNA_P Parameter: Treatment Value: 100uM ABA vs. No Treatment
  misc_feature: MA Experiment ID: 20000071 Result: Up-regulated in Transcription
  misc_feature: MA Experiment 20000071 PARAMETER Experiment Name: At_100uM_ABA_Mutants_cDNA_P Parameter: Plant Line Value: CS8104
  misc_feature: MA Experiment 20000071 PARAMETER Experiment Name: At_100uM_ABA_Mutants_cDNA_P Parameter: Timepoint (hr) Value: 6
  misc_feature: MA Experiment 20000071 PARAMETER Experiment Name: At_100uM_ABA_Mutants_cDNA_P Parameter: Tissue Value: Aerial
  misc_feature: MA Experiment 20000071 PARAMETER Experiment Name: At_100uM_ABA_Mutants_cDNA_P Parameter: Treatment Value: 100uM ABA vs. No Treatment
  misc_feature: MA Experiment ID: 20000072 Result: Up-regulated in Transcription
  misc_feature: MA Experiment 20000072 PARAMETER Experiment Name: At_100uM_ABA_Mutants_cDNA_P Parameter: Plant Line Value: CS8105
  misc_feature: MA Experiment 20000072 PARAMETER Experiment Name: At_100uM_ABA_Mutants_cDNA_P Parameter: Timepoint (hr) Value: 6
  misc_feature: MA Experiment 20000072 PARAMETER Experiment Name: At_100uM_ABA_Mutants_cDNA_P Parameter: Tissue Value: Aerial
  misc_feature: MA Experiment 20000072 PARAMETER Experiment Name: At_100uM_ABA_Mutants_cDNA_P Parameter: Treatment Value: 100uM ABA vs. No Treatment
  misc_feature: MA Experiment ID: 20000087 Result: Up-regulated in Transcription
  misc_feature: MA Experiment 20000087 PARAMETER Experiment Name: At_100uM_ABA_Mutants_cDNA_P Parameter: Plant Line Value: WS
  misc_feature: MA Experiment 20000087 PARAMETER Experiment Name: At_100uM_ABA_Mutants_cDNA_P Parameter: Timepoint (hr) Value: 6
  misc_feature: MA Experiment 20000087 PARAMETER Experiment Name: At_100uM_ABA_Mutants_cDNA_P Parameter: Tissue Value: Aerial
  misc_feature: MA Experiment 20000087 PARAMETER Experiment Name: At_100uM_ABA_Mutants_cDNA_P Parameter: Treatment Value: 100uM ABA vs. No Treatment
  misc_feature: MA Experiment ID: 20000090 Result: Up-regulated in Transcription
  misc_feature: MA Experiment ID: 20000111 Result: Down-regulated in Transcription
  misc_feature: MA Experiment 20000111 PARAMETER Experiment Name: At_42deg_Heat_cDNA_P Parameter: Temperature (deg C) Value: 42 vs. 22
  misc_feature: MA Experiment 20000111 PARAMETER Experiment Name: At_42deg_Heat_cDNA_P Parameter: Timepoint (hr) Value: 6
  misc_feature: MA Experiment 20000111 PARAMETER Experiment Name: At_42deg_Heat_cDNA_P Parameter: Tissue Value: Aerial
  misc_feature: MA Experiment ID: 20000113 Result: Down-regulated in Transcription
  misc_feature: MA Experiment 20000113 PARAMETER Experiment Name: At_42deg_Heat_cDNA_P Parameter: Temperature (deg C) Value: 42 vs. 22
  misc_feature: MA Experiment 20000113 PARAMETER Experiment Name: At_42deg_Heat_cDNA_P Parameter: Timepoint (hr) Value: 8
  misc_feature: MA Experiment 20000113 PARAMETER Experiment Name: At_42deg_Heat_cDNA_P Parameter: Tissue Value: Aerial
  misc_feature: MA Experiment ID: 20000117 Result: Up-regulated in Transcription
  misc_feature: MA Experiment 20000117 PARAMETER Experiment Name: At_100uM_ABA_Mutants_cDNA_P Parameter: Plant Line Value: Columbia
  misc_feature: MA Experiment 20000117 PARAMETER Experiment Name: At_100uM_ABA_Mutants_cDNA_P Parameter: Timepoint (hr) Value: 6
  misc_feature: MA Experiment 20000117 PARAMETER Experiment Name: At_100uM_ABA_Mutants_cDNA_P Parameter: Tissue Value: Aerial
  misc_feature: MA Experiment 20000117 PARAMETER Experiment Name: At_100uM_ABA_Mutants_cDNA_P Parameter: Treatment Value: 100uM ABA vs. No Treatment
  misc_feature: MA Experiment ID: 20000144 Result: Down-regulated in Transcription
  misc_feature: MA Experiment 20000144 PARAMETER Experiment Name: At_42deg_Heat_cDNA_P Parameter: Temperature (deg C) Value: 42 vs. 22
  misc_feature: MA Experiment 20000144 PARAMETER Experiment Name: At_42deg_Heat_cDNA_P Parameter: Timepoint (hr) Value: 1
  misc_feature: MA Experiment 20000144 PARAMETER Experiment Name: At_42deg_Heat_cDNA_P Parameter: Tissue Value: Aerial
  misc_feature: MA Experiment ID: 20000171 Result: Down-regulated in Transcription
  misc_feature: MA Experiment 20000171 PARAMETER Experiment Name: At_42deg_Heat_P Parameter: Age (day) Value: 14
  misc_feature: MA Experiment 20000171 PARAMETER Experiment Name: At_42deg_Heat_P Parameter: Organism Value: A. thaliana
  misc_feature: MA Experiment 20000171 PARAMETER Experiment Name: At_42deg_Heat_P Parameter: Plant Line Value: WS
  misc_feature: MA Experiment 20000171 PARAMETER Experiment Name: At_42deg_Heat_P Parameter: Temperature (deg C) Value: 42 vs. 22
  misc_feature: MA Experiment 20000171 PARAMETER Experiment Name: At_42deg_Heat_P Parameter: Timepoint (hr) Value: 1
  misc_feature: MA Experiment 20000171 PARAMETER Experiment Name: At_42deg_Heat_P Parameter: Tissue Value: Aerial
  misc_feature: MA Experiment ID: 20000173 Result: Down-regulated in Transcription
  misc_feature: MA Experiment 20000173 PARAMETER Experiment Name: At_42deg_Heat_P Parameter: Age (day) Value: 14
  misc_feature: MA Experiment 20000173 PARAMETER Experiment Name: At_42deg_Heat_P Parameter: Organism Value: A. thaliana
  misc_feature: MA Experiment 20000173 PARAMETER Experiment Name: At_42deg_Heat_P Parameter: Plant Line Value: WS
  misc_feature: MA Experiment 20000173 PARAMETER Experiment Name: At_42deg_Heat_P Parameter: Temperature (deg C) Value: 42 vs. 22
  misc_feature: MA Experiment 20000173 PARAMETER Experiment Name: At_42deg_Heat_P Parameter: Timepoint (hr) Value: 6
  misc_feature: MA Experiment 20000173 PARAMETER Experiment Name: At_42deg_Heat_P Parameter: Tissue Value: Aerial
  misc_feature: MA Experiment ID: 20000180 Result: Down-regulated in Transcription
  misc_feature: MA Experiment 20000180 PARAMETER Experiment Name: At_Germinating_Seeds_P Parameter: Age (hr) Value: 24 vs. 0
  misc_feature: MA Experiment 20000180 PARAMETER Experiment Name: At_Germinating_Seeds_P Parameter: Tissue Value: Germinating Seeds
  misc_feature: MA Experiment ID: 20000182 Result: Up-regulated in Transcription
  misc_feature: MA Experiment 20000182 PARAMETER Experiment Name: At_2mM_SA_P Parameter: Age (day) Value: 14
  misc_feature: MA Experiment 20000182 PARAMETER Experiment Name: At_2mM_SA_P Parameter: Organism Value: A. thaliana
  misc_feature: MA Experiment 20000182 PARAMETER Experiment Name: At_2mM_SA_P Parameter: Plant Line Value: WS
  misc_feature: MA Experiment 20000182 PARAMETER Experiment Name: At_2mM_SA_P Parameter: Timepoint (hr) Value: 6
  misc_feature: MA Experiment 20000182 PARAMETER Experiment Name: At_2mM_SA_P Parameter: Tissue Value: Aerial
  misc_feature: MA Experiment 20000182 PARAMETER Experiment Name: At_2mM_SA_P Parameter: Treatment Value: 2mM SA vs. No Treatment
  misc_feature: MA Experiment ID: 20000185 Result: Up-regulated in Transcription
  misc_feature: MA Experiment 20000185 PARAMETER Experiment Name: At_Roots__P Parameter: Age (day) Value: 7 vs. 21
  misc_feature: MA Experiment 20000185 PARAMETER Experiment Name: At_Roots__P Parameter: Organism Value: A. thaliana
  misc_feature: MA Experiment 20000185 PARAMETER Experiment Name: At_Roots__P Parameter: Tissue Value: Roots vs. Whole Plant
  misc_feature: MA Experiment ID: 20000213 Result: Up-regulated in Transcription
  misc_feature: MA Experiment 20000213 PARAMETER Experiment Name: At_4deg_Cold_P Parameter: Timepoint (hr) Value: 2
  misc_feature: MA Experiment ID: 20000227 Result: Down-regulated in Transcription
  misc_feature: MA Experiment 20000227 PARAMETER Experiment Name: At_Root-Tips-vs-Tops_P Parameter: Tissue Value: Root Tips vs. Root Tops
  misc_feature: MA Experiment ID: 20000234 Result: Down-regulated in Transcription
  misc_feature: MA Experiment 20000234 PARAMETER Experiment Name: At_Siliques_P Parameter: Age (day) Value: 21
  misc_feature: MA Experiment 20000234 PARAMETER Experiment Name: At_Siliques_P Parameter: Organism Value: A. thaliana
  misc_feature: MA Experiment 20000234 PARAMETER Experiment Name: At_Siliques_P Parameter: Plant Line Value: WS
  misc_feature: MA Experiment 20000234 PARAMETER Experiment Name: At_Siliques_P Parameter: Tissue Value: Less Than 5mm Siliques vs. Whole Plant
  misc_feature: MA Experiment ID: 20000235 Result: Down-regulated in Transcription
  misc_feature: MA Experiment 20000235 PARAMETER Experiment Name: At_Siliques_P Parameter: Age (day) Value: 21
  misc_feature: MA Experiment 20000235 PARAMETER Experiment Name: At_Siliques_P Parameter: Organism Value: A. thaliana
  misc_feature: MA Experiment 20000235 PARAMETER Experiment Name: At_Siliques_P Parameter: Plant Line Value: WS
  misc_feature: MA Experiment 20000235 PARAMETER Experiment Name: At_Siliques_P Parameter: Tissue Value: 5-10mm Siliques vs. Whole Plant
  misc_feature: MA Experiment ID: 20000269 Result: Up-regulated in Transcription
  misc_feature: MA Experiment 20000269 PARAMETER Experiment Name: At_1mM_KNO3_L-vs-H_Roots_P Parameter: Age (day) Value: 7,10,12
  misc_feature: MA Experiment 20000269 PARAMETER Experiment Name: At_1mM_KNO3_L-vs-H_Roots_P Parameter: Organism Value: A. thaliana
  misc_feature: MA Experiment 20000269 PARAMETER Experiment Name: At_1mM_KNO3_L-vs-H_Roots_P Parameter: Plant Line Value: WS
  misc_feature: MA Experiment 20000269 PARAMETER Experiment Name: At_1mM_KNO3_L-vs-H_Roots_P Parameter: Timepoint (day) Value: 7,10,12
  misc_feature: MA Experiment 20000269 PARAMETER Experiment Name: At_1mM_KNO3_L-vs-H_Roots_P Parameter: Tissue Value: Roots
  misc_feature: MA Experiment 20000269 PARAMETER Experiment Name: At_1mM_KNO3_L-vs-H_Roots_P Parameter: Treatment Value: 1mM KNO3 vs. 50mM KNO3
  misc_feature: MA Experiment ID: 20000286 Result: Down-regulated in Transcription
  misc_feature: MA Experiment 20000286 PARAMETER Experiment Name: At_Open_Flower_P Parameter: Age (day) Value: 21
  misc_feature: MA Experiment 20000286 PARAMETER Experiment Name: At_Open_Flower_P Parameter: Plant Line Value: WS
  misc_feature: MA Experiment 20000286 PARAMETER Experiment Name: At_Open_Flower_P Parameter: Tissue Value: Half Open vs. Whole Plant
  misc_feature: MA Experiment ID: 20000438 Result: Down-regulated in Transcription
  misc_feature: MA Experiment 20000438 PARAMETER Experiment Name: At_Shoots__P Parameter: Age (day) Value: 14
  misc_feature: MA Experiment 20000438 PARAMETER Experiment Name: At_Shoots__P Parameter: Tissue Value: Shoots vs. Whole Plant
  misc_feature: MA Experiment ID: 20000453 Result: Up-regulated in Transcription
  misc_feature: MA Experiment 20000453 PARAMETER Experiment Name: At_100uM_ABA_P Parameter: Age (day) Value: 15
  misc_feature: MA Experiment 20000453 PARAMETER Experiment Name: At_100uM_ABA_P Parameter: Organism Value: A. thaliana
  misc_feature: MA Experiment 20000453 PARAMETER Experiment Name: At_100uM_ABA_P Parameter: Plant Line Value: WS
  misc_feature: MA Experiment 20000453 PARAMETER Experiment Name: At_100uM_ABA_P Parameter: Timepoint (hr) Value: 24
  misc_feature: MA Experiment 20000453 PARAMETER Experiment Name: At_100uM_ABA_P Parameter: Tissue Value: Aerial
  misc_feature: MA Experiment 20000453 PARAMETER Experiment Name: At_100uM_ABA_P Parameter: Treatment Value: 100uM ABA vs. No Treatment
  misc_feature: MA Experiment ID: 20000460 Result: Down-regulated in Transcription
  misc_feature: MA Experiment 20000460 PARAMETER Experiment Name: At_10percent_PEG_P Parameter: Age (day) Value: 12
  misc_feature: MA Experiment 20000460 PARAMETER Experiment Name: At_10percent_PEG_P Parameter: Organism Value: A. thaliana
  misc_feature: MA Experiment 20000460 PARAMETER Experiment Name: At_10percent_PEG_P Parameter: Plant Line Value: WS
  misc_feature: MA Experiment 20000460 PARAMETER Experiment Name: At_10percent_PEG_P Parameter: Timepoint (day) Value: 12
  misc_feature: MA Experiment 20000460 PARAMETER Experiment Name: At_10percent_PEG_P Parameter: Tissue Value: Whole Plant
  misc_feature: MA Experiment 20000460 PARAMETER Experiment Name: At_10percent_PEG_P Parameter: Treatment Value: 10percent PEG vs. No Treatment
  misc_feature: MA Experiment ID: 20000527 Result: Down-regulated in Transcription
  misc_feature: MA Experiment 20000527 PARAMETER Experiment Name: At_10percent_PEG_P Parameter: Age (day) Value: 20
  misc_feature: MA Experiment 20000527 PARAMETER Experiment Name: At_10percent_PEG_P Parameter: Organism Value: A. thaliana
  misc_feature: MA Experiment 20000527 PARAMETER Experiment Name: At_10percent_PEG_P Parameter: Plant Line Value: WS
  misc_feature: MA Experiment 20000527 PARAMETER Experiment Name: At_10percent_PEG_P Parameter: Timepoint (day) Value: 20
  misc_feature: MA Experiment 20000527 PARAMETER Experiment Name: At_10percent_PEG_P Parameter: Tissue Value: Whole Plant
  misc_feature: MA Experiment 20000527 PARAMETER Experiment Name: At_10percent_PEG_P Parameter: Treatment Value: 10percent PEG vs. No Treatment
  misc_feature: MA Experiment ID: 20000794 Result: Down-regulated in Transcription
  misc_feature: MA Experiment 20000794 PARAMETER Experiment Name: At_Petals_P Parameter: Age (day) Value: 23-25 days
  misc_feature: MA Experiment 20000794 PARAMETER Experiment Name: At_Petals_P Parameter: Plant Line Value: WS
  misc_feature: MA Experiment 20000794 PARAMETER Experiment Name: At_Petals_P Parameter: Tissue Value: Petals vs. Whole plant
  misc_feature: MA Experiment ID: 20001557 Result: Up-regulated in Transcription
  misc_feature: MA Experiment 20001557 PARAMETER Experiment Name: At_Drought_Soil_Dry_P Parameter: Age (day) Value: 27
  misc_feature: MA Experiment 20001557 PARAMETER Experiment Name: At_Drought_Soil_Dry_P Parameter: Organism Value: A. thaliana
  misc_feature: MA Experiment 20001557 PARAMETER Experiment Name: At_Drought_Soil_Dry_P Parameter: Plant Line Value: WS
  misc_feature: MA Experiment 20001557 PARAMETER Experiment Name: At_Drought_Soil_Dry_P Parameter: Post Timepoint (hr) Value: 3
  misc_feature: MA Experiment 20001557 PARAMETER Experiment Name: At_Drought_Soil_Dry_P Parameter: Post-Treatment Value: Re-Water vs. No Drought
  misc_feature: MA Experiment 20001557 PARAMETER Experiment Name: At_Drought_Soil_Dry_P Parameter: Timepoint (day) Value: 13
  misc_feature: MA Experiment 20001557 PARAMETER Experiment Name: At_Drought_Soil_Dry_P Parameter: Treatment Value: Drought vs. No Drought
  misc_feature: MA Experiment ID: 20001757 Result: Up-regulated in Transcription
  misc_feature: MA Experiment 20001757 PARAMETER Experiment Name: At_50mM_NH4NO3_L-to-H_P Parameter: Timepoint (hr) Value: 6
  misc_feature: MA Experiment 20001757 PARAMETER Experiment Name: At_50mM_NH4NO3_L-to-H_P Parameter: Tissue Value: Leaf
  misc_feature: MA Experiment 20001757 PARAMETER Experiment Name: At_50mM_NH4NO3_L-to-H_P Parameter: Treatment Value: 50mM NH4NO3 vs 100mM Mannitol
  misc_feature: MA Experiment ID: 20001905 Result: Up-regulated in Transcription
  misc_feature: MA Experiment 20001905 PARAMETER Experiment Name: At_Drought_Reproduction_P Parameter: Age (day) Value: 40
  misc_feature: MA Experiment 20001905 PARAMETER Experiment Name: At_Drought_Reproduction_P Parameter: Organism Value: A. thaliana
  misc_feature: MA Experiment 20001905 PARAMETER Experiment Name: At_Drought_Reproduction_P Parameter: Plant Line Value: WS
  misc_feature: MA Experiment 20001905 PARAMETER Experiment Name: At_Drought_Reproduction_P Parameter: Timepoint (day) Value: 10
  misc_feature: MA Experiment 20001905 PARAMETER Experiment Name: At_Drought_Reproduction_P Parameter: Tissue Value: Rosettes
  misc_feature: MA Experiment 20001905 PARAMETER Experiment Name: At_Drought_Reproduction_P Parameter: Treatment Value: Drought vs. No Drought
taaaagtcagcaaaacacaaggcatattcctcttctcttcctcagccttatttttctgatattcagtttcaaggatatatccatggcgatccagaagatcctctttgcttcacttctcatatgctcactgatccaatccatccacggggcggaaaaactaagactcttcaaagagctggacaaaggtgcacttgatgtcaccactaaacccagccgagaaggaccaggtgttgttttggatgccggcaaggatacgttgaacattacatggacgctaagctcgattgggtctaaaagagaggctgaatttaagatcatcaaagttaagctatgctacgctccacctagccaagttgaccgaccatggcgcaaaacccatgacgagctcttcaaagacaagacctgcccacacaagatcatagccaagccttatgacaaaacacttcaatcaactacttggactcttgagcgtgacatccccaccggaacctacttcgttcgtgcctacgcggttgatgccattggccatgaagttgcctatggacagagcaccgacgatgccaagaaaaccaatctcttcagcgttcaggctatcagtggccgccacgcgtccctagatattgcctccatctgtttcagtgtcttctccgtcgtggctcttgtcgtcttctttgtcaatgagaagaggaaggccaagatagagcaaagcaaatgagtcgtttactttgcgtatttgtgacgttgaacccaaaaaaagttgactttgaactttcttgtttaccaattccttttgtcttgttgcacacttcttctttcttatatgcttttatttatgtgtttgtacaattaagccattgatatggaacaaaactaatcc

SEQ ID NO: 43330 - protein, 237 aa, Arabidopsis thaliana
  peptide (1)..(237): Ceres Seq. ID no. 13497393
  misc_feature (30)..(230): Homolog of NCBI NO: 32488147 NR Description: OSJNBa0044K18.32 [Oryza sativa (japonica
  misc_feature (33)..(232): Homolog of NCBI NO: 20149062 NR Description: unknown [Capsicum annuum]
  misc_feature (28)..(235): Homolog of NCBI NO: 15233944 NR Description: hypothetical protein [Arabidopsis thaliana]
  misc_feature (28)..(237): Homolog of NCBI NO: 21553714 NR Description: putative component of high affinity nitrate
  misc_feature (28)..(237): Homolog of NCBI NO: 15240632 NR Description: expressed protein [Arabidopsis thaliana]
  misc_feature (28)..(237): Homolog of NCBI NO: 13624657 NR Description: putative component of high affinity nitrate
KSQQNTRHIPLLFLSLIFLIFSFKDISMAIQKILFASLLICSLIQSIHGAEKLRLFKELDKGALDVTTKPSREGPGVVLDAGKDTLNITWTLSSIGSKREAEFKIIKVKLCYAPPSQVDRPWRKTHDELFKDKTCPHKIIAKPYDKTLQSTTWTLERDIPTGTYFVRAYAVDAIGHEVAYGQSTDDAKKTNLFSVQAISGRHASLDIASICFSVFSVVALVVFFVNEKRKAKIEQSK

SEQ ID NO: 43331 - protein, 210 aa, Arabidopsis thaliana
  peptide (1)..(210): Ceres Seq. ID no. 13497394
  misc_feature (3)..(203): Homolog of NCBI NO: 32488147 NR Description: OSJNBa0044K18.32 [Oryza sativa (japonica
  misc_feature (6)..(205): Homolog of NCBI NO: 20149062 NR Description: unknown [Capsicum annuum]
  misc_feature (1)..(208): Homolog of NCBI NO: 15233944 NR Description: hypothetical protein [Arabidopsis thaliana]
  misc_feature (1)..(210): Homolog of NCBI NO: 21553714 NR Description: putative component of high affinity nitrate
  misc_feature (1)..(210): Homolog of NCBI NO: 15240632 NR Description: expressed protein [Arabidopsis thaliana]
  misc_feature (1)..(210): Homolog of NCBI NO: 13624657 NR Description: putative component of high affinity nitrate
MAIQKILFASLLICSLIQSIHGAEKLRLFKELDKGALDVTTKPSREGPGVVLDAGKDTLNITWTLSSIGSKREAEFKIIKVKLCYAPPSQVDRPWRKTHDELFKDKTCPHKIIAKPYDKTLQSTTWTLERDIPTGTYFVRAYAVDAIGHEVAYGQSTDDAKKTNLFSVQAISGRHASLDIASICFSVFSVVALVVFFVNEKRKAKIEQSK

SEQ ID NO: 43332 - DNA, 1876 bp, Arabidopsis thaliana
  misc_feature (1)..(1876): Ceres Seq. ID no. 12602845
  misc_feature: MA Experiment ID: 20000265 Result: Up-regulated in Transcription
  misc_feature: MA Experiment 20000265 PARAMETER Experiment Name: At_Open_Flower_P Parameter: Age (day) Value: 21
  misc_feature: MA Experiment 20000265 PARAMETER Experiment Name: At_Open_Flower_P Parameter: Plant Line Value: WS
  misc_feature: MA Experiment 20000265 PARAMETER Experiment Name: At_Open_Flower_P Parameter: Tissue Value: Closed Flower vs. Whole Plant
  misc_feature: MA Experiment ID: 20001910 Result: Up-regulated in Transcription
  misc_feature: MA Experiment 20001910 PARAMETER Experiment Name: At_Drought_Reproduction_P Parameter: Age (day) Value: 37
  misc_feature: MA Experiment 20001910 PARAMETER Experiment Name: At_Drought_Reproduction_P Parameter: Organism Value: A. thaliana
  misc_feature: MA Experiment 20001910 PARAMETER Experiment Name: At_Drought_Reproduction_P Parameter: Plant Line Value: WS
  misc_feature: MA Experiment 20001910 PARAMETER Experiment Name: At_Drought_Reproduction_P Parameter: Timepoint (day) Value: 7
  misc_feature: MA Experiment 20001910 PARAMETER Experiment Name: At_Drought_Reproduction_P Parameter: Tissue Value: Flowers
  misc_feature: MA Experiment 20001910 PARAMETER Experiment Name: At_Drought_Reproduction_P Parameter: Treatment Value: Drought vs. No Drought
tacgtctttcaaaaactaatctttctggtttcccgatgcattggtttggattcgagttccacgagaagccaccaaatcaaataggatcagatggatgattcttcaactttacaagacatgttgtgaaagatcttgactcttgatcatattataaacgaacaagaagctataccttgttaggagtcatttgttggtattgaatctatttgtaactacctgcgttgatataatggaggaagcatcaacatcgacaccagcaccaatggctgcaaaaccaaccgttgttaaaaagacaatggcgaagcaattcaccgggaaacgcgaagattcgcagctccattcggctgtgagacgcggagatttctctgcggtgaaagagattttgagtaatcatatggaatcagaagatgaactaagagatttgttgcggaaacagaaccaatgcggtgagaccgctctttatgtggcggcagaatatggtgatgcggacgtggttgcagagctcatcaagtactatgatcttgaagacgctgagaccaaagctagaaatgggttcgatcctttccacattgctgctaaacaaggcgaattagatgttttgagagtactaatggaagaacatccggagctatcaatgacggtggacttatcaaacacgacggctctacacacggcggcagctcagggacacgtagaggtcgtagagtatctactagaagcagcagggagtagcctagccgcgatcgcaaaaagcaacgggaaaacagcattgcactcggcggctaggaatggtcacgcggaagtggtaaaagcgattgtggcggtggaaccggacacggcaacgaggactgataaaaagggtcagacgccacttcacatggcggtgaaaggacaaagcattgatgtggtggttgagttaatgaagggacatcggtcttcgttgaatatggctgattctaaagggaacactgcgttacatgttgctactaggaaaggtcgcattaagatagtggaattacttctagataacaacgagacaagcccaagcacaaaagcgataaacagagcaggagaaacgccgcttgacacggctgagaaaaccggccatcctcagatcgccgcggttctcaaaacccgcggcgttccctcggctaaagctatcaacaacactactaggccaaacgcggcgcgtgagctcaaacaaacggtgagcgacatcaaacatgaagttcatcaccagctagaacacgctcgagagacaagaaaacgcgttcaaggaatcgccaaacgcattaacaaaatgcacgtagaaggtcttgacaatgcgattaactcaaccacagtcgtggcggttctaattgcaaccgtcgctttcgccgccattttcactgtcccggggcaatatgcagacgaattgagttcgctcttaccgggacaatctctcggagaagcgaacatcgcggatagacccgcgtttgcgatcttcttcatattcgattcaatcgctctttttatatctttagcggttgtggtggttcagacttcagtggttgcgattgaacacaaggcaaagaagaatatgatggctgtgataaacaagttgatgtggttagcttgcgttttgatatctgtggcatttttggcgttagcgtttgtggtggttggtgaagaagagcggtggctagcggttggcgtgacggtgtttggtgcaacgataatgctcacgacgcttgggaccatgtgttattgggtcattatgcatcgaatcgaggcttcgaatgttagaaagtcgagaaaagagtcgatggcaagatcgagacaatcaggtttattggaattttctgggattttaactaagagaatgtatgctatttag

SEQ ID NO: 43333 - protein, 548 aa, Arabidopsis thaliana
  peptide (1)..(548): Ceres Seq. ID no. 12602846
  misc_feature (107)..(139): Pfam Name: Ankyrin repeat Pfam Description: Ankyrin repeat
  misc_feature (38)..(522): Homolog of NCBI NO: 18379277 NR Description: expressed protein
  misc_feature (20)..(533): Homolog of NCBI NO: 21553618 NR Description: ankyrin-like protein [Arabidopsis thaliana]
  misc_feature (20)..(533): Homolog of NCBI NO: 15230470 NR Description: ankyrin-like protein; protein id: At3g12360.1
  misc_feature (29)..(548): Homolog of NCBI NO: 15220595 NR Description: unknown protein; protein id: At1g05640.1
  misc_feature (23)..(526): Homolog of NCBI NO: 11357168 NR Description: ankyrin-like protein - Arabidopsis thaliana
  misc_feature (19)..(526): Homolog of NCBI NO: 30679697 NR Description: ankyrin repeat protein family [Arabidopsis
  misc_feature (29)..(548): Homolog of NCBI NO: 15225141 NR Description: ankyrin-like protein; protein id: At2g31820.1
  misc_feature (2)..(548): Homolog of NCBI NO: 24796797 NR Description: putative ankyrin repeat containing protein
  misc_feature (14)..(548): Homolog of NCBI NO: 15222993 NR Description: hypothetical protein; protein id: At1g07710.1
  misc_feature (1)..(548): Homolog of NCBI NO: 15238604 NR Description: ankyrin-like protein; protein id: At5g60070.1
MEEASTSTPAPMAAKPTVVKKTMAKQFTGKREDSQLHSAVRRGDFSAVKEILSNHMESEDELRDLLRKQNQCGETALYVAAEYGDADVVAELIKYYDLEDAETKARNGFDPFHIAAKQGELDVLRVLMEEHPELSMTVDLSNTTALHTAAAQGHVEVVEYLLEAAGSSLAAIAKSNGKTALHSAARNGHAEVVKAIVAVEPDTATRTDKKGQTPLHMAVKGQSIDVVVELMKGHRSSLNMADSKGNTALHVATRKGRIKIVELLLDNNETSPSTKAINRAGETPLDTAEKTGHPQIAAVLKTRGVPSAKAINNTTRPNAARELKQTVSDIKHEVHHQLEHARETRKRVQGIAKRINKMHVEGLDNAINSTTVVAVLIATVAFAAIFTVPGQYADELSSLLPGQSLGEANIADRPAFAIFFIFDSIALFISLAVVVVQTSVVAIEHKAKKNMMAVINKLMWLACVLISVAFLALAFVVVGEEERWLAVGVTVFGATIMLTTLGTMCYWVIMHRIEASNVRKSRKESMARSRQSGLLEFSGILTKRMYAI

SEQ ID NO: 43334 - protein, 537 aa, Arabidopsis thaliana
  peptide (1)..(537): Ceres Seq. ID no. 12602847
  misc_feature (96)..(128): Pfam Name: Ankyrin repeat Pfam Description: Ankyrin repeat
  misc_feature (27)..(511): Homolog of NCBI NO: 18379277 NR Description: expressed protein
  misc_feature (9)..(522): Homolog of NCBI NO: 21553618 NR Description: ankyrin-like protein [Arabidopsis thaliana]
  misc_feature (9)..(522): Homolog of NCBI NO: 15230470 NR Description: ankyrin-like protein; protein id: At3g12360.1
  misc_feature (18)..(537): Homolog of NCBI NO: 15220595 NR Description: unknown protein; protein id: At1g05640.1
  misc_feature (12)..(515): Homolog of NCBI NO: 11357168 NR Description: ankyrin-like protein - Arabidopsis thaliana
  misc_feature (8)..(515): Homolog of NCBI NO: 30679697 NR Description: ankyrin repeat protein family [Arabidopsis
  misc_feature (18)..(537): Homolog of NCBI NO: 15225141 NR Description: ankyrin-like protein; protein id: At2g31820.1
  misc_feature (1)..(537): Homolog of NCBI NO: 24796797 NR Description: putative ankyrin repeat containing protein
  misc_feature (3)..(537): Homolog of NCBI NO: 15222993 NR Description: hypothetical protein; protein id: At1g07710.1
  misc_feature (1)..(537): Homolog of NCBI NO: 15238604 NR Description: ankyrin-like protein; protein id: At5g60070.1
MAAKPTVVKKTMAKQFTGKREDSQLHSAVRRGDFSAVKEILSNHMESEDELRDLLRKQNQCGETALYVAAEYGDADVVAELIKYYDLEDAETKARNGFDPFHIAAKQGELDVLRVLMEEHPELSMTVDLSNTTALHTAAAQGHVEVVEYLLEAAGSSLAAIAKSNGKTALHSAARNGHAEVVKAIVAVEPDTATRTDKKGQTPLHMAVKGQSIDVVVELMKGHRSSLNMADSKGNTALHVATRKGRIKIVELLLDNNETSPSTKAINRAGETPLDTAEKTGHPQIAAVLKTRGVPSAKAINNTTRPNAARELKQTVSDIKHEVHHQLEHARETRKRVQGIAKRINKMHVEGLDNAINSTTVVAVLIATVAFAAIFTVPGQYADELSSLLPGQSLGEANIADRPAFAIFFIFDSIALFISLAVVVVQTSVVAIEHKAKKNMMAVINKLMWLACVLISVAFLALAFVVVGEEERWLAVGVTVFGATIMLTTLGTMCYWVIMHRIEASNVRKSRKESMARSRQSGLLEFSGILTKRMYAI

SEQ ID NO: 43335 - protein, 526 aa, Arabidopsis thaliana
  peptide (1)..(526): Ceres Seq. ID no. 12602848
  misc_feature (85)..(117): Pfam Name: Ankyrin repeat Pfam Description: Ankyrin repeat
  misc_feature (16)..(500): Homolog of NCBI NO: 18379277 NR Description: expressed protein
  misc_feature (1)..(511): Homolog of NCBI NO: 21553618 NR Description: ankyrin-like protein [Arabidopsis thaliana]
  misc_feature (1)..(511): Homolog of NCBI NO: 15230470 NR Description: ankyrin-like protein; protein id: At3g12360.1
  misc_feature (7)..(526): Homolog of NCBI NO: 15220595 NR Description: unknown protein; protein id: At1g05640.1
  misc_feature (1)..(504): Homolog of NCBI NO: 11357168 NR Description: ankyrin-like protein - Arabidopsis thaliana
  misc_feature (1)..(504): Homolog of NCBI NO: 30679697 NR Description: ankyrin repeat protein family [Arabidopsis
  misc_feature (7)..(526): Homolog of NCBI NO: 15225141 NR Description: ankyrin-like protein; protein id: At2g31820.1
  misc_feature (1)..(526): Homolog of NCBI NO: 24796797 NR Description: putative ankyrin repeat containing protein
  misc_feature (1)..(526): Homolog of NCBI NO: 15222993 NR Description: hypothetical protein; protein id: At1g07710.1
  misc_feature (1)..(526): Homolog of NCBI NO: 15238604 NR Description: ankyrin-like protein; protein id: At5g60070.1
MAKQFTGKREDSQLHSAVRRGDFSAVKEILSNHMESEDELRDLLRKQNQCGETALYVAAEYGDADVVAELIKYYDLEDAETKARNGFDPFHIAAKQGELDVLRVLMEEHPELSMTVDLSNTTALHTAAAQGHVEVVEYLLEAAGSSLAAIAKSNGKTALHSAARNGHAEVVKAIVAVEPDTATRTDKKGQTPLHMAVKGQSIDVVVELMKGHRSSLNMADSKGNTALHVATRKGRIKIVELLLDNNETSPSTKAINRAGETPLDTAEKTGHPQIAAVLKTRGVPSAKAINNTTRPNAARELKQTVSDIKHEVHHQLEHARETRKRVQGIAKRINKMHVEGLDNAINSTTVVAVLIATVAFAAIFTVPGQYADELSSLLPGQSLGEANIADRPAFAIFFIFDSIALFISLAVVVVQTSVVAIEHKAKKNMMAVINKLMWLACVLISVAFLALAFVVVGEEERWLAVGVTVFGATIMLTTLGTMCYWVIMHRIEASNVRKSRKESMARSRQSGLLEFSGILTKRMYAI

SEQ ID NO: 43336 - DNA, 1420 bp, Arabidopsis thaliana
  misc_feature (1)..(1420): Ceres Seq. ID no. 13499680
  misc_feature: MA Experiment ID: 20000179 Result: Up-regulated in Transcription
  misc_feature: MA Experiment 20000179 PARAMETER Experiment Name: At_Germinating_Seeds_P Parameter: Age (hr) Value: 6 vs. 0
  misc_feature: MA Experiment 20000179 PARAMETER Experiment Name: At_Germinating_Seeds_P Parameter: Tissue Value: Germinating Seeds
  misc_feature: MA Experiment ID: 20000184 Result: Up-regulated in Transcription
  misc_feature: MA Experiment 20000184 PARAMETER Experiment Name: At_Shoots__P Parameter: Age (day) Value: 7
  misc_feature: MA Experiment 20000184 PARAMETER Experiment Name: At_Shoots__P Parameter: Tissue Value: Shoots vs. Whole Plant
  misc_feature: MA Experiment ID: 20000234 Result: Up-regulated in Transcription
  misc_feature: MA Experiment 20000234 PARAMETER Experiment Name: At_Siliques_P Parameter: Age (day) Value: 21
  misc_feature: MA Experiment 20000234 PARAMETER Experiment Name: At_Siliques_P Parameter: Organism Value: A. thaliana
  misc_feature: MA Experiment 20000234 PARAMETER Experiment Name: At_Siliques_P Parameter: Plant Line Value: WS
  misc_feature: MA Experiment 20000234 PARAMETER Experiment Name: At_Siliques_P Parameter: Tissue Value: Less Than 5mm Siliques vs. Whole Plant
  misc_feature: MA Experiment ID: 20001558 Result: Up-regulated in Transcription
  misc_feature: MA Experiment 20001558 PARAMETER Experiment Name: At_Drought_Soil_Dry_P Parameter: Age (day) Value: 27
  misc_feature: MA Experiment 20001558 PARAMETER Experiment Name: At_Drought_Soil_Dry_P Parameter: Organism Value: A. thaliana
  misc_feature: MA Experiment 20001558 PARAMETER Experiment Name: At_Drought_Soil_Dry_P Parameter: Plant Line Value: WS
  misc_feature: MA Experiment 20001558 PARAMETER Experiment Name: At_Drought_Soil_Dry_P Parameter: Post Timepoint (hr) Value: 6
  misc_feature: MA Experiment 20001558 PARAMETER Experiment Name: At_Drought_Soil_Dry_P Parameter: Post-Treatment Value: Re-Water vs. No Drought
  misc_feature: MA Experiment 20001558 PARAMETER Experiment Name: At_Drought_Soil_Dry_P Parameter: Timepoint (day) Value: 13
  misc_feature: MA Experiment 20001558 PARAMETER Experiment Name: At_Drought_Soil_Dry_P Parameter: Treatment Value: Drought vs. No Drought
  misc_feature: MA Experiment ID: 20001560 Result: Up-regulated in Transcription
  misc_feature: MA Experiment 20001560 PARAMETER Experiment Name: At_Drought_Soil_Dry_P Parameter: Age (day) Value: 28
  misc_feature: MA Experiment 20001560 PARAMETER Experiment Name: At_Drought_Soil_Dry_P Parameter: Organism Value: A. thaliana
  misc_feature: MA Experiment 20001560 PARAMETER Experiment Name: At_Drought_Soil_Dry_P Parameter: Plant Line Value: WS
  misc_feature: MA Experiment 20001560 PARAMETER Experiment Name: At_Drought_Soil_Dry_P Parameter: Post Timepoint (hr) Value: None
  misc_feature: MA Experiment 20001560 PARAMETER Experiment Name: At_Drought_Soil_Dry_P Parameter: Post-Treatment Value: None
  misc_feature: MA Experiment 20001560 PARAMETER Experiment Name: At_Drought_Soil_Dry_P Parameter: Timepoint (day) Value: 14
  misc_feature: MA Experiment 20001560 PARAMETER Experiment Name: At_Drought_Soil_Dry_P Parameter: Treatment Value: Drought vs. No Drought
aaagattcttggtctccgatccagtcacctgaagattctcggagcttcttttgaccacacactttcaatggcggatgctgtgaacgctcaaactccatcgctctccgagcaatatcatttggagaaagaagtgaagcaagacacaagtgcaaagcctgttgaagtgaaagaggtggcaccagaagttactacacaagctgaagaggttaagacggagcaagctaaggaagaatctcctgttgaggaagcggtttctgtagttgaagagaagtctgaatctgctcctgaatcaacggaagtggcttctgaggctcctgctgcagcggaagacaatgctgaagagactcctgctgctgctgaagaaaataatgacgaaaacgctagtgaagaagttgctgaagaaacccctgatgagatcaagcttgagacagctcctgcttgatctcatcaggggtttcttttttttttttttttttgaattttttcaccaagtgttcgttcacggcattgcttgtcctccagtatgagtatctccggtgctgcagttggttcaggcagaaatttaagaagagcggtagagtttgggaaaactcatgtggttaggcctaaagggaaacatcaagcaactattgtctggttacatgggcttggggacaatggctcgagctggtcccagcttttggagacccttccccttccaaatatcaaatggatttgcccgactgctccttctcaaccaataagtttatttggtggttttccctccacagcttggtttgatgttgtggacatcaatgaagatggacctgatgatatggaaggattggatgtggctgctgcacatgttgcaaatctgttgtcgaatgagcctgctgacattaaattaggtgttggaggattcagcatgggtgcggcgacatctctatattctgcaacttgttttgctctcggtaaatatggaaatggcaatccataccctatcaatttaagcgcaatcataggcttaagcggctggcttccttgtgcaaagacattggctggcaaactagaagaggaacagatcaagaaccgagctgcatcgttgcccattgttgtctgtcatggaaaagctgatgatgtggtaccgttcaagtttggggagaaatcttcacaggctttgctttcaaatgggtttaagaaggtgaccttcaaaccttacagtgcacttggtcaccacacaatcccacaggagttggatgagttgtgcgcatggttgacatccacgctcagcctcgaaggttgatacttcctatgatgtagctttctgatgaaaacccttcaactcttgagagtttgattgaattggatgtttcaggatttcacaatgttttcattggaatatttgtgtaagacacattcgtctagtagcaaatcttctcct

SEQ ID NO: 43337 - protein, 252 aa, Arabidopsis thaliana; identical to SEQ ID NO: 37738
  peptide (1)..(252): Ceres Seq. ID no. 13499681
  misc_feature (20)..(248): Pfam Name: Phospholipase/Carboxylesterase Pfam Description: Phospholipase/Carboxylesterase
  misc_feature (85)..(251): Homolog of NCBI NO: 34912598 NR Description: P0046B10.16 [Oryza sativa (japonica
  misc_feature (102)..(252): Homolog of NCBI NO: 28932772 NR Description: FPh1 [Gossypium hirsutum]
  misc_feature (196)..(225): Homolog of NCBI NO: 5903036 NR Description: F6D8.5 [Arabidopsis thaliana]
  misc_feature (1)..(182): Homolog of NCBI NO: 5903036 NR Description: F6D8.5 [Arabidopsis thaliana]
  misc_feature (196)..(252): Homolog of NCBI NO: 15219072 NR Description: hypothetical protein [Arabidopsis thaliana]
  misc_feature (1)..(182): Homolog of NCBI NO: 15219072 NR Description: hypothetical protein [Arabidopsis thaliana]
  misc_feature (1)..(252): Homolog of NCBI NO: 15232645 NR Description: lysophospholipase -related [Arabidopsis thaliana]
  misc_feature (1)..(250): Homolog of NCBI NO: 29409364 NR Description: biostress-resistance-related protein [Triticum
  misc_feature (1)..(250): Homolog of NCBI NO: 34910274 NR Description: OSJNBa0089K24.24 [Oryza sativa (japonica
  misc_feature (1)..(252): Homolog of NCBI NO: 15241251 NR Description: expressed protein [Arabidopsis thaliana]

SEQ ID NO: 43338 - protein, 155 aa, Arabidopsis thaliana; identical to SEQ ID NO: 37739
  peptide (1)..(155): Ceres Seq. ID no. 13499682
  misc_feature (1)..(151): Pfam Name: Phospholipase/Carboxylesterase Pfam Description: Phospholipase/Carboxylesterase
  misc_feature (1)..(154): Homolog of NCBI NO: 34912598 NR Description: P0046B10.16 [Oryza sativa (japonica
  misc_feature (5)..(155): Homolog of NCBI NO: 28932772 NR Description: FPh1 [Gossypium hirsutum]
  misc_feature (99)..(128): Homolog of NCBI NO: 5903036 NR Description: F6D8.5 [Arabidopsis thaliana]
  misc_feature (1)..(85): Homolog of NCBI NO: 5903036 NR Description: F6D8.5 [Arabidopsis thaliana]
  misc_feature (99)..(155): Homolog of NCBI NO: 15219072 NR Description: hypothetical protein [Arabidopsis thaliana]
  misc_feature (1)..(85): Homolog of NCBI NO: 15219072 NR Description: hypothetical protein [Arabidopsis thaliana]
  misc_feature (1)..(155): Homolog of NCBI NO: 15232645 NR Description: lysophospholipase -related [Arabidopsis thaliana]
  misc_feature (1)..(153): Homolog of NCBI NO: 29409364 NR Description: biostress-resistance-related protein [Triticum
  misc_feature (1)..(153): Homolog of NCBI NO: 34910274 NR Description: OSJNBa0089K24.24 [Oryza sativa (japonica
  misc_feature (1)..(155): Homolog of NCBI NO: 15241251 NR Description: expressed protein [Arabidopsis thaliana]

SEQ ID NO: 43339 - protein, 146 aa, Arabidopsis thaliana
  peptide (1)..(146): Ceres Seq. ID no. 13499683
  misc_feature (42)..(146): Pfam Name: MARCKS family Pfam Description: MARCKS family
  misc_feature (55)..(144): Homolog of NCBI NO: 23000051 NR Description: hypothetical protein [Magnetococcus sp. MC-1]
  misc_feature (41)..(138): Homolog of NCBI NO: 23000051 NR Description: hypothetical protein [Magnetococcus sp. MC-1]
  misc_feature (22)..(134): Homolog of NCBI NO: 7484697 NR Description: hypothetical protein - common buckwheat
  misc_feature (23)..(146): Homolog of NCBI NO: 21554378 NR Description: cytochrome c oxidase subunit, putative
  misc_feature (23)..(146): Homolog of NCBI NO: 15219886 NR Description: cytochrome c oxidase subunit -related
KILGLRSSHLKILGASFDHTLSMADAVNAQTPSLSEQYHLEKEVKQDTSAKPVEVKEVAPEVTTQAEEVKTEQAKEESPVEEAVSVVEEKSESAPESTEVASEAPAAAEDNAEETPAAAEENNDENASEEVAEETPDEIKLETAPA

SEQ ID NO: 43340 - DNA, 1689 bp, Arabidopsis thaliana
  misc_feature (1)..(1689): Ceres Seq. ID no. 12370311
  misc_feature: MA Experiment ID: 108434 Result: Down-regulated in Transcription
  misc_feature: MA Experiment 108434 PARAMETER Experiment Name: At_Root_Tips_cDNA_P Parameter: Tissue Value: Root Tips
  misc_feature: MA Experiment ID: 108473 Result: Down-regulated in Transcription
  misc_feature: MA Experiment 108473 PARAMETER Experiment Name: At_Drought_Flowers_cDNA_P Parameter: Timepoint (hr) Value: 7 d
  misc_feature: MA Experiment 108473 PARAMETER Experiment Name: At_Drought_Flowers_cDNA_P Parameter: Tissue Value: Flower
  misc_feature: MA Experiment 108473 PARAMETER Experiment Name: At_Drought_Flowers_cDNA_P Parameter: Treatment Value: Drought vs. No Drought
  misc_feature: MA Experiment ID: 108488 Result: Up-regulated in Transcription
  misc_feature: MA Experiment ID: 108561 Result: Down-regulated in Transcription
  misc_feature: MA Experiment 108561 PARAMETER Experiment Name: At_100uM_ABA_cDNA_P Parameter: Timepoint (hr) Value: 6
  misc_feature: MA Experiment 108561 PARAMETER Experiment Name: At_100uM_ABA_cDNA_P Parameter: Tissue Value: Aerial
  misc_feature: MA Experiment 108561 PARAMETER Experiment Name: At_100uM_ABA_cDNA_P Parameter: Treatment Value: 100uM ABA vs. No Treatment
  misc_feature: MA Experiment ID: 108573 Result: Down-regulated in Transcription
  misc_feature: MA Experiment 108573 PARAMETER Experiment Name: At_Drought_cDNA_P Parameter: Timepoint (hr) Value: 6
  misc_feature: MA Experiment 108573 PARAMETER Experiment Name: At_Drought_cDNA_P Parameter: Tissue Value: Aerial
  misc_feature: MA Experiment 108573 PARAMETER Experiment Name: At_Drought_cDNA_P Parameter: Treatment Value: Drought vs. No Drought
  misc_feature: MA Experiment ID: 108574 Result: Up-regulated in Transcription
  misc_feature: MA Experiment 108574 PARAMETER Experiment Name: At_Wounding__cDNA_P Parameter: Timepoint (hr) Value: 1
  misc_feature: MA Experiment 108574 PARAMETER Experiment Name: At_Wounding__cDNA_P Parameter: Tissue Value: Aerial
  misc_feature: MA Experiment 108574 PARAMETER Experiment Name: At_Wounding__cDNA_P Parameter: Treatment Value: Wounding vs. No Wounding
  misc_feature: MA Experiment ID: 108577 Result: Down-regulated in Transcription
  misc_feature: MA Experiment 108577 PARAMETER Experiment Name: At_42deg_Heat_cDNA_P Parameter: Temperature (deg C) Value: 42 vs. 22
  misc_feature: MA Experiment 108577 PARAMETER Experiment Name: At_42deg_Heat_cDNA_P Parameter: Timepoint (hr) Value: 6
  misc_feature: MA Experiment 108577 PARAMETER Experiment Name: At_42deg_Heat_cDNA_P Parameter: Tissue Value: Aerial
  misc_feature: MA Experiment ID: 108579 Result: Up-regulated in Transcription
  misc_feature: MA Experiment 108579 PARAMETER Experiment Name: At_4deg_Cold_cDNA_P Parameter: Temperature (deg C) Value: 4 vs. 22
  misc_feature: MA Experiment 108579 PARAMETER Experiment Name: At_4deg_Cold_cDNA_P Parameter: Timepoint (hr) Value: 6
  misc_feature: MA Experiment 108579 PARAMETER Experiment Name: At_4deg_Cold_cDNA_P Parameter: Tissue Value: Aerial
  misc_feature: MA Experiment ID: 108585 Result: Down-regulated in Transcription
  misc_feature: MA Experiment 108585 PARAMETER Experiment Name: At_5mM_NaNP_cDNA_P Parameter: Timepoint (hr) Value: 6
  misc_feature: MA Experiment 108585 PARAMETER Experiment Name: At_5mM_NaNP_cDNA_P Parameter: Tissue Value: Aerial
  misc_feature: MA Experiment 108585 PARAMETER Experiment Name: At_5mM_NaNP_cDNA_P Parameter: Treatment Value: null
  misc_feature: MA Experiment ID: 108605 Result: Down-regulated in Transcription
  misc_feature: MA Experiment 108605 PARAMETER Experiment Name: At_100uM_ABA_cDNA_P Parameter: Timepoint (hr) Value: 6
  misc_feature: MA Experiment 108605 PARAMETER Experiment Name: At_100uM_ABA_cDNA_P Parameter: Tissue Value: Aerial
  misc_feature: MA Experiment 108605 PARAMETER Experiment Name: At_100uM_ABA_cDNA_P Parameter: Treatment Value: 100uM ABA vs. No Treatment
  misc_feature: MA Experiment ID: 108607 Result: Down-regulated in Transcription
  misc_feature: MA Experiment 108607 PARAMETER Experiment Name: At_100uM_ABA_cDNA_P Parameter: Timepoint (hr) Value: 4
  misc_feature: MA Experiment 108607 PARAMETER Experiment Name: At_100uM_ABA_cDNA_P Parameter: Tissue Value: Aerial
  misc_feature: MA Experiment 108607 PARAMETER Experiment Name: At_100uM_ABA_cDNA_P Parameter: Treatment Value: 100uM ABA vs. No Treatment
  misc_feature: MA Experiment ID: 108608 Result: Down-regulated in Transcription
  misc_feature: MA Experiment 108608 PARAMETER Experiment Name: At_100uM_ABA_cDNA_P Parameter: Timepoint (hr) Value: 1
  misc_feature: MA Experiment 108608 PARAMETER Experiment Name: At_100uM_ABA_cDNA_P Parameter: Tissue Value: Aerial
  misc_feature: MA Experiment 108608 PARAMETER Experiment Name: At_100uM_ABA_cDNA_P Parameter: Treatment Value: 100uM ABA vs. No Treatment
  misc_feature: MA Experiment ID: 108668 Result: Down-regulated in Transcription
  misc_feature: MA Experiment 108668 PARAMETER Experiment Name: At_2mM_SA_cDNA_P Parameter: Plant Line Value: WS
  misc_feature: MA Experiment 108668 PARAMETER Experiment Name: At_2mM_SA_cDNA_P Parameter: Timepoint (hr) Value: 6
  misc_feature: MA Experiment 108668 PARAMETER Experiment Name: At_2mM_SA_cDNA_P Parameter: Treatment Value: 2mM SA vs. No Treatment
  misc_feature: MA Experiment ID: 20000069 Result: Up-regulated in Transcription
  misc_feature: MA Experiment 20000069 PARAMETER Experiment Name: At_100uM_ABA_Mutants_cDNA_P Parameter: Plant Line Value: CS23
  misc_feature: MA Experiment 20000069 PARAMETER Experiment Name: At_100uM_ABA_Mutants_cDNA_P Parameter: Timepoint (hr) Value: 6
  misc_feature: MA Experiment 20000069 PARAMETER Experiment Name: At_100uM_ABA_Mutants_cDNA_P Parameter: Tissue Value: Aerial
  misc_feature: MA Experiment 20000069 PARAMETER Experiment Name: At_100uM_ABA_Mutants_cDNA_P Parameter: Treatment Value: 100uM ABA vs. No Treatment
  misc_feature: MA Experiment ID: 20000086 Result: Up-regulated in Transcription
  misc_feature: MA Experiment 20000086 PARAMETER Experiment Name: At_100uM_ABA_Mutants_cDNA_P Parameter: Plant Line Value: CS22
  misc_feature: MA Experiment 20000086 PARAMETER Experiment Name: At_100uM_ABA_Mutants_cDNA_P Parameter: Timepoint (hr) Value: 6
  misc_feature: MA Experiment 20000086 PARAMETER Experiment Name: At_100uM_ABA_Mutants_cDNA_P Parameter: Tissue Value: Aerial
  misc_feature: MA Experiment 20000086 PARAMETER Experiment Name: At_100uM_ABA_Mutants_cDNA_P Parameter: Treatment Value: 100uM ABA vs. No Treatment
  misc_feature: MA Experiment ID: 20000087 Result: Up-regulated in Transcription
  misc_feature: MA Experiment 20000087 PARAMETER Experiment Name: At_100uM_ABA_Mutants_cDNA_P Parameter: Plant Line Value: WS
  misc_feature: MA Experiment 20000087 PARAMETER Experiment Name: At_100uM_ABA_Mutants_cDNA_P Parameter: Timepoint (hr) Value: 6
  misc_feature: MA Experiment 20000087 PARAMETER Experiment Name: At_100uM_ABA_Mutants_cDNA_P Parameter: Tissue Value: Aerial
  misc_feature: MA Experiment 20000087 PARAMETER Experiment Name: At_100uM_ABA_Mutants_cDNA_P Parameter: Treatment Value: 100uM ABA vs. No Treatment
  misc_feature: MA Experiment ID: 20000090 Result: Up-regulated in Transcription
  misc_feature: MA Experiment ID: 20000093 Result: Down-regulated in Transcription
  misc_feature: MA Experiment 20000093 PARAMETER Experiment Name: At_42deg_Heat_cDNA_P Parameter: Temperature (deg C) Value: 42 vs. 22
  misc_feature: MA Experiment 20000093 PARAMETER Experiment Name: At_42deg_Heat_cDNA_P Parameter: Timepoint (hr) Value: 0.5
  misc_feature: MA Experiment 20000093 PARAMETER Experiment Name: At_42deg_Heat_cDNA_P Parameter: Tissue Value: Aerial
  misc_feature: MA Experiment ID: 20000112 Result: Down-regulated in Transcription
  misc_feature: MA Experiment 20000112 PARAMETER Experiment Name: At_42deg_Heat_cDNA_P Parameter: Temperature (deg C) Value: 42 vs. 22
  misc_feature: MA Experiment 20000112 PARAMETER Experiment Name: At_42deg_Heat_cDNA_P Parameter: Timepoint (hr) Value: 2
  misc_feature: MA Experiment 20000112 PARAMETER Experiment Name: At_42deg_Heat_cDNA_P Parameter: Tissue Value: Aerial
  misc_feature: MA Experiment ID: 20000169 Result: Down-regulated in Transcription
  misc_feature: MA Experiment 20000169 PARAMETER Experiment Name: At_100uM_ABA_P Parameter: Age (day) Value: 14
  misc_feature: MA Experiment 20000169 PARAMETER Experiment Name: At_100uM_ABA_P Parameter: Organism Value: A. thaliana
  misc_feature: MA Experiment 20000169 PARAMETER Experiment Name: At_100uM_ABA_P Parameter: Plant Line Value: WS
  misc_feature: MA Experiment 20000169 PARAMETER Experiment Name: At_100uM_ABA_P Parameter: Timepoint (hr) Value: 6
  misc_feature: MA Experiment 20000169 PARAMETER Experiment Name: At_100uM_ABA_P Parameter: Tissue Value: Aerial
  misc_feature: MA Experiment 20000169 PARAMETER Experiment Name: At_100uM_ABA_P Parameter: Treatment Value: 100uM ABA vs. No Treatment
  misc_feature: MA Experiment ID: 20000171 Result: Down-regulated in Transcription
  misc_feature: MA Experiment 20000171 PARAMETER Experiment Name: At_42deg_Heat_P Parameter: Age (day) Value: 14
  misc_feature: MA Experiment 20000171 PARAMETER Experiment Name: At_42deg_Heat_P Parameter: Organism Value: A. thaliana
  misc_feature: MA Experiment 20000171 PARAMETER Experiment Name: At_42deg_Heat_P Parameter: Plant Line Value: WS
  misc_feature: MA Experiment 20000171 PARAMETER Experiment Name: At_42deg_Heat_P Parameter: Temperature (deg C) Value: 42 vs. 22
  misc_feature: MA Experiment 20000171 PARAMETER Experiment Name: At_42deg_Heat_P Parameter: Timepoint (hr) Value: 1
  misc_feature: MA Experiment 20000171 PARAMETER Experiment Name: At_42deg_Heat_P Parameter: Tissue Value: Aerial
  misc_feature: MA Experiment ID: 20000179 Result: Down-regulated in Transcription
  misc_feature: MA Experiment 20000179 PARAMETER Experiment Name: At_Germinating_Seeds_P Parameter: Age (hr) Value: 6 vs. 0
  misc_feature: MA Experiment 20000179 PARAMETER Experiment Name: At_Germinating_Seeds_P Parameter: Tissue Value: Germinating Seeds
  misc_feature: MA Experiment ID: 20000182 Result: Down-regulated in Transcription
  misc_feature: MA Experiment 20000182 PARAMETER Experiment Name: At_2mM_SA_P Parameter: Age (day) Value: 14
  misc_feature: MA Experiment 20000182 PARAMETER Experiment Name: At_2mM_SA_P Parameter: Organism Value: A. thaliana
  misc_feature: MA Experiment 20000182 PARAMETER Experiment Name: At_2mM_SA_P Parameter: Plant Line Value: WS
  misc_feature: MA Experiment 20000182 PARAMETER Experiment Name: At_2mM_SA_P Parameter: Timepoint (hr) Value: 6
  misc_feature: MA Experiment 20000182 PARAMETER Experiment Name: At_2mM_SA_P Parameter: Tissue Value: Aerial
  misc_feature: MA Experiment 20000182 PARAMETER Experiment Name: At_2mM_SA_P Parameter: Treatment Value: 2mM SA vs. No Treatment
  misc_feature: MA Experiment ID: 20000211 Result: Up-regulated in Transcription
  misc_feature: MA Experiment 20000211 PARAMETER Experiment Name: At_0.001percent_MeJA__P Parameter: Age (day) Value: 14
  misc_feature: MA Experiment 20000211 PARAMETER Experiment Name: At_0.001percent_MeJA__P Parameter: Organism Value: A. thaliana
  misc_feature: MA Experiment 20000211 PARAMETER Experiment Name: At_0.001percent_MeJA__P Parameter: Plant Line Value: WS
  misc_feature: MA Experiment 20000211 PARAMETER Experiment Name: At_0.001percent_MeJA__P Parameter: Timepoint (hr) Value: 1
  misc_feature: MA Experiment 20000211 PARAMETER Experiment Name: At_0.001percent_MeJA__P Parameter: Tissue Value: Aerial
  misc_feature: MA Experiment 20000211 PARAMETER Experiment Name: At_0.001percent_MeJA__P Parameter: Treatment Value: 0.001percent MeJA vs. No Treatment
  misc_feature: MA Experiment ID: 20000214 Result: Up-regulated in Transcription
  misc_feature: MA Experiment 20000214 PARAMETER Experiment Name: At_4deg_Cold_P Parameter: Timepoint (hr) Value: 6
  misc_feature: MA Experiment ID: 20000227 Result: Down-regulated in Transcription
  misc_feature: MA Experiment 20000227 PARAMETER Experiment Name: At_Root-Tips-vs-Tops_P Parameter: Tissue Value: Root Tips vs. Root Tops
  misc_feature: MA Experiment ID: 20000437 Result: Down-regulated in Transcription
  misc_feature: MA Experiment 20000437 PARAMETER Experiment Name: At_Drought_P Parameter: Age (day) Value: 8
  misc_feature: MA Experiment 20000437 PARAMETER Experiment Name: At_Drought_P Parameter: Organism Value: A. thaliana
  misc_feature: MA Experiment 20000437 PARAMETER Experiment Name: At_Drought_P Parameter: Plant Line Value: WS
  misc_feature: MA Experiment 20000437 PARAMETER Experiment Name: At_Drought_P Parameter: Timepoint (hr) Value: 24
  misc_feature: MA Experiment 20000437 PARAMETER Experiment Name: At_Drought_P Parameter: Tissue Value: Whole Plant
  misc_feature: MA Experiment 20000437 PARAMETER Experiment Name: At_Drought_P Parameter: Treatment Value: Drought vs. No Drought
  misc_feature: MA Experiment ID: 20001560 Result: Down-regulated in Transcription
  misc_feature: MA Experiment 20001560 PARAMETER Experiment Name: At_Drought_Soil_Dry_P Parameter: Age (day) Value: 28
  misc_feature: MA Experiment 20001560 PARAMETER Experiment Name: At_Drought_Soil_Dry_P Parameter: Organism Value: A. thaliana
  misc_feature: MA Experiment 20001560 PARAMETER Experiment Name: At_Drought_Soil_Dry_P Parameter: Plant Line Value: WS
  misc_feature: MA Experiment 20001560 PARAMETER Experiment Name: At_Drought_Soil_Dry_P Parameter: Post Timepoint (hr) Value: None
  misc_feature: MA Experiment 20001560 PARAMETER Experiment Name: At_Drought_Soil_Dry_P Parameter: Post-Treatment Value: None
  misc_feature: MA Experiment 20001560 PARAMETER Experiment Name: At_Drought_Soil_Dry_P Parameter: Timepoint (day) Value: 14
  misc_feature: MA Experiment 20001560 PARAMETER Experiment Name: At_Drought_Soil_Dry_P Parameter: Treatment Value: Drought vs. No Drought
  misc_feature: MA Experiment ID: 20001757 Result: Up-regulated in Transcription
  misc_feature: MA Experiment 20001757 PARAMETER Experiment Name: At_50mM_NH4NO3_L-to-H_P Parameter: Timepoint (hr) Value: 6
  misc_feature: MA Experiment 20001757 PARAMETER Experiment Name: At_50mM_NH4NO3_L-to-H_P Parameter: Tissue Value: Leaf
  misc_feature: MA Experiment 20001757 PARAMETER Experiment Name: At_50mM_NH4NO3_L-to-H_P Parameter: Treatment Value: 50mM NH4NO3 vs 100mM Mannitol
  misc_feature: MA Experiment ID: 20001904 Result: Down-regulated in Transcription
  misc_feature: MA Experiment 20001904 PARAMETER Experiment Name: At_Drought_Reproduction_P Parameter: Age (day) Value: 37
  misc_feature: MA Experiment 20001904 PARAMETER Experiment Name: At_Drought_Reproduction_P Parameter: Organism Value: A. thaliana
  misc_feature: MA Experiment 20001904 PARAMETER Experiment Name: At_Drought_Reproduction_P Parameter: Plant Line Value: WS
  misc_feature: MA Experiment 20001904 PARAMETER Experiment Name: At_Drought_Reproduction_P Parameter: Timepoint (day) Value: 7
  misc_feature: MA Experiment 20001904 PARAMETER Experiment Name: At_Drought_Reproduction_P Parameter: Tissue Value: Rosettes
  misc_feature: MA Experiment 20001904 PARAMETER Experiment Name: At_Drought_Reproduction_P Parameter: Treatment Value: Drought vs. No Drought
  misc_feature: MA Experiment ID: 20001905 Result: Down-regulated in Transcription
  misc_feature: MA Experiment 20001905 PARAMETER Experiment Name: At_Drought_Reproduction_P Parameter: Age (day) Value: 40
  misc_feature: MA Experiment 20001905 PARAMETER Experiment Name: At_Drought_Reproduction_P Parameter: Organism Value: A. thaliana
  misc_feature: MA Experiment 20001905 PARAMETER Experiment Name: At_Drought_Reproduction_P Parameter: Plant Line Value: WS
  misc_feature: MA Experiment 20001905 PARAMETER Experiment Name: At_Drought_Reproduction_P Parameter: Timepoint (day) Value: 10
  misc_feature: MA Experiment 20001905 PARAMETER Experiment Name: At_Drought_Reproduction_P Parameter: Tissue Value: Rosettes
  misc_feature: MA Experiment 20001905 PARAMETER Experiment Name: At_Drought_Reproduction_P Parameter: Treatment Value: Drought vs. No Drought
  misc_feature: MA Experiment ID: 20001906 Result: Down-regulated in Transcription
  misc_feature: MA Experiment 20001906 PARAMETER Experiment Name: At_Drought_Reproduction_P Parameter: Age (day) Value: 35
  misc_feature: MA Experiment 20001906 PARAMETER Experiment Name: At_Drought_Reproduction_P Parameter: Organism Value: A. thaliana
  misc_feature: MA Experiment 20001906 PARAMETER Experiment Name: At_Drought_Reproduction_P Parameter: Plant Line Value: WS
  misc_feature: MA Experiment 20001906 PARAMETER Experiment Name: At_Drought_Reproduction_P Parameter: Timepoint (day) Value: 5
  misc_feature: MA Experiment 20001906 PARAMETER Experiment Name: At_Drought_Reproduction_P Parameter: Tissue Value: Siliques
  misc_feature: MA Experiment 20001906 PARAMETER Experiment Name: At_Drought_Reproduction_P Parameter: Treatment Value: Drought vs. No Drought
  misc_feature: MA Experiment ID: 20001908 Result: Down-regulated in Transcription
  misc_feature: MA Experiment 20001908 PARAMETER Experiment Name: At_Drought_Reproduction_P Parameter: Age (day) Value: 40
  misc_feature: MA Experiment 20001908 PARAMETER Experiment Name: At_Drought_Reproduction_P Parameter: Organism Value: A. thaliana
  misc_feature: MA Experiment 20001908 PARAMETER Experiment Name: At_Drought_Reproduction_P Parameter: Plant Line Value: WS
  misc_feature: MA Experiment 20001908 PARAMETER Experiment Name: At_Drought_Reproduction_P Parameter: Timepoint (day) Value: 10
  misc_feature: MA Experiment 20001908 PARAMETER Experiment Name: At_Drought_Reproduction_P Parameter: Tissue Value: Siliques
  misc_feature: MA Experiment 20001908 PARAMETER Experiment Name: At_Drought_Reproduction_P Parameter: Treatment Value: Drought vs. No Drought
accgactctctctctctctctctccgtaacaaaaaaatcaccaatggcaaaacaatatctctttgtactcctctcaatctcctatctcttatcactggagctcacggcggccaccgcagcctcacagaccggagcttccaaaaaagccataaacttcatccaatcttcttaaaaaaccaccacataccctgccttatgtgtccactcactctccgtctacgcaaacgacatccaaacaagccctaaacgtttagctgagaccgctatagccgtgacactaagccgagcccaatccacgaagctcttcgtctcgcgtctaacacgtatgaagggtcttaagaagcgcgaggtcgaagccatcaaagattgcgtcgaggagatgaacgataccgttgaccgtttgaccaaatctgttcaagaactgaagttgtgtgggagtgtcaaacagaagaaagagtcgagttctgaagagtcgggatcggaggaagagtgaaacagaaatgagattttacattgataaacaaaacaaaaaatacaatacttttgtcctaatcttgacggaaacttttttttttgctgcggaacatttcctttattttaatataatggtatgtgaaaatgaattcatctaaagacaaactgaaaaacatgaaacaagactctctttttgtagcagatagagagagacacagagagaaaaagagatggcaaacgaaacggctagtaaagtagcgggttacttatctaaccaagactcaagacaccaaaacagacatgtttgcatctaagatatgcttatttgttgacagattaataatactcagggtagtggcactggtggaacttggccgttgcttcctgtgccagctccaatggtcggggttggcgcttcaaatccggggtttgggacaagcgtatcatcgccaccagggagttgggtgtgaggtccggccccttgtccaccattatatgatgggattcccccaccagtaagtggagctccggtgacaggattgtaagggtagaacggcttcttgcatttgggaggaagcaagaaccttccaacaccgggaatgagaatagttggtttgggctcaatggttacaagaaagtcagggtgtttgacatcagtggtcttaggggacttgggaacgtgacgtagtccactcacttgctctacagatccaagcactaggcttaaaaccacgacaatgactgcggaggtgataagtgaagaagccattaattttattttattttgttgtagaggagaaagctcgtgtgtttgtttgaccaaatctgttcaagaactgaagttgtgtgggagtgccaaagatcaagaccagtttgcgtaccacattagtaatgctcagacttggactagtgcggctttgactgacgagaacacttgctccgatgggttctcgggtcgggttatggatgggaggatcaagaactcggttcgggctagaatcatgaacgtgggacatgaaaccagcaacgctttgtccttgattaatgcctttgctaaaacttactaatttaaaactatattttgtcctgtaaaatatatatatagataaatgtaatgtcttgctaagagtttgatgtgatatatttttttcgattttggtagtttctttttgttttgtaacgtggtttataatagtataatgtgtattttgagct

SEQ ID NO: 43341 - protein, 109 aa, Arabidopsis thaliana
  peptide (1)..(109): Ceres Seq. ID no. 12370312
  misc_feature (1)..(109): Homolog of NCBI NO: 21618088 NR Description: ripening-related protein-like [Arabidopsis
  misc_feature (1)..(109): Homolog of NCBI NO: 15241799 NR Description: ripening-related protein - like
  misc_feature (1)..(109): Homolog of NCBI NO: 11127599 NR Description: DC 1.2 homolog [Arabidopsis thaliana]
  misc_feature (21)..(106): Homolog of NCBI NO: 112717 NR Description: 21 KD PROTEIN PRECURSOR (1.2 PROTEIN)
  misc_feature (27)..(106): Homolog of NCBI NO: 21555297 NR Description: unknown [Arabidopsis thaliana]
  misc_feature (27)..(106): Homolog of NCBI NO: 15234547 NR Description: putative protein
  misc_feature (27)..(109): Homolog of NCBI NO: 15234982 NR Description: putative protein
  misc_feature (27)..(106): Homolog of NCBI NO: 7488727 NR Description: 21K protein precursor - alfalfa
  misc_feature (27)..(106): Homolog of NCBI NO: 7406663 NR Description: putative ripening-related protein [Vitis vinifera]
  misc_feature (27)..(109): Homolog of NCBI NO: 15232790 NR Description: putative protein; protein id: At3g47380.1
MTAEVISEEAINFILFCCRGESSCVCLTKSVQELKLCGSAKDQDQFAYHISNAQTWTSAALTDENTCSDGFSGRVMDGRIKNSVRARIMNVGHETSNALSLINAFAKTY

SEQ ID NO: 43342 - protein, 81 aa, Arabidopsis thaliana
  peptide (1)..(81): Ceres Seq. ID no. 12370313
  misc_feature (20)..(81): Homolog of NCBI NO: 15241797 NR Description: putative protein; protein id: At5g62330.1
TDSLSLSLRNKKITNGKTISLCTPLNLLSLITGAHGGHRSLTDRSFQKSHKLHPIFLKNHHIPCLMCPLTLRLRKRHPNKP

SEQ ID NO: 43343 - protein, 72 aa, Arabidopsis thaliana
  peptide (1)..(72): Ceres Seq. ID no. 12370314
MFASKICLFVDRLIILRVVALVELGRCFLCQLQWSGLALQIRGLGQAYHRHQGVGCEVRPLVHHYMMGFPHQ

SEQ ID NO: 43344 - DNA, 1206 bp, Arabidopsis thaliana
  misc_feature (1)..(1206): Ceres Seq. ID no. 12329920
  misc_feature: MA Experiment ID: 108463 Result: Down-regulated in Transcription
  misc_feature: MA Experiment 108463 PARAMETER Experiment Name: At_Germinating_Seeds_cDNA_P Parameter: Age (day) Value: 3 vs. 0
  misc_feature: MA Experiment 108463 PARAMETER Experiment Name: At_Germinating_Seeds_cDNA_P Parameter: Tissue Value: Germinating Seeds
ccggcgaagagtttcggagaacaagtttggtctttttaggggtttgagcagtggagtcggtaaccatgttatgcggaggctctcgcgcctccgtgcatttgtgggaccatcgtcatcctcctaggctcggtgctaaggttttgcggaaatcttcgttcatgctcagaccttgttcggctatatcgcagcagcggataaagtcgtcgtttaggtctcactgtaaaactccaagaaaaatcccagctcctctcgattgtttcagccagggagatgatcatcctgagctttcagctgaagggctttccccagttgcaggaggcattgttgctctagggaagtttgatgccctgcatatcggtcatcgagagcttgcaattcaagctgcaagaattggtactccatatctactgtcgtttgttggattggctgaagtacttggttggaagcctagagcaccgatagtagccaaatgcgacagaaaacgagtgctttcctcttgggcatcgtattgtggtagcatagcaccggtagagtttgagattgaatttgccagcgttcgacaccttaacccacaacagtttgtcgagaagttgtcaagagagcttagagtctgcggagttgtggcaggcgaaaattacaggtttggataccgggcttctggtgacgcctctgaacttgtgaggttatgcaaagactttggtatcagcgcttacatcattaactccgtgatggataagaaccaagtctctgtaaacacagaggaggaggactcaaagtcgaaagaaagaggtcaagtctcatccacacgagtccgtcatgctctagctgcaggagatgtgaggtatgtaacagagctcctcggcagaccacacagggtcatctctcggacaagaacacaagatataacgagcaaaagagggaggatctcgcttcagacatcttcgctactaaatttaccaccagggaatggagtttacaaagcatgctcgcttatagttggtgataagcatccaatttcgtgtaaggttattgtcgatacatcgaatctctatatagaaacagaggaagaacgtttccacaactcagatgagtctcaagagtttcaactcttagggattgagttcggttaattcacacattgataatcaaaagaataacatttccatttcaagataacgattaacaaagatgttaactttgactccg

SEQ ID NO: 43345 - protein, 354 aa, Arabidopsis thaliana
  peptide (1)..(354): Ceres Seq. ID no. 12329921
  misc_feature (86)..(322): Homolog of NCBI NO: 15609923 NR Description: ribF [Mycobacterium tuberculosis H37Rv]
  misc_feature (87)..(267): Homolog of NCBI NO: 18310664 NR Description: riboflavin biosynthesis protein [Clostridium
  misc_feature (84)..(285): Homolog of NCBI NO: 22993644 NR Description: hypothetical protein [Xylella fastidiosa Dixon]
  misc_feature (84)..(285): Homolog of NCBI NO: 15839010 NR Description: riboflavin biosynthesis protein [Xylella
  misc_feature (86)..(333): Homolog of NCBI NO: 29829088 NR Description: putative riboflavin kinase [Streptomyces
  misc_feature (82)..(354): Homolog of NCBI NO: 29150370 NR Description: unknow protein [Oryza sativa (japonica
  misc_feature (22)..(335): Homolog of NCBI NO: 10178276 NR Description: putative protein [Arabidopsis thaliana]
  misc_feature (1)..(354): Homolog of NCBI NO: 22326656 NR Description: putative protein
  misc_feature (1)..(354): Homolog of NCBI NO: 18420664 NR Description: expressed protein
  misc_feature (1)..(354): Homolog of NCBI NO: 21553715 NR Description: unknown [Arabidopsis thaliana]
MLCGGSRASVHLWDHRHPPRLGAKVLRKSSFMLRPCSAISQQRIKSSFRSHCKTPRKIPAPLDCFSQGDDHPELSAEGLSPVAGGIVALGKFDALHIGHRELAIQAARIGTPYLLSFVGLAEVLGWKPRAPIVAKCDRKRVLSSWASYCGSIAPVEFEIEFASVRHLNPQQFVEKLSRELRVCGVVAGENYRFGYRASGDASELVRLCKDFGISAYIINSVMDKNQVSVNTEEEDSKSKERGQVSSTRVRHALAAGDVRYVTELLGRPHRVISRTRTQDITSKRGRISLQTSSLLNLPPGNGVYKACSLIVGDKHPISCKVIVDTSNLYIETEEERFHNSDESQEFQLLGIEFG

SEQ ID NO: 43346 - protein, 323 aa, Arabidopsis thaliana
  peptide (1)..(323): Ceres Seq. ID no. 12329922
  misc_feature (55)..(291): Homolog of NCBI NO: 15609923 NR Description: ribF [Mycobacterium tuberculosis H37Rv]
  misc_feature (56)..(236): Homolog of NCBI NO: 18310664 NR Description: riboflavin biosynthesis protein [Clostridium
  misc_feature (53)..(254): Homolog of NCBI NO: 22993644 NR Description: hypothetical protein [Xylella fastidiosa Dixon]
  misc_feature (53)..(254): Homolog of NCBI NO: 15839010 NR Description: riboflavin biosynthesis protein [Xylella
  misc_feature (55)..(302): Homolog of NCBI NO: 29829088 NR Description: putative riboflavin kinase [Streptomyces
  misc_feature (51)..(323): Homolog of NCBI NO: 29150370 NR Description: unknow protein [Oryza sativa (japonica
  misc_feature (1)..(304): Homolog of NCBI NO: 10178276 NR Description: putative protein [Arabidopsis thaliana]
  misc_feature (1)..(323): Homolog of NCBI NO: 22326656 NR Description: putative protein
  misc_feature (1)..(323): Homolog of NCBI NO: 18420664 NR Description: expressed protein
  misc_feature (1)..(323): Homolog of NCBI NO: 21553715 NR Description: unknown [Arabidopsis thaliana]
MLRPCSAISQQRIKSSFRSHCKTPRKIPAPLDCFSQGDDHPELSAEGLSPVAGGIVALGKFDALHIGHRELAIQAARIGTPYLLSFVGLAEVLGWKPRAPIVAKCDRKRVLSSWASYCGSIAPVEFEIEFASVRHLNPQQFVEKLSRELRVCGVVAGENYRFGYRASGDASELVRLCKDFGISAYIINSVMDKNQVSVNTEEEDSKSKERGQVSSTRVRHALAAGDVRYVTELLGRPHRVISRTRTQDITSKRGRISLQTSSLLNLPPGNGVYKACSLIVGDKHPISCKVIVDTSNLYIETEEERFHNSDESQEFQLLGIEFG

SEQ ID NO: 43347 - DNA, 611 bp, Arabidopsis thaliana
  misc_feature (1)..(611): Ceres Seq. ID no. 12336560
  misc_feature: MA Experiment ID: 20000184 Result: Up-regulated in Transcription
  misc_feature: MA Experiment 20000184 PARAMETER Experiment Name: At_Shoots__P Parameter: Age (day) Value: 7
  misc_feature: MA Experiment 20000184 PARAMETER Experiment Name: At_Shoots__P Parameter: Tissue Value: Shoots vs. Whole Plant
  misc_feature: MA Experiment ID: 20000211 Result: Up-regulated in Transcription
  misc_feature: MA Experiment 20000211 PARAMETER Experiment Name: At_0.001percent_MeJA__P Parameter: Age (day) Value: 14
  misc_feature: MA Experiment 20000211 PARAMETER Experiment Name: At_0.001percent_MeJA__P Parameter: Organism Value: A. thaliana
  misc_feature: MA Experiment 20000211 PARAMETER Experiment Name: At_0.001percent_MeJA__P Parameter: Plant Line Value: WS
  misc_feature: MA Experiment 20000211 PARAMETER Experiment Name: At_0.001percent_MeJA__P Parameter: Timepoint (hr) Value: 1
  misc_feature: MA Experiment 20000211 PARAMETER Experiment Name: At_0.001percent_MeJA__P Parameter: Tissue Value: Aerial
  misc_feature: MA Experiment 20000211 PARAMETER Experiment Name: At_0.001percent_MeJA__P Parameter: Treatment Value: 0.001percent MeJA vs. No Treatment
  misc_feature: MA Experiment ID: 20000265 Result: Up-regulated in Transcription
  misc_feature: MA Experiment 20000265 PARAMETER Experiment Name: At_Open_Flower_P Parameter: Age (day) Value: 21
  misc_feature: MA Experiment 20000265 PARAMETER Experiment Name: At_Open_Flower_P Parameter: Plant Line Value: WS
  misc_feature: MA Experiment 20000265 PARAMETER Experiment Name: At_Open_Flower_P Parameter: Tissue Value: Closed Flower vs. Whole Plant
  misc_feature: MA Experiment ID: 20000286 Result: Up-regulated in Transcription
  misc_feature: MA Experiment 20000286 PARAMETER Experiment Name: At_Open_Flower_P Parameter: Age (day) Value: 21
  misc_feature: MA Experiment 20000286 PARAMETER Experiment Name: At_Open_Flower_P Parameter: Plant Line Value: WS
  misc_feature: MA Experiment 20000286 PARAMETER Experiment Name: At_Open_Flower_P Parameter: Tissue Value: Half Open vs. Whole Plant
  misc_feature: MA Experiment ID: 20000436 Result: Down-regulated in Transcription
  misc_feature: MA Experiment 20000436 PARAMETER Experiment Name: At_Drought_P Parameter: Age (day) Value: 7
  misc_feature: MA Experiment 20000436 PARAMETER Experiment Name: At_Drought_P Parameter: Organism Value: A. thaliana
  misc_feature: MA Experiment 20000436 PARAMETER Experiment Name: At_Drought_P Parameter: Plant Line Value: WS
  misc_feature: MA Experiment 20000436 PARAMETER Experiment Name: At_Drought_P Parameter: Timepoint (hr) Value: 12
  misc_feature: MA Experiment 20000436 PARAMETER Experiment Name: At_Drought_P Parameter: Tissue Value: Whole Plant
  misc_feature: MA Experiment 20000436 PARAMETER Experiment Name: At_Drought_P Parameter: Treatment Value: Drought vs. No Drought
  misc_feature: MA Experiment ID: 20000438 Result: Up-regulated in Transcription
  misc_feature: MA Experiment 20000438 PARAMETER Experiment Name: At_Shoots__P Parameter: Age (day) Value: 14
  misc_feature: MA Experiment 20000438 PARAMETER Experiment Name: At_Shoots__P Parameter: Tissue Value: Shoots vs. Whole Plant
  misc_feature: MA Experiment ID: 20000573 Result: Down-regulated in Transcription
  misc_feature: MA Experiment 20000573 PARAMETER Experiment Name: At_100uM_ABA_Mutants__P Parameter: Organism Value: A. thaliana
  misc_feature: MA Experiment 20000573 PARAMETER Experiment Name: At_100uM_ABA_Mutants__P Parameter: Plant Line Value: CS22 vs. Ler wt
  misc_feature: MA Experiment 20000573 PARAMETER Experiment Name: At_100uM_ABA_Mutants__P Parameter: Timepoint (hr) Value: N/A
  misc_feature: MA Experiment 20000573 PARAMETER Experiment Name: At_100uM_ABA_Mutants__P Parameter: Tissue Value: Whole Plant
  misc_feature: MA Experiment 20000573 PARAMETER Experiment Name: At_100uM_ABA_Mutants__P Parameter: Treatment Value: None
  misc_feature: MA Experiment ID: 20001248 Result: Down-regulated in Transcription
  misc_feature: MA Experiment 20001248 PARAMETER Experiment Name: At_Far-red-induction_P Parameter: Age (day) Value: 7
  misc_feature: MA Experiment 20001248 PARAMETER Experiment Name: At_Far-red-induction_P Parameter: Light Value: Far-red vs. White
  misc_feature: MA Experiment 20001248 PARAMETER Experiment Name: At_Far-red-induction_P Parameter: Organism Value: A. thaliana
  misc_feature: MA Experiment 20001248 PARAMETER Experiment Name: At_Far-red-induction_P Parameter: Plant Line Value: Columbia
  misc_feature: MA Experiment 20001248 PARAMETER Experiment Name: At_Far-red-induction_P Parameter: Timepoint (hr) Value: 4
  misc_feature: MA Experiment 20001248 PARAMETER Experiment Name: At_Far-red-induction_P Parameter: Tissue Value: Whole Plant
  misc_feature: MA Experiment ID: 20001451 Result: Down-regulated in Transcription
  misc_feature: MA Experiment 20001451 PARAMETER Experiment Name: At_Far-red-induction_P Parameter: Age (day) Value: 7
  misc_feature: MA Experiment 20001451 PARAMETER Experiment Name: At_Far-red-induction_P Parameter: Light Value: Far-red vs. White
  misc_feature: MA Experiment 20001451 PARAMETER Experiment Name: At_Far-red-induction_P Parameter: Organism Value: A. thaliana
  misc_feature: MA Experiment 20001451 PARAMETER Experiment Name: At_Far-red-induction_P Parameter: Plant Line Value: Columbia
  misc_feature: MA Experiment 20001451 PARAMETER Experiment Name: At_Far-red-induction_P Parameter: Timepoint (hr) Value: 24
  misc_feature: MA Experiment 20001451 PARAMETER Experiment Name: At_Far-red-induction_P Parameter: Tissue Value: Whole Plant
accaaacacttgcccttcacacttctttgtcatcttccctctttccttcttctttcttcctcaaattcacttattcacattctctcaccagacacaaactccagattcatccgacaatggaaactttcagaacattccatctttttctcttcttcttcttcttcacattcactactaccctgacgtcaccatctcagatcgcagactgtacaatgtgcacttcttgtgacaacccttgtcaaccaaacccttctcctcctcctccaccgtcaaatccatctcctcctcctccatctcccaccaccaccgcctgtcctccacctcctagctccagtggtggtggtccttactactactaccctcctgcttctcaatctggctcttaccgtccaccaccttcttcctccagtggtggctactactatccacctcctaaaagtggaggaaactacccttatacaccgcctccaaaccctatcgttccatattttccgttttactattacaaccctccgccgcaatctgttatgtccggatccgatgcaaagatcagattctcttacggagtttcatttattttaattttctctctttatttcggttgcttctag

SEQ ID NO: 43348 - protein, 202 aa, Arabidopsis thaliana
  peptide (1)..(202): Ceres Seq. ID no. 12336561
  misc_feature (76)..(172): Pfam Name: Protein of unknown function, DUF605 Pfam Description: Protein of unknown function, DUF605
  misc_feature (77)..(174): Homolog of NCBI NO: 7488674 NR Description: extensin homolog HRGP2 - soybean (fragment)
  misc_feature (77)..(174): Homolog of NCBI NO: 791150 NR Description: extensin-like protein [Vigna unguiculata]
  misc_feature (77)..(174): Homolog of NCBI NO: 7488998 NR Description: extensin class I (clone uG-18) - tomato
  misc_feature (77)..(172): Homolog of NCBI NO: 3204132 NR Description: extensin [Cicer arietinum]
  misc_feature (77)..(174): Homolog of NCBI NO: 81869 NR Description: hydroxyproline-rich glycoprotein (clone Hyp2.13)
  misc_feature (70)..(171): Homolog of NCBI NO: 34894212 NR Description: P0439B06.27 [Oryza sativa (japonica
  misc_feature (69)..(179): Homolog of NCBI NO: 34894480 NR Description: OJ1116_C07.3 [Oryza sativa (japonica
  misc_feature (39)..(198): Homolog of NCBI NO: 18397707 NR Description: expressed protein
  misc_feature (39)..(198): Homolog of NCBI NO: 18423010 NR Description: expressed protein
  misc_feature (39)..(202): Homolog of NCBI NO: 15234820 NR Description: extensin like protein; protein id: At4g16140.1
QTLALHTSLSSSLFPSSFFLKFTYSHSLTRHKLQIHPTMETFRTFHLFLFFFFFTFTTTLTSPSQIADCTMCTSCDNPCQPNPSPPPPPSNPSPPPPSPTTTACPPPPSSSGGGPYYYYPPASQSGSYRPPPSSSSGGYYYPPPKSGGNYPYTPPPNPIVPYFPFYYYNPPPQSVMSGSDAKIRFSYGVSFILIFSLYFGCF

SEQ ID NO: 43349 - protein, 164 aa, Arabidopsis thaliana
  peptide (1)..(164): Ceres Seq. ID no. 12336562
  misc_feature (38)..(134): Pfam Name: Protein of unknown function, DUF605 Pfam Description: Protein of unknown function, DUF605
  misc_feature (39)..(136): Homolog of NCBI NO: 7488674 NR Description: extensin homolog HRGP2 - soybean (fragment)
  misc_feature (39)..(136): Homolog of NCBI NO: 791150 NR Description: extensin-like protein [Vigna unguiculata]
  misc_feature (39)..(136): Homolog of NCBI NO: 7488998 NR Description: extensin class I (clone uG-18) - tomato
  misc_feature (39)..(134): Homolog of NCBI NO: 3204132 NR Description: extensin [Cicer arietinum]
  misc_feature (39)..(136): Homolog of NCBI NO: 81869 NR Description: hydroxyproline-rich glycoprotein (clone Hyp2.13)
  misc_feature (32)..(133): Homolog of NCBI NO: 34894212 NR Description: P0439B06.27 [Oryza sativa (japonica
  misc_feature (31)..(141): Homolog of NCBI NO: 34894480 NR Description: OJ1116_C07.3 [Oryza sativa (japonica
  misc_feature (1)..(160): Homolog of NCBI NO: 18397707 NR Description: expressed protein
  misc_feature (1)..(160): Homolog of NCBI NO: 18423010 NR Description: expressed protein
  misc_feature (1)..(164): Homolog of NCBI NO: 15234820 NR Description: extensin like protein; protein id: At4g16140.1
METFRTFHLFLFFFFFTFTTTLTSPSQIADCTMCTSCDNPCQPNPSPPPPPSNPSPPPPSPTTTACPPPPSSSGGGPYYYYPPASQSGSYRPPPSSSSGGYYYPPPKSGGNYPYTPPPNPIVPYFPFYYYNPPPQSVMSGSDAKIRFSYGVSFILIFSLYFGCF

SEQ ID NO: 43350 - protein, 132 aa, Arabidopsis thaliana
  peptide (1)..(132): Ceres Seq. ID no. 12336563
  misc_feature (6)..(102): Pfam Name: Protein of unknown function, DUF605 Pfam Description: Protein of unknown function, DUF605
  misc_feature (7)..(104): Homolog of NCBI NO: 7488674 NR Description: extensin homolog HRGP2 - soybean (fragment)
  misc_feature (7)..(104): Homolog of NCBI NO: 791150 NR Description: extensin-like protein [Vigna unguiculata]
  misc_feature (7)..(104): Homolog of NCBI NO: 7488998 NR Description: extensin class I (clone uG-18) - tomato
  misc_feature (7)..(102): Homolog of NCBI NO: 3204132 NR Description: extensin [Cicer arietinum]
  misc_feature (7)..(104): Homolog of NCBI NO: 81869 NR Description: hydroxyproline-rich glycoprotein (clone Hyp2.13)
  misc_feature (1)..(101): Homolog of NCBI NO: 34894212 NR Description: P0439B06.27 [Oryza sativa (japonica
  misc_feature (1)..(109): Homolog of NCBI NO: 34894480 NR Description: OJ1116_C07.3 [Oryza sativa (japonica
  misc_feature (1)..(128): Homolog of NCBI NO: 18397707 NR Description: expressed protein
  misc_feature (1)..(128): Homolog of NCBI NO: 18423010 NR Description: expressed protein
  misc_feature (1)..(132): Homolog of NCBI NO: 15234820 NR Description: extensin like protein; protein id: At4g16140.1
MCTSCDNPCQPNPSPPPPPSNPSPPPPSPTTTACPPPPSSSGGGPYYYYPPASQSGSYRPPPSSSSGGYYYPPPKSGGNYPYTPPPNPIVPYFPFYYYNPPPQSVMSGSDAKIRFSYGVSFILIFSLYFGCF

SEQ ID NO: 43351 - DNA, 1566 bp, Arabidopsis thaliana
  misc_feature (1)..(1566): Ceres Seq. ID no. 13576649
  misc_feature: MA Experiment ID: 20000185 Result: Down-regulated in Transcription
  misc_feature: MA Experiment 20000185 PARAMETER Experiment Name: At_Roots__P Parameter: Age (day) Value: 7 vs. 21
  misc_feature: MA Experiment 20000185 PARAMETER Experiment Name: At_Roots__P Parameter: Organism Value: A. thaliana
  misc_feature: MA Experiment 20000185 PARAMETER Experiment Name: At_Roots__P Parameter: Tissue Value: Roots vs. Whole Plant
  misc_feature: MA Experiment ID: 20000234 Result: Up-regulated in Transcription
  misc_feature: MA Experiment 20000234 PARAMETER Experiment Name: At_Siliques_P Parameter: Age (day) Value: 21
  misc_feature: MA Experiment 20000234 PARAMETER Experiment Name: At_Siliques_P Parameter: Organism Value: A. thaliana
  misc_feature: MA Experiment 20000234 PARAMETER Experiment Name: At_Siliques_P Parameter: Plant Line Value: WS
  misc_feature: MA Experiment 20000234 PARAMETER Experiment Name: At_Siliques_P Parameter: Tissue Value: Less Than 5mm Siliques vs. Whole Plant
  misc_feature: MA Experiment ID: 20001451 Result: Up-regulated in Transcription
  misc_feature: MA Experiment 20001451 PARAMETER Experiment Name: At_Far-red-induction_P Parameter: Age (day) Value: 7
  misc_feature: MA Experiment 20001451 PARAMETER Experiment Name: At_Far-red-induction_P Parameter: Light Value: Far-red vs. White
  misc_feature: MA Experiment 20001451 PARAMETER Experiment Name: At_Far-red-induction_P Parameter: Organism Value: A. thaliana
  misc_feature: MA Experiment 20001451 PARAMETER Experiment Name: At_Far-red-induction_P Parameter: Plant Line Value: Columbia
  misc_feature: MA Experiment 20001451 PARAMETER Experiment Name: At_Far-red-induction_P Parameter: Timepoint (hr) Value: 24
  misc_feature: MA Experiment 20001451 PARAMETER Experiment Name: At_Far-red-induction_P Parameter: Tissue Value: Whole Plant
acaacagttagatattttcaattaatgacatcttcttcttctcctttcactgcaaaaccgaaagcttgagactttgagattatgtctatgtcatcttcttcttcttccatcgatcacttcatcacctttcgtcatcttgatcttattctccactgtataaaatcagcgagattttaagggattgtgaaggtaccatcttaaacacaaaatgggtacttctactacagagagtgtggtggcgtgtgaattttgcggcgagagaacggcggttctgttttgtagagccgatacggcgaagctttgtttgccttgtgaccagcacgtgcactcggcgaaccttctctcgaggaagcatgttcgttctcagatctgtgataactgtagcaaagagccggtgtccgtacgttgcttcacagataatctcgtattgtgtcaggagtgtgattgggatgttcacggaagctgttcctcctccgcgacgcatgaacgctccgccgtggaagggttttcaggttgtccttcggttttggagcttgctgctgtgtggggaatcgatttaaagggtaagaagaaagaagatgacgaagacgaattgactaagaattttgggatggggttggattcgtggggttctggatctaacatcgttcaagaactgattgttccttatgatgtgtcttgcaaaaagcaaagctttagctttgggaggtctaagcaggtagtgtttgaacagcttgagttactgaagagaggcttcgttgaaggcgaaggagagattatggttccggagggaatcaatggcggaggaagcatttctcagccatctccgacgacgtcgtttacttctttgcttatgtctcaaagtctttgtggtaatggtatgcaatggaatgctactaatcatagcactggccagaacactcagatatgggattttaacttgggacagtcgaggaaccctgatgaacctagtccagtcgaaactaaaggctctactttcacattcaacaacgttactcatctcaagaacgatacccgaaccaccaatatgaatgctttcaaagagagttaccagcaggaggattccgtccactcaacttctaccaagggacaggaaacatctaagagcaacaatattcctgctgccattcactcgcataaaagttctaacgactcctgtggcttgcattgcacggaacatattgctattactagtaatagagccacaagattggtggcggtaacgaatgctgatctagagcagatggcacagaacagagataatgctatgcagcggtacaaggaaaagaagaaaacgcggagatatgataagaccataagatatgaaacgaggaaggcgagagccgagaccaggttgcgtgttaagggcagatttgtgaaagctacagatccttagatgtctctccacgttaggttttacatttgagatcctaagttaggaactttttttgttttttctactttcaactaccttgtaaatgtaaatgatcgatcttcagctgcataatgtgtggccagatttttgtaatttttacgtttaacctt

SEQ ID NO: 43352 - protein, 402 aa, Arabidopsis thaliana
  peptide (1)..(402): Ceres Seq. ID no. 13576650
  misc_feature (7)..(54): Pfam Name: B-box zinc finger Pfam Description: B-box zinc finger
  misc_feature (356)..(399): Homolog of NCBI NO: 7489605 NR Description: zinc-finger protein S3574 [imported] - rice
  misc_feature (12)..(117): Homolog of NCBI NO: 7489605 NR Description: zinc-finger protein S3574 [imported] - rice
  misc_feature (189)..(258): Homolog of NCBI NO: 38175538 NR Description: zinc-finger protein C60910-like
  misc_feature (274)..(399): Homolog of NCBI NO: 38175538 NR Description: zinc-finger protein C60910-like
  misc_feature (12)..(155): Homolog of NCBI NO: 38175538 NR Description: zinc-finger protein C60910-like
  misc_feature (216)..(402): Homolog of NCBI NO: 22135884 NR Description: putative CONSTANS-like B-box zinc finger protein
  misc_feature (222)..(401): Homolog of NCBI NO: 15217814 NR Description: CONSTANS B-box zinc finger family protein
  misc_feature (4)..(189): Homolog of NCBI NO: 15217814 NR Description: CONSTANS B-box zinc finger family protein
  misc_feature (1)..(372): Homolog of NCBI NO: 17432968 NR Description: Zinc finger protein constans-like 9
  misc_feature (1)..(402): Homolog of NCBI NO: 30685731 NR Description: CONSTANS B-box zinc finger family protein
MGTSTTESVVACEFCGERTAVLFCRADTAKLCLPCDQHVHSANLLSRKHVRSQICDNCSKEPVSVRCFTDNLVLCQECDWDVHGSCSSSATHERSAVEGFSGCPSVLELAAVWGIDLKGKKKEDDEDELTKNFGMGLDSWGSGSNIVQELIVPYDVSCKKQSFSFGRSKQVVFEQLELLKRGFVEGEGEIMVPEGINGGGSISQPSPTTSFTSLLMSQSLCGNGMQWNATNHSTGQNTQIWDFNLGQSRNPDEPSPVETKGSTFTFNNVTHLKNDTRTTNMNAFKESYQQEDSVHSTSTKGQETSKSNNIPAAIHSHKSSNDSCGLHCTEHIAITSNRATRLVAVTNADLEQMAQNRDNAMQRYKEKKKTRRYDKTIRYETRKARAETRLRVKGRFVKATDP

SEQ ID NO: 43353 - protein, 268 aa, Arabidopsis thaliana
  peptide (1)..(268): Ceres Seq. ID no. 13576651
  misc_feature (228)..(267): Pfam Name: CCT motif Pfam Description: CCT motif
  misc_feature (223)..(268): Homolog of NCBI NO: 15227152 NR Description: CONSTANS B-box zinc finger family protein
  misc_feature (222)..(265): Homolog of NCBI NO: 7489605 NR Description: zinc-finger protein S3574 [imported] - rice
  misc_feature (55)..(124): Homolog of NCBI NO: 38175538 NR Description: zinc-finger protein C60910-like
  misc_feature (140)..(265): Homolog of NCBI NO: 38175538 NR Description: zinc-finger protein C60910-like
  misc_feature (1)..(21): Homolog of NCBI NO: 38175538 NR Description: zinc-finger protein C60910-like
  misc_feature (82)..(268): Homolog of NCBI NO: 22135884 NR Description: putative CONSTANS-like B-box zinc finger protein
  misc_feature (88)..(267): Homolog of NCBI NO: 15217814 NR Description: CONSTANS B-box zinc finger family protein
  misc_feature (1)..(55): Homolog of NCBI NO: 15217814 NR Description: CONSTANS B-box zinc finger family protein
  misc_feature (1)..(238): Homolog of NCBI NO: 17432968 NR Description: Zinc finger protein constans-like 9
  misc_feature (1)..(268): Homolog of NCBI NO: 30685731 NR Description: CONSTANS B-box zinc finger family protein
MGLDSWGSGSNIVQELIVPYDVSCKKQSFSFGRSKQVVFEQLELLKRGFVEGEGEIMVPEGINGGGSISQPSPTTSFTSLLMSQSLCGNGMQWNATNHSTGQNTQIWDFNLGQSRNPDEPSPVETKGSTFTFNNVTHLKNDTRTTNMNAFKESYQQEDSVHSTSTKGQETSKSNNIPAAIHSHKSSNDSCGLHCTEHIAITSNRATRLVAVTNADLEQMAQNRDNAMQRYKEKKKTRRYDKTIRYETRKARAETRLRVKGRFVKATDP

SEQ ID NO: 43354 - protein, 212 aa, Arabidopsis thaliana
  peptide (1)..(212): Ceres Seq. ID no. 13576652
  misc_feature (172)..(211): Pfam Name: CCT motif Pfam Description: CCT motif
  misc_feature (167)..(209): Homolog of NCBI NO: 15231491 NR Description: CONSTANS B-box zinc finger family protein
  misc_feature (164)..(209): Homolog of NCBI NO: 15238918 NR Description: CONSTANS B-box zinc finger family protein
  misc_feature (167)..(212): Homolog of NCBI NO: 15227152 NR Description: CONSTANS B-box zinc finger family protein
  misc_feature (166)..(209): Homolog of NCBI NO: 7489605 NR Description: zinc-finger protein S3574 [imported] - rice
  misc_feature (1)..(68): Homolog of NCBI NO: 38175538 NR Description: zinc-finger protein C60910-like
  misc_feature (84)..(209): Homolog of NCBI NO: 38175538 NR Description: zinc-finger protein C60910-like
  misc_feature (26)..(212): Homolog of NCBI NO: 22135884 NR Description: putative CONSTANS-like B-box zinc finger protein
  misc_feature (32)..(211): Homolog of NCBI NO: 15217814 NR Description: CONSTANS B-box zinc finger family protein
  misc_feature (1)..(182): Homolog of NCBI NO: 17432968 NR Description: Zinc finger protein constans-like 9
  misc_feature (1)..(212): Homolog of NCBI NO: 30685731 NR Description: CONSTANS B-box zinc finger family protein
MVPEGINGGGSISQPSPTTSFTSLLMSQSLCGNGMQWNATNHSTGQNTQIWDFNLGQSRNPDEPSPVETKGSTFTFNNVTHLKNDTRTTNMNAFKESYQQEDSVHSTSTKGQETSKSNNIPAAIHSHKSSNDSCGLHCTEHIAITSNRATRLVAVTNADLEQMAQNRDNAMQRYKEKKKTRRYDKTIRYETRKARAETRLRVKGRFVKATDP

SEQ ID NO: 43355 - DNA, 1294 bp, Arabidopsis thaliana
  misc_feature (1)..(1294): Ceres Seq. ID no. 13491599
  misc_feature: MA Experiment ID: 20000113 Result: Up-regulated in Transcription
  misc_feature: MA Experiment 20000113 PARAMETER Experiment Name: At_42deg_Heat_cDNA_P Parameter: Temperature (deg C) Value: 42 vs. 22
  misc_feature: MA Experiment 20000113 PARAMETER Experiment Name: At_42deg_Heat_cDNA_P Parameter: Timepoint (hr) Value: 8
  misc_feature: MA Experiment 20000113 PARAMETER Experiment Name: At_42deg_Heat_cDNA_P Parameter: Tissue Value: Aerial
  misc_feature: MA Experiment ID: 20000437 Result: Up-regulated in Transcription
  misc_feature: MA Experiment 20000437 PARAMETER Experiment Name: At_Drought_P Parameter: Age (day) Value: 8
  misc_feature: MA Experiment 20000437 PARAMETER Experiment Name: At_Drought_P Parameter: Organism Value: A. thaliana
  misc_feature: MA Experiment 20000437 PARAMETER Experiment Name: At_Drought_P Parameter: Plant Line Value: WS
  misc_feature: MA Experiment 20000437 PARAMETER Experiment Name: At_Drought_P Parameter: Timepoint (hr) Value: 24
  misc_feature: MA Experiment 20000437 PARAMETER Experiment Name: At_Drought_P Parameter: Tissue Value: Whole Plant
  misc_feature: MA Experiment 20000437 PARAMETER Experiment Name: At_Drought_P Parameter: Treatment Value: Drought vs. No Drought
  misc_feature: MA Experiment ID: 20001905 Result: Up-regulated in Transcription
  misc_feature: MA Experiment 20001905 PARAMETER Experiment Name: At_Drought_Reproduction_P Parameter: Age (day) Value: 40
  misc_feature: MA Experiment 20001905 PARAMETER Experiment Name: At_Drought_Reproduction_P Parameter: Organism Value: A. thaliana
  misc_feature: MA Experiment 20001905 PARAMETER Experiment Name: At_Drought_Reproduction_P Parameter: Plant Line Value: WS
  misc_feature: MA Experiment 20001905 PARAMETER Experiment Name: At_Drought_Reproduction_P Parameter: Timepoint (day) Value: 10
  misc_feature: MA Experiment 20001905 PARAMETER Experiment Name: At_Drought_Reproduction_P Parameter: Tissue Value: Rosettes
  misc_feature: MA Experiment 20001905 PARAMETER Experiment Name: At_Drought_Reproduction_P Parameter: Treatment Value: Drought vs. No Drought
cctttcccaattgcttccacgacgacggaggaggagaagcaaacccagaaaccttaaaaattcagaaaaagggacgaccttttttccgatcttatcgatttttgaatgagattagaagaacctatcttctaagtttttctttgatatctttttctctttgatcgatggatgagtcgttcgctaatctacaatcaagccatttgcttggttcagttccggctgtgatcagcgacgacaagagaagcacaaatgtaccaatagcaagcgtcaatgaaggcccttctgcaagcatgcaaatatttccaccgaatctaggaaacaatacaaagggttatcaaactcttgagagcccaacagaaggaccagcacaacagccatcaaacaactggaagggcttttttaatgtctactcatatacccaatacttcgacgtggacacggacgttgttttgaacagattaatgagctctttatatcctactagtggagattttttcaacaagattgatgcaaaccctgatttgtatggacttgtctggatctgcactacgcttgtgtttgtgcttgcttctctcggaaattgtgctacatatctcgtgaagaaacgaaccgacagtaatgctccttggatctttgatgtgaactatatgaatttggcagcatctataatatatggatatgcaataattgtgcctctgggattttattttgcactccgttatatggggtccaaagctgatcttctaagattctggtgcctttggggatactctctcttcattttcgttccaacctctcttccattgcttattccagtagagtttctgagatgggtgattatactcttagctggtagtgcatcatcgtgttttgttgccctgaatctacggtcttacctcgagacgaacaatgatatcacggttgtaatggctgcagcatttggtctgcaaatggttctttcaatcttcatcaaggtctggttctttccttaatctccatgagacggtcaacaccagacaaaacatatatatgtaaaaacctttagattttgatgtgctgcggtagaactaagaatgtcgttaccagaaaatgaaacccacaaagtagaagaaggaacatatccgctaaatcattcggtttcgtttttactggcggattttcatcgttgcttgtaacgattgtgttttttcattttttggttttgtttgctaccacttattttgcttatggagtaaaaatatataaaagaaaaaaaggaagttttcaagatttattgcaatttactctcttttgc

SEQ ID NO: 43356 - protein, 275 aa, Arabidopsis thaliana
  peptide (1)..(275): Ceres Seq. ID no. 13491600
  misc_feature (88)..(253): Pfam Name: Yip1 domain Pfam Description: Yip1 domain
  misc_feature (69)..(274): Homolog of NCBI NO: 13128976 NR Description: hypothetical protein MGC3262 [Homo sapiens]
  misc_feature (27)..(274): Homolog of NCBI NO: 21704084 NR Description: RIKEN cDNA C030002N13 [Mus musculus]
  misc_feature (27)..(274): Homolog of NCBI NO: 40786465 NR Description: similar to RIKEN cDNA C030002N13 [Rattus
  misc_feature (78)..(274): Homolog of NCBI NO: 10092643 NR Description: hypothetical protein DJ167A19.1 [Homo sapiens]
  misc_feature (75)..(274): Homolog of NCBI NO: 34912560 NR Description: P0410E03.18 [Oryza sativa (japonica
  misc_feature (4)..(274): Homolog of NCBI NO: 30679454 NR Description: expressed protein [Arabidopsis thaliana]
  misc_feature (4)..(274): Homolog of NCBI NO: 6729038 NR Description: unknown protein [Arabidopsis thaliana]
  misc_feature (4)..(274): Homolog of NCBI NO: 38564308 NR Description: At5g27490 [Arabidopsis thaliana]
  misc_feature (4)..(274): Homolog of NCBI NO: 30690667 NR Description: expressed protein [Arabidopsis thaliana]
  misc_feature (1)..(275): Homolog of NCBI NO: 30688039 NR Description: expressed protein [Arabidopsis thaliana]
MDESFANLQSSHLLGSVPAVISDDKRSTNVPIASVNEGPSASMQIFPPNLGNNTKGYQTLESPTEGPAQQPSNNWKGFFNVYSYTQYFDVDTDVVLNRLMSSLYPTSGDFFNKIDANPDLYGLVWICTTLVFVLASLGNCATYLVKKRTDSNAPWIFDVNYMNLAASIIYGYAIIVPLGFYFALRYMGSKADLLRFWCLWGYSLFIFVPTSLPLLIPVEFLRWVIILLAGSASSCFVALNLRSYLETNNDITVVMAAAFGLQMVLSIFIKVWFFP

SEQ ID NO: 43357 - protein, 233 aa, Arabidopsis thaliana
  peptide (1)..(233): Ceres Seq. ID no. 13491601
  misc_feature (46)..(211): Pfam Name: Yip1 domain Pfam Description: Yip1 domain
  misc_feature (27)..(232): Homolog of NCBI NO: 13128976 NR Description: hypothetical protein MGC3262 [Homo sapiens]
  misc_feature (1)..(232): Homolog of NCBI NO: 21704084 NR Description: RIKEN cDNA C030002N13 [Mus musculus]
  misc_feature (1)..(232): Homolog of NCBI NO: 40786465 NR Description: similar to RIKEN cDNA C030002N13 [Rattus
  misc_feature (36)..(232): Homolog of NCBI NO: 10092643 NR Description: hypothetical protein DJ167A19.1 [Homo sapiens]
  misc_feature (33)..(232): Homolog of NCBI NO: 34912560 NR Description: P0410E03.18 [Oryza sativa (japonica
  misc_feature (1)..(232): Homolog of NCBI NO: 30679454 NR Description: expressed protein [Arabidopsis thaliana]
  misc_feature (1)..(232): Homolog of NCBI NO: 6729038 NR Description: unknown protein [Arabidopsis thaliana]
  misc_feature (1)..(232): Homolog of NCBI NO: 38564308 NR Description: At5g27490 [Arabidopsis thaliana]
  misc_feature (1)..(232): Homolog of NCBI NO: 30690667 NR Description: expressed protein [Arabidopsis thaliana]
  misc_feature (1)..(233): Homolog of NCBI NO: 30688039 NR Description: expressed protein [Arabidopsis thaliana]
MQIFPPNLGNNTKGYQTLESPTEGPAQQPSNNWKGFFNVYSYTQYFDVDTDVVLNRLMSSLYPTSGDFFNKIDANPDLYGLVWICTTLVFVLASLGNCATYLVKKRTDSNAPWIFDVNYMNLAASIIYGYAIIVPLGFYFALRYMGSKADLLRFWCLWGYSLFIFVPTSLPLLIPVEFLRWVIILLAGSASSCFVALNLRSYLETNNDITVVMAAAFGLQMVLSIFIKVWFFP

SEQ ID NO: 43358 - protein, 176 aa, Arabidopsis thaliana
  peptide (1)..(176): Ceres Seq. ID no. 13491602
  misc_feature (1)..(154): Pfam Name: Yip1 domain Pfam Description: Yip1 domain
  misc_feature (1)..(175): Homolog of NCBI NO: 13128976 NR Description: hypothetical protein MGC3262 [Homo sapiens]
  misc_feature (1)..(175): Homolog of NCBI NO: 21704084 NR Description: RIKEN cDNA C030002N13 [Mus musculus]
  misc_feature (1)..(175): Homolog of NCBI NO: 40786465 NR Description: similar to RIKEN cDNA C030002N13 [Rattus
  misc_feature (1)..(175): Homolog of NCBI NO: 10092643 NR Description: hypothetical protein DJ167A19.1 [Homo sapiens]
  misc_feature (1)..(175): Homolog of NCBI NO: 34912560 NR Description: P0410E03.18 [Oryza sativa (japonica
  misc_feature (1)..(175): Homolog of NCBI NO: 30679454 NR Description: expressed protein [Arabidopsis thaliana]
  misc_feature (1)..(175): Homolog of NCBI NO: 6729038 NR Description: unknown protein [Arabidopsis thaliana]
  misc_feature (1)..(175): Homolog of NCBI NO: 38564308 NR Description: At5g27490 [Arabidopsis thaliana]
  misc_feature (1)..(175): Homolog of NCBI NO: 30690667 NR Description: expressed protein [Arabidopsis thaliana]
  misc_feature (1)..(176): Homolog of NCBI NO: 30688039 NR Description: expressed protein [Arabidopsis thaliana]
MSSLYPTSGDFFNKIDANPDLYGLVWICTTLVFVLASLGNCATYLVKKRTDSNAPWIFDVNYMNLAASIIYGYAIIVPLGFYFALRYMGSKADLLRFWCLWGYSLFIFVPTSLPLLIPVEFLRWVIILLAGSASSCFVALNLRSYLETNNDITVVMAAAFGLQMVLSIFIKVWFFP

SEQ ID NO: 43359 - DNA, 1679 bp, Arabidopsis thaliana
  misc_feature (1)..(1679): Ceres Seq. ID no. 12394522
  misc_feature: MA Experiment ID: 108573 Result: Up-regulated in Transcription
  misc_feature: MA Experiment 108573 PARAMETER Experiment Name: At_Drought_cDNA_P Parameter: Timepoint (hr) Value: 6
  misc_feature: MA Experiment 108573 PARAMETER Experiment Name: At_Drought_cDNA_P Parameter: Tissue Value: Aerial
  misc_feature: MA Experiment 108573 PARAMETER Experiment Name: At_Drought_cDNA_P Parameter: Treatment Value: Drought vs. No Drought
  misc_feature: MA Experiment ID: 108576 Result: Down-regulated in Transcription
  misc_feature: MA Experiment 108576 PARAMETER Experiment Name: At_42deg_Heat_cDNA_P Parameter: Temperature (deg C) Value: 42 vs. 22
  misc_feature: MA Experiment 108576 PARAMETER Experiment Name: At_42deg_Heat_cDNA_P Parameter: Timepoint (hr) Value: 1
  misc_feature: MA Experiment 108576 PARAMETER Experiment Name: At_42deg_Heat_cDNA_P Parameter: Tissue Value: Aerial
gctcaaaagaaattgtgatacgcgaaagaaagaaaaaaattactttcaactaaaagaagcacacagcacaaaagaggtagtctcgttgtgatgtcagtataaagccagttgacgcaattccatctcccgatcgaacctgtacaaaccatggcaacaacgagctccgaccggttaatcgccggtttaacggcgtcgatcggctcaatcgaatctcgttacgcaaatccagctcaatccgtttctctaatctgtcgaaatcaaatcaatggcgcaccgcctatcgtcttgcggtcctctcgaaggtccaggctgtggttaatcgaggcgattcctccggcaaagtcctggaacggatctaacgatggcgacgaagatatcaagaagtcagacactcgtaattacgcgatcggtggaaccggtggtcacgcggtcgccggaaaagatgacagaacgatggagatagtaatagcagcggcgaccacggcggcgctgggtgtcgggaatcgcgtactgtataagctggctcttattcctctcaagcaatatcccttcttcctccgcaactctccacattcgggtatgtagctgtatacttttcgattttgtatttcagataccgagctggaattgttacaaaagagatgctatcagttccaaaacttccatttttaattgttggcgtcttggagtctcttgctctagctgctgggatggcggccgcatcaaatctttctggaccatctactacagttttatctcagacatttcttgtctggcaaattcttttctccattatatttctcgggaggagatatagaataaatcaaatattgggatgtactcttgtagcatttggtgtaatcgtcagtgtagcaagtgggtcgggtgccgctcattcatttaaagatacaggaatactttggagtcttcttatggtgttttcttttctgcttcaaggagcagatacagtaatgaaggaagtcatctttctagatagcaaaaagcgattgaagggtgcttcacttgatttgtttgttgtaaactcatatggttcaattttccaagtcatatgcattgcgttgcttcttccttttctttcaaagctttggggcataccgtttaaccaactaccgagctatatcagagacgggggtgcttgctttctaaatattggttctagaataacaggatgcgaaggggctccccttcttcctgtaatgtttgtcatgatgaacatggcttataacatctctcttctacgcctcatcaagatttcatctgcagttgtgtcgtctctggcatccaccgtttcagtgcccatagcggtgtactgtttcacgcttcccctaccataccttggggtggcatctacactaccaagggggtttgttgcaggcacaatcatccttgtagtcggcatgcttctatatgcttggacaccatctactaacacttccgattcaattatcccctcaccccnatccacatagcggcaggaaaattggtttttgtaacattatttggtttccttctctcttctcatcttagcatatgctcttttcttgtcaaataagaaatttttttatgcattctttacaaaagaatggttagttttcagttttgcttttcaaaaactatgcagaggataatgtactttgtaatgatgtatatcaattatc

SEQ ID NO: 43360 - protein, 282 aa, Arabidopsis thaliana
  peptide (1)..(282): Ceres Seq. ID no. 12394523
  misc_feature (1)..(40): Homolog of NCBI NO: 20161872 NR Description: B1139B11.13 [Oryza sativa (japonica
  misc_feature (1)..(78): Homolog of NCBI NO: 28973717 NR Description: unknown protein [Arabidopsis thaliana]
  misc_feature (1)..(27): Homolog of NCBI NO: 7487326 NR Description: hypothetical protein T22A6.290 - Arabidopsis
  misc_feature (55)..(226): Homolog of NCBI NO: 7487326 NR Description: hypothetical protein T22A6.290 - Arabidopsis
  misc_feature (1)..(271): Homolog of NCBI NO: 30686536 NR Description: expressed protein [Arabidopsis thaliana]
  misc_feature (1)..(282): Homolog of NCBI NO: 15239887 NR Description: putative protein; protein id: At5g12170.1
  misc_feature (1)..(282): Homolog of NCBI NO: 21536591 NR Description: unknown [Arabidopsis thaliana]
  misc_feature (1)..(282): Homolog of NCBI NO: 20260240 NR Description: unknown protein [Arabidopsis thaliana]
  misc_feature (1)..(282): Homolog of NCBI NO: 21553716 NR Description: unknown [Arabidopsis thaliana]
  misc_feature (1)..(282): Homolog of NCBI NO: 18419900 NR Description: putative protein
  misc_feature (280)..(280): Xaa is any aa, unknown or other
MLSVPKLPFLIVGVLESLALAAGMAAASNLSGPSTTVLSQTFLVWQILFSIIFLGRRYRINQILGCTLVAFGVIVSVASGSGAAHSFKDTGILWSLLMVFSFLLQGADTVMKEVIFLDSKKRLKGASLDLFVVNSYGSIFQVICIALLLPFLSKLWGIPFNQLPSYIRDGGACFLNIGSRITGCEGAPLLPVMFVMMNMAYNISLLRLIKISSAVVSSLASTVSVPIAVYCFTLPLPYLGVASTLPRGFVAGTIILVVGMLLYAWTPSTNTSDSIIPSPXST

SEQ ID NO: 43361 - protein, 259 aa, Arabidopsis thaliana
  peptide (1)..(259): Ceres Seq. ID no. 12394524
  misc_feature (64)..(120): Homolog of NCBI NO: 20161872 NR Description: B1139B11.13 [Oryza sativa (japonica
  misc_feature (1)..(17): Homolog of NCBI NO: 20161872 NR Description: B1139B11.13 [Oryza sativa (japonica
  misc_feature (1)..(55): Homolog of NCBI NO: 28973717 NR Description: unknown protein [Arabidopsis thaliana]
  misc_feature (32)..(203): Homolog of NCBI NO: 7487326 NR Description: hypothetical protein T22A6.290 - Arabidopsis
  misc_feature (1)..(248): Homolog of NCBI NO: 30686536 NR Description: expressed protein [Arabidopsis thaliana]
  misc_feature (1)..(259): Homolog of NCBI NO: 15239887 NR Description: putative protein; protein id: At5g12170.1
  misc_feature (1)..(259): Homolog of NCBI NO: 21536591 NR Description: unknown [Arabidopsis thaliana]
  misc_feature (1)..(259): Homolog of NCBI NO: 20260240 NR Description: unknown protein [Arabidopsis thaliana]
  misc_feature (1)..(259): Homolog of NCBI NO: 21553716 NR Description: unknown [Arabidopsis thaliana]
  misc_feature (1)..(259): Homolog of NCBI NO: 18419900 NR Description: putative protein
  misc_feature (257)..(257): Xaa is any aa, unknown or other
MAAASNLSGPSTTVLSQTFLVWQILFSIIFLGRRYRINQILGCTLVAFGVIVSVASGSGAAHSFKDTGILWSLLMVFSFLLQGADTVMKEVIFLDSKKRLKGASLDLFVVNSYGSIFQVICIALLLPFLSKLWGIPFNQLPSYIRDGGACFLNIGSRITGCEGAPLLPVMFVMMNMAYNISLLRLIKISSAVVSSLASTVSVPIAVYCFTLPLPYLGVASTLPRGFVAGTIILVVGMLLYAWTPSTNTSDSIIPSPXST

SEQ ID NO: 43362 - protein, 185 aa, Arabidopsis thaliana
  peptide (1)..(185): Ceres Seq. ID no. 12394525
  misc_feature (1)..(84): Homolog of NCBI NO: 11139714 NR Description: putative transporter protein SSA662
  misc_feature (1)..(46): Homolog of NCBI NO: 20161872 NR Description: B1139B11.13 [Oryza sativa (japonica
  misc_feature (1)..(129): Homolog of NCBI NO: 7487326 NR Description: hypothetical protein T22A6.290 - Arabidopsis
  misc_feature (1)..(174): Homolog of NCBI NO: 30686536 NR Description: expressed protein [Arabidopsis thaliana]
  misc_feature (1)..(185): Homolog of NCBI NO: 15239887 NR Description: putative protein; protein id: At5g12170.1
  misc_feature (1)..(185): Homolog of NCBI NO: 21536591 NR Description: unknown [Arabidopsis thaliana]
  misc_feature (1)..(185): Homolog of NCBI NO: 20260240 NR Description: unknown protein [Arabidopsis thaliana]
  misc_feature (1)..(185): Homolog of NCBI NO: 21553716 NR Description: unknown [Arabidopsis thaliana]
  misc_feature (1)..(185): Homolog of NCBI NO: 18419900 NR Description: putative protein
  misc_feature (183)..(183): Xaa is any aa, unknown or other
MVFSFLLQGADTVMKEVIFLDSKKRLKGASLDLFVVNSYGSIFQVICIALLLPFLSKLWGIPFNQLPSYIRDGGACFLNIGSRITGCEGAPLLPVMFVMMNMAYNISLLRLIKISSAVVSSLASTVSVPIAVYCFTLPLPYLGVASTLPRGFVAGTIILVVGMLLYAWTPSTNTSDSIIPSPXST

SEQ ID NO: 43363 - DNA, 1360 bp, Arabidopsis thaliana
  misc_feature (1)..(1360): Ceres Seq. ID no. 12336182
  misc_feature: MA Experiment ID: 108433 Result: Down-regulated in Transcription
  misc_feature: MA Experiment 108433 PARAMETER Experiment Name: At_rhl_Mutant2_cDNA_P Parameter: Age (day) Value: 7
  misc_feature: MA Experiment 108433 PARAMETER Experiment Name: At_rhl_Mutant2_cDNA_P Parameter: Organism Value: A. thaliana
  misc_feature: MA Experiment 108433 PARAMETER Experiment Name: At_rhl_Mutant2_cDNA_P Parameter: Plant Line Value: rhl Mutant vs. wt landsburg
  misc_feature: MA Experiment 108433 PARAMETER Experiment Name: At_rhl_Mutant2_cDNA_P Parameter: Tissue Value: Roots
  misc_feature: MA Experiment ID: 108461 Result: Down-regulated in Transcription
  misc_feature: MA Experiment 108461 PARAMETER Experiment Name: At_Germinating_Seeds_cDNA_P Parameter: Age (day) Value: 1 vs. 0
  misc_feature: MA Experiment 108461 PARAMETER Experiment Name: At_Germinating_Seeds_cDNA_P Parameter: Tissue Value: Germinating Seeds
  misc_feature: MA Experiment ID: 108462 Result: Down-regulated in Transcription
  misc_feature: MA Experiment 108462 PARAMETER Experiment Name: At_Germinating_Seeds_cDNA_P Parameter: Age (day) Value: 2 vs. 0
  misc_feature: MA Experiment 108462 PARAMETER Experiment Name: At_Germinating_Seeds_cDNA_P Parameter: Tissue Value: Germinating Seeds
  misc_feature: MA Experiment ID: 108463 Result: Down-regulated in Transcription
  misc_feature: MA Experiment 108463 PARAMETER Experiment Name: At_Germinating_Seeds_cDNA_P Parameter: Age (day) Value: 3 vs. 0
  misc_feature: MA Experiment 108463 PARAMETER Experiment Name: At_Germinating_Seeds_cDNA_P Parameter: Tissue Value: Germinating Seeds
  misc_feature: MA Experiment ID: 108464 Result: Down-regulated in Transcription
  misc_feature: MA Experiment 108464 PARAMETER Experiment Name: At_Germinating_Seeds_cDNA_P Parameter: Age (day) Value: 4 vs. 0
  misc_feature: MA Experiment 108464 PARAMETER Experiment Name: At_Germinating_Seeds_cDNA_P Parameter: Tissue Value: Germinating Seeds
  misc_feature: MA Experiment ID: 108489 Result: Up-regulated in Transcription
  misc_feature: MA Experiment ID: 20000180 Result: Down-regulated in Transcription
  misc_feature: MA Experiment 20000180 PARAMETER Experiment Name: At_Germinating_Seeds_P Parameter: Age (hr) Value: 24 vs. 0
  misc_feature: MA Experiment 20000180 PARAMETER Experiment Name: At_Germinating_Seeds_P Parameter: Tissue Value: Germinating Seeds
  misc_feature: MA Experiment ID: 20001248 Result: Up-regulated in Transcription
  misc_feature: MA Experiment 20001248 PARAMETER Experiment Name: At_Far-red-induction_P Parameter: Age (day) Value: 7
  misc_feature: MA Experiment 20001248 PARAMETER Experiment Name: At_Far-red-induction_P Parameter: Light Value: Far-red vs. White
  misc_feature: MA Experiment 20001248 PARAMETER Experiment Name: At_Far-red-induction_P Parameter: Organism Value: A. thaliana
  misc_feature: MA Experiment 20001248 PARAMETER Experiment Name: At_Far-red-induction_P Parameter: Plant Line Value: Columbia
  misc_feature: MA Experiment 20001248 PARAMETER Experiment Name: At_Far-red-induction_P Parameter: Timepoint (hr) Value: 4
  misc_feature: MA Experiment 20001248 PARAMETER Experiment Name: At_Far-red-induction_P Parameter: Tissue Value: Whole Plant
  misc_feature: MA Experiment ID: 20001557 Result: Up-regulated in Transcription
  misc_feature: MA Experiment 20001557 PARAMETER Experiment Name: At_Drought_Soil_Dry_P Parameter: Age (day) Value: 27
  misc_feature: MA Experiment 20001557 PARAMETER Experiment Name: At_Drought_Soil_Dry_P Parameter: Organism Value: A. thaliana
  misc_feature: MA Experiment 20001557 PARAMETER Experiment Name: At_Drought_Soil_Dry_P Parameter: Plant Line Value: WS
  misc_feature: MA Experiment 20001557 PARAMETER Experiment Name: At_Drought_Soil_Dry_P Parameter: Post Timepoint (hr) Value: 3
  misc_feature: MA Experiment 20001557 PARAMETER Experiment Name: At_Drought_Soil_Dry_P Parameter: Post-Treatment Value: Re-Water vs. No Drought
  misc_feature: MA Experiment 20001557 PARAMETER Experiment Name: At_Drought_Soil_Dry_P Parameter: Timepoint (day) Value: 13
  misc_feature: MA Experiment 20001557 PARAMETER Experiment Name: At_Drought_Soil_Dry_P Parameter: Treatment Value: Drought vs. No Drought
  misc_feature: MA Experiment ID: 20001757 Result: Up-regulated in Transcription
  misc_feature: MA Experiment 20001757 PARAMETER Experiment Name: At_50mM_NH4NO3_L-to-H_P Parameter: Timepoint (hr) Value: 6
  misc_feature: MA Experiment 20001757 PARAMETER Experiment Name: At_50mM_NH4NO3_L-to-H_P Parameter: Tissue Value: Leaf
  misc_feature: MA Experiment 20001757 PARAMETER Experiment Name: At_50mM_NH4NO3_L-to-H_P Parameter: Treatment Value: 50mM NH4NO3 vs 100mM Mannitol
ataacaaaacctatctctctctgtctttactcattgtcgttatggtcgcgccgcctatagccgccgcgtcgttagagctccctcctccgttccccgccgtcttcgaacaaccaatggagaaactcaccttccctaacgagttcccttacgagtttgcctcctcaacgttttcaacttctccggaagactcaacggagacagaagatgaaacaaccgacgacgaagatgacttcttagccgggttaactcgcagactcgctctctcgactcagcgcctctcttctccttccttcgtcaccgacaagtctcagatgaaacccaaagtcacagagtcaactcagagtggactcggaagtcctaatggtccgttttctcaagtcccttcaccgccgacatctccgtctcgtgaagaagactctttgaaagtgttatctgctgcagctggagaagtcgccaagatcaaaaaggccaattttgatgctaaacccatcagctacccaaaccctaaccctaattacttaaccagctttcctcaaaacgtggcgtattataactgctactggttatgggagccgcattatcctcaatctcagatgggaatagttccaaatgcttggcatatacctccttctcccgttagagccttttacacccttccaaccgccgttaaatcgccgtcgactggtaccggcgttttccttccccggaaatactcaaacccttctgattccccgaagaagaaatcaggagatggatgtgttaaggttgttaaccagcaaaaacctaaaattgaagtgttaccggttcgctgtaaaccaaattcgaaagctggtctctctacaggacgcagcaaaatcgattacgtagctggtggtggatgtctgaagcatgaaaagcctcttctacaagaatggatgtactgagtttgaattaggttgtaggattcaggactttttggaagaagaaaatacagaaatggtcgtagttagtgggttgaatttatagtgttgattgtgatggttactggttatagtaaagaataattttgcggggttaagttggattgggatttatttatatttacttaggagaatagcaaaatcagtttctaataagcataattttttggccttgagagagttttgcatcgaactcttctttggcataaggttagtgcaacaacatagaggatgtattgagagtactttagggtgttttctgcagttttggaatctatggggttgcaatgaagtaatctgtatttttttttttttggtttgtttgattaaaagaagcaaagttgtagtgaattatagtggactagtggtaatagaagagattgtatctcaagttgttccct

SEQ ID NO: 43364 - protein, 306 aa, Arabidopsis thaliana
  peptide (1)..(306): Ceres Seq. ID no. 12336183
  misc_feature (205)..(245): Homolog of NCBI NO: 18405186 NR Description: expressed protein
  misc_feature (40)..(183): Homolog of NCBI NO: 18405186 NR Description: expressed protein
  misc_feature (14)..(306): Homolog of NCBI NO: 15228172 NR Description: putative protein; protein id: At3g55690.1
NKTYLSLSLLIVVMVAPPIAAASLELPPPFPAVFEQPMEKLTFPNEFPYEFASSTFSTSPEDSTETEDETTDDEDDFLAGLTRRLALSTQRLSSPSFVTDKSQMKPKVTESTQSGLGSPNGPFSQVPSPPTSPSREEDSLKVLSAAAGEVAKIKKANFDAKPISYPNPNPNYLTSFPQNVAYYNCYWLWEPHYPQSQMGIVPNAWHIPPSPVRAFYTLPTAVKSPSTGTGVFLPRKYSNPSDSPKKKSGDGCVKVVNQQKPKIEVLPVRCKPNSKAGLSTGRSKIDYVAGGGCLKHEKPLLQEWMY

SEQ ID NO: 43365 - protein, 293 aa, Arabidopsis thaliana
  peptide (1)..(293): Ceres Seq. ID no. 12336184
  misc_feature (192)..(232): Homolog of NCBI NO: 18405186 NR Description: expressed protein
  misc_feature (27)..(170): Homolog of NCBI NO: 18405186 NR Description: expressed protein
  misc_feature (1)..(293): Homolog of NCBI NO: 15228172 NR Description: putative protein; protein id: At3g55690.1
MVAPPIAAASLELPPPFPAVFEQPMEKLTFPNEFPYEFASSTFSTSPEDSTETEDETTDDEDDFLAGLTRRLALSTQRLSSPSFVTDKSQMKPKVTESTQSGLGSPNGPFSQVPSPPTSPSREEDSLKVLSAAAGEVAKIKKANFDAKPISYPNPNPNYLTSFPQNVAYYNCYWLWEPHYPQSQMGIVPNAWHIPPSPVRAFYTLPTAVKSPSTGTGVFLPRKYSNPSDSPKKKSGDGCVKVVNQQKPKIEVLPVRCKPNSKAGLSTGRSKIDYVAGGGCLKHEKPLLQEWMY

SEQ ID NO: 43366 - protein, 269 aa, Arabidopsis thaliana
  peptide (1)..(269): Ceres Seq. ID no. 12336185
  misc_feature (168)..(208): Homolog of NCBI NO: 18405186 NR Description: expressed protein
  misc_feature (3)..(146): Homolog of NCBI NO: 18405186 NR Description: expressed protein
  misc_feature (1)..(269): Homolog of NCBI NO: 15228172 NR Description: putative protein; protein id: At3g55690.1
MEKLTFPNEFPYEFASSTFSTSPEDSTETEDETTDDEDDFLAGLTRRLALSTQRLSSPSFVTDKSQMKPKVTESTQSGLGSPNGPFSQVPSPPTSPSREEDSLKVLSAAAGEVAKIKKANFDAKPISYPNPNPNYLTSFPQNVAYYNCYWLWEPHYPQSQMGIVPNAWHIPPSPVRAFYTLPTAVKSPSTGTGVFLPRKYSNPSDSPKKKSGDGCVKVVNQQKPKIEVLPVRCKPNSKAGLSTGRSKIDYVAGGGCLKHEKPLLQEWMY

SEQ ID NO: 43367 - DNA, 1328 bp, Arabidopsis thaliana
  misc_feature (1)..(1328): Ceres Seq. ID no. 12602849
  misc_feature: MA Experiment ID: 20000173 Result: Down-regulated in Transcription
  misc_feature: MA Experiment 20000173 PARAMETER Experiment Name: At_42deg_Heat_P Parameter: Age (day) Value: 14
  misc_feature: MA Experiment 20000173 PARAMETER Experiment Name: At_42deg_Heat_P Parameter: Organism Value: A. thaliana
  misc_feature: MA Experiment 20000173 PARAMETER Experiment Name: At_42deg_Heat_P Parameter: Plant Line Value: WS
  misc_feature: MA Experiment 20000173 PARAMETER Experiment Name: At_42deg_Heat_P Parameter: Temperature (deg C) Value: 42 vs. 22
  misc_feature: MA Experiment 20000173 PARAMETER Experiment Name: At_42deg_Heat_P Parameter: Timepoint (hr) Value: 6
  misc_feature: MA Experiment 20000173 PARAMETER Experiment Name: At_42deg_Heat_P Parameter: Tissue Value: Aerial
  misc_feature: MA Experiment ID: 20000180 Result: Up-regulated in Transcription
  misc_feature: MA Experiment 20000180 PARAMETER Experiment Name: At_Germinating_Seeds_P Parameter: Age (hr) Value: 24 vs. 0
  misc_feature: MA Experiment 20000180 PARAMETER Experiment Name: At_Germinating_Seeds_P Parameter: Tissue Value: Germinating Seeds
  misc_feature: MA Experiment ID: 20000185 Result: Down-regulated in Transcription
  misc_feature: MA Experiment 20000185 PARAMETER Experiment Name: At_Roots__P Parameter: Age (day) Value: 7 vs. 21
  misc_feature: MA Experiment 20000185 PARAMETER Experiment Name: At_Roots__P Parameter: Organism Value: A. thaliana
  misc_feature: MA Experiment 20000185 PARAMETER Experiment Name: At_Roots__P Parameter: Tissue Value: Roots vs. Whole Plant
  misc_feature: MA Experiment ID: 20000227 Result: Down-regulated in Transcription
  misc_feature: MA Experiment 20000227 PARAMETER Experiment Name: At_Root-Tips-vs-Tops_P Parameter: Tissue Value: Root Tips vs. Root Tops
  misc_feature: MA Experiment ID: 20000264 Result: Down-regulated in Transcription
  misc_feature: MA Experiment 20000264 PARAMETER Experiment Name: At_Open_Flower_P Parameter: Age (day) Value: 21
  misc_feature: MA Experiment 20000264 PARAMETER Experiment Name: At_Open_Flower_P Parameter: Plant Line Value: WS
  misc_feature: MA Experiment 20000264 PARAMETER Experiment Name: At_Open_Flower_P Parameter: Tissue Value: Open Flower vs. Whole Plant
  misc_feature: MA Experiment ID: 20000265 Result: Down-regulated in Transcription
  misc_feature: MA Experiment 20000265 PARAMETER Experiment Name: At_Open_Flower_P Parameter: Age (day) Value: 21
  misc_feature: MA Experiment 20000265 PARAMETER Experiment Name: At_Open_Flower_P Parameter: Plant Line Value: WS
  misc_feature: MA Experiment 20000265 PARAMETER Experiment Name: At_Open_Flower_P Parameter: Tissue Value: Closed Flower vs. Whole Plant
  misc_feature: MA Experiment ID: 20000286 Result: Down-regulated in Transcription
  misc_feature: MA Experiment 20000286 PARAMETER Experiment Name: At_Open_Flower_P Parameter: Age (day) Value: 21
  misc_feature: MA Experiment 20000286 PARAMETER Experiment Name: At_Open_Flower_P Parameter: Plant Line Value: WS
  misc_feature: MA Experiment 20000286 PARAMETER Experiment Name: At_Open_Flower_P Parameter: Tissue Value: Half Open vs. Whole Plant
  misc_feature: MA Experiment ID: 20000439 Result: Down-regulated in Transcription
  misc_feature: MA Experiment 20000439 PARAMETER Experiment Name: At_Roots__P Parameter: Age (day) Value: 14 vs. 21
  misc_feature: MA Experiment 20000439 PARAMETER Experiment Name: At_Roots__P Parameter: Organism Value: A. thaliana
  misc_feature: MA Experiment 20000439 PARAMETER Experiment Name: At_Roots__P Parameter: Tissue Value: Roots vs. Whole Plant
  misc_feature: MA Experiment ID: 20000573 Result: Down-regulated in Transcription
  misc_feature: MA Experiment 20000573 PARAMETER Experiment Name: At_100uM_ABA_Mutants__P Parameter: Organism Value: A. thaliana
  misc_feature: MA Experiment 20000573 PARAMETER Experiment Name: At_100uM_ABA_Mutants__P Parameter: Plant Line Value: CS22 vs. Ler wt
  misc_feature: MA Experiment 20000573 PARAMETER Experiment Name: At_100uM_ABA_Mutants__P Parameter: Timepoint (hr) Value: N/A
  misc_feature: MA Experiment 20000573 PARAMETER Experiment Name: At_100uM_ABA_Mutants__P Parameter: Tissue Value: Whole Plant
  misc_feature: MA Experiment 20000573 PARAMETER Experiment Name: At_100uM_ABA_Mutants__P Parameter: Treatment Value: None
  misc_feature: MA Experiment ID: 20000574 Result: Down-regulated in Transcription
  misc_feature: MA Experiment 20000574 PARAMETER Experiment Name: At_100uM_ABA_Mutants__P Parameter: Organism Value: A. thaliana
  misc_feature: MA Experiment 20000574 PARAMETER Experiment Name: At_100uM_ABA_Mutants__P Parameter: Plant Line Value: CS23 vs. Ler wt
  misc_feature: MA Experiment 20000574 PARAMETER Experiment Name: At_100uM_ABA_Mutants__P Parameter: Timepoint (hr) Value: N/A
  misc_feature: MA Experiment 20000574 PARAMETER Experiment Name: At_100uM_ABA_Mutants__P Parameter: Tissue Value: Whole Plant
  misc_feature: MA Experiment 20000574 PARAMETER Experiment Name: At_100uM_ABA_Mutants__P Parameter: Treatment Value: None
  misc_feature: MA Experiment ID: 20000794 Result: Down-regulated in Transcription
  misc_feature: MA Experiment 20000794 PARAMETER Experiment Name: At_Petals_P Parameter: Age (day) Value: 23-25 days
  misc_feature: MA Experiment 20000794 PARAMETER Experiment Name: At_Petals_P Parameter: Plant Line Value: WS
  misc_feature: MA Experiment 20000794 PARAMETER Experiment Name: At_Petals_P Parameter: Tissue Value: Petals vs. Whole plant
  misc_feature: MA Experiment ID: 20001248 Result: Down-regulated in Transcription
  misc_feature: MA Experiment 20001248 PARAMETER Experiment Name: At_Far-red-induction_P Parameter: Age (day) Value: 7
  misc_feature: MA Experiment 20001248 PARAMETER Experiment Name: At_Far-red-induction_P Parameter: Light Value: Far-red vs. White
  misc_feature: MA Experiment 20001248 PARAMETER Experiment Name: At_Far-red-induction_P Parameter: Organism Value: A. thaliana
  misc_feature: MA Experiment 20001248 PARAMETER Experiment Name: At_Far-red-induction_P Parameter: Plant Line Value: Columbia
  misc_feature: MA Experiment 20001248 PARAMETER Experiment Name: At_Far-red-induction_P Parameter: Timepoint (hr) Value: 4
  misc_feature: MA Experiment 20001248 PARAMETER Experiment Name: At_Far-red-induction_P Parameter: Tissue Value: Whole Plant
  misc_feature: MA Experiment ID: 20001557 Result: Down-regulated in Transcription
  misc_feature: MA Experiment 20001557 PARAMETER Experiment Name: At_Drought_Soil_Dry_P Parameter: Age (day) Value: 27
  misc_feature: MA Experiment 20001557 PARAMETER Experiment Name: At_Drought_Soil_Dry_P Parameter: Organism Value: A. thaliana
  misc_feature: MA Experiment 20001557 PARAMETER Experiment Name: At_Drought_Soil_Dry_P Parameter: Plant Line Value: WS
  misc_feature: MA Experiment 20001557 PARAMETER Experiment Name: At_Drought_Soil_Dry_P Parameter: Post Timepoint (hr) Value: 3
  misc_feature: MA Experiment 20001557 PARAMETER Experiment Name: At_Drought_Soil_Dry_P Parameter: Post-Treatment Value: Re-Water vs. No Drought
  misc_feature: MA Experiment 20001557 PARAMETER Experiment Name: At_Drought_Soil_Dry_P Parameter: Timepoint (day) Value: 13
  misc_feature: MA Experiment 20001557 PARAMETER Experiment Name: At_Drought_Soil_Dry_P Parameter: Treatment Value: Drought vs. No Drought
  misc_feature: MA Experiment ID: 20001559 Result: Down-regulated in Transcription
  misc_feature: MA Experiment 20001559 PARAMETER Experiment Name: At_Drought_Soil_Dry_P Parameter: Age (day) Value: 28
  misc_feature: MA Experiment 20001559 PARAMETER Experiment Name: At_Drought_Soil_Dry_P Parameter: Organism Value: A. thaliana
  misc_feature: MA Experiment 20001559 PARAMETER Experiment Name: At_Drought_Soil_Dry_P Parameter: Plant Line Value: WS
  misc_feature: MA Experiment 20001559 PARAMETER Experiment Name: At_Drought_Soil_Dry_P Parameter: Post Timepoint (hr) Value: 29
  misc_feature: MA Experiment 20001559 PARAMETER Experiment Name: At_Drought_Soil_Dry_P Parameter: Post-Treatment Value: Re-Water vs. No Drought
  misc_feature: MA Experiment 20001559 PARAMETER Experiment Name: At_Drought_Soil_Dry_P Parameter: Timepoint (day) Value: 14
  misc_feature: MA Experiment 20001559 PARAMETER Experiment Name: At_Drought_Soil_Dry_P Parameter: Treatment Value: Drought vs. No Drought
  misc_feature: MA Experiment ID: 20001904 Result: Down-regulated in Transcription
  misc_feature: MA Experiment 20001904 PARAMETER Experiment Name: At_Drought_Reproduction_P Parameter: Age (day) Value: 37
  misc_feature: MA Experiment 20001904 PARAMETER Experiment Name: At_Drought_Reproduction_P Parameter: Organism Value: A. thaliana
  misc_feature: MA Experiment 20001904 PARAMETER Experiment Name: At_Drought_Reproduction_P Parameter: Plant Line Value: WS
  misc_feature: MA Experiment 20001904 PARAMETER Experiment Name: At_Drought_Reproduction_P Parameter: Timepoint (day) Value: 7
  misc_feature: MA Experiment 20001904 PARAMETER Experiment Name: At_Drought_Reproduction_P Parameter: Tissue Value: Rosettes
  misc_feature: MA Experiment 20001904 PARAMETER Experiment Name: At_Drought_Reproduction_P Parameter: Treatment Value: Drought vs. No Drought
  misc_feature: MA Experiment ID: 20001905 Result: Down-regulated in Transcription
  misc_feature: MA Experiment 20001905 PARAMETER Experiment Name: At_Drought_Reproduction_P Parameter: Age (day) Value: 40
  misc_feature: MA Experiment 20001905 PARAMETER Experiment Name: At_Drought_Reproduction_P Parameter: Organism Value: A. thaliana
  misc_feature: MA Experiment 20001905 PARAMETER Experiment Name: At_Drought_Reproduction_P Parameter: Plant Line Value: WS
  misc_feature: MA Experiment 20001905 PARAMETER Experiment Name: At_Drought_Reproduction_P Parameter: Timepoint (day) Value: 10
  misc_feature: MA Experiment 20001905 PARAMETER Experiment Name: At_Drought_Reproduction_P Parameter: Tissue Value: Rosettes
  misc_feature: MA Experiment 20001905 PARAMETER Experiment Name: At_Drought_Reproduction_P Parameter: Treatment Value: Drought vs. No Drought
  misc_feature: MA Experiment ID: 20001906 Result: Down-regulated in Transcription
  misc_feature: MA Experiment 20001906 PARAMETER Experiment Name: At_Drought_Reproduction_P Parameter: Age (day) Value: 35
  misc_feature: MA Experiment 20001906 PARAMETER Experiment Name: At_Drought_Reproduction_P Parameter: Organism Value: A. thaliana
  misc_feature: MA Experiment 20001906 PARAMETER Experiment Name: At_Drought_Reproduction_P Parameter: Plant Line Value: WS
  misc_feature: MA Experiment 20001906 PARAMETER Experiment Name: At_Drought_Reproduction_P Parameter: Timepoint (day) Value: 5
  misc_feature: MA Experiment 20001906 PARAMETER Experiment Name: At_Drought_Reproduction_P Parameter: Tissue Value: Siliques
  misc_feature: MA Experiment 20001906 PARAMETER Experiment Name: At_Drought_Reproduction_P Parameter: Treatment Value: Drought vs. No Drought
  misc_feature: MA Experiment ID: 20001908 Result: Down-regulated in Transcription
  misc_feature: MA Experiment 20001908 PARAMETER Experiment Name: At_Drought_Reproduction_P Parameter: Age (day) Value: 40
  misc_feature: MA Experiment 20001908 PARAMETER Experiment Name: At_Drought_Reproduction_P Parameter: Organism Value: A. thaliana
  misc_feature: MA Experiment 20001908 PARAMETER Experiment Name: At_Drought_Reproduction_P Parameter: Plant Line Value: WS
  misc_feature: MA Experiment 20001908 PARAMETER Experiment Name: At_Drought_Reproduction_P Parameter: Timepoint (day) Value: 10
  misc_feature: MA Experiment 20001908 PARAMETER Experiment Name: At_Drought_Reproduction_P Parameter: Tissue Value: Siliques
  misc_feature: MA Experiment 20001908 PARAMETER Experiment Name: At_Drought_Reproduction_P Parameter: Treatment Value: Drought vs. No Drought
acttattatctccttacacacaccatttctctctaatggctacaacaaccacatcatgggaagaactcttaggctcaaagaattgggacactatcttagacccattagaccaatcacttagggaactcatcttacgttgtggcgacttttgtcaagccacctacgatgccttcgtcaacgaccaaaactccaagtactgtggagccagccgctacggcaaatcttctttcttcgacaaggtcatgctcgaaaacgcttccgactacgaggttgtaaacttcctctacgccacagctcgtgtttctctccccgaaggtttgcttctccaatcacaatcaagagattcttgggaccgtgagtctaactggtttggctacattgctgtcacgtctgatgaacggtctaaggctttaggacgccgtgagatctatatagctttgagaggaacgagcaggaactatgagtgggtcaatgttttgggtgctaggccaacttcagctgaccccttgctgcacggacccgagcaggatggttctggtggtgtagttgaaggtacgacttttgatagtgacagtgaagatgaagaagggtgtaaggtgatgctcgggtggctcacaatctatacttctaatcaccccgaatcgaaattcactaagctgagtctacggtcacagttgttagccaagatcaaggagcttctgttgaagtataaggacgagaaaccgagcattgtgttgactggacatagcttgggagctacagaggctgttctggccgcctatgatatagctgagaacggttccagtgatgatgttccggtcactgctatagtctttggttgtccacaggtaggaaacaaggagttcagagacgaagtaatgagtcacaagaacttaaagatcctccatgtaaggaacacgattgatctcttaactcgatacccagggggacttttagggtatgtggacataggaataaactttgtgatcgatacaaagaagtcaccgttcctaagcgattcaaggaatccaggggattggcataatcttcaggcgatgttacatgttgtagctggatggaatgggaagaaaggagagtttaaactgatggttaagagaagtattgcattagtgaacaagtcatgcgagttcttgaaagctgagtgtttggtgccaggatcttggtgggtagagaagaacaaaggactgatcaagaacgaagatggtgaatgggttcttgctcccgttgaagaagaacctgtacctgaattctaaattgtatttctgtatttttctctaaggtcatgataaatcaacaataagcagttc

SEQ ID NO: 43368 - protein, 423 aa, Arabidopsis thaliana
  peptide (1)..(423): Ceres Seq. ID no. 12602850
  misc_feature (11)..(417): Homolog of NCBI NO: 34911842 NR Description: lipase-like protein [Oryza sativa (japonica
  misc_feature (198)..(224): Homolog of NCBI NO: 34911870 NR Description: lipase-like protein [Oryza sativa (japonica
  misc_feature (19)..(170): Homolog of NCBI NO: 34911870 NR Description: lipase-like protein [Oryza sativa (japonica
  misc_feature (212)..(418): Homolog of NCBI NO: 34911870 NR Description: lipase-like protein [Oryza sativa (japonica
  misc_feature (19)..(156): Homolog of NCBI NO: 15233922 NR Description: lipase-like protein; protein id: At4g18550.1
  misc_feature (175)..(416): Homolog of NCBI NO: 15233922 NR Description: lipase-like protein; protein id: At4g18550.1
  misc_feature (19)..(421): Homolog of NCBI NO: 34910484 NR Description: putative lipase [Oryza sativa (japonica
  misc_feature (18)..(170): Homolog of NCBI NO: 4103627 NR Description: lipase [Dianthus caryophyllus]
  misc_feature (189)..(423): Homolog of NCBI NO: 4103627 NR Description: lipase [Dianthus caryophyllus]
  misc_feature (12)..(423): Homolog of NCBI NO: 15227978 NR Description: putative lipase
LLSPYTHHFSLMATTTTSWEELLGSKNWDTILDPLDQSLRELILRCGDFCQATYDAFVNDQNSKYCGASRYGKSSFFDKVMLENASDYEVVNFLYATARVSLPEGLLLQSQSRDSWDRESNWFGYIAVTSDERSKALGRREIYIALRGTSRNYEWVNVLGARPTSADPLLHGPEQDGSGGVVEGTTFDSDSEDEEGCKVMLGWLTIYTSNHPESKFTKLSLRSQLLAKIKELLLKYKDEKPSIVLTGHSLGATEAVLAAYDIAENGSSDDVPVTAIVFGCPQVGNKEFRDEVMSHKNLKILHVRNTIDLLTRYPGGLLGYVDIGINFVIDTKKSPFLSDSRNPGDWHNLQAMLHVVAGWNGKKGEFKLMVKRSIALVNKSCEFLKAECLVPGSWWVEKNKGLIKNEDGEWVLAPVEEEPVPEF

SEQ ID NO: 43369 - protein, 412 aa, Arabidopsis thaliana
  peptide (1)..(412): Ceres Seq. ID no. 12602851
  misc_feature (1)..(406): Homolog of NCBI NO: 34911842 NR Description: lipase-like protein [Oryza sativa (japonica
  misc_feature (187)..(213): Homolog of NCBI NO: 34911870 NR Description: lipase-like protein [Oryza sativa (japonica
  misc_feature (8)..(159): Homolog of NCBI NO: 34911870 NR Description: lipase-like protein [Oryza sativa (japonica
  misc_feature (201)..(407): Homolog of NCBI NO: 34911870 NR Description: lipase-like protein [Oryza sativa (japonica
  misc_feature (8)..(145): Homolog of NCBI NO: 15233922 NR Description: lipase-like protein; protein id: At4g18550.1
  misc_feature (164)..(405): Homolog of NCBI NO: 15233922 NR Description: lipase-like protein; protein id: At4g18550.1
  misc_feature (8)..(410): Homolog of NCBI NO: 34910484 NR Description: putative lipase [Oryza sativa (japonica
  misc_feature (7)..(159): Homolog of NCBI NO: 4103627 NR Description: lipase [Dianthus caryophyllus]
  misc_feature (178)..(412): Homolog of NCBI NO: 4103627 NR Description: lipase [Dianthus caryophyllus]
  misc_feature (1)..(412): Homolog of NCBI NO: 15227978 NR Description: putative lipase
MATTTTSWEELLGSKNWDTILDPLDQSLRELILRCGDFCQATYDAFVNDQNSKYCGASRYGKSSFFDKVMLENASDYEVVNFLYATARVSLPEGLLLQSQSRDSWDRESNWFGYIAVTSDERSKALGRREIYIALRGTSRNYEWVNVLGARPTSADPLLHGPEQDGSGGVVEGTTFDSDSEDEEGCKVMLGWLTIYTSNHPESKFTKLSLRSQLLAKIKELLLKYKDEKPSIVLTGHSLGATEAVLAAYDIAENGSSDDVPVTAIVFGCPQVGNKEFRDEVMSHKNLKILHVRNTIDLLTRYPGGLLGYVDIGINFVIDTKKSPFLSDSRNPGDWHNLQAMLHVVAGWNGKKGEFKLMVKRSIALVNKSCEFLKAECLVPGSWWVEKNKGLIKNEDGEWVLAPVEEEPVPEF

SEQ ID NO: 43370 - protein, 343 aa, Arabidopsis thaliana
  peptide (1)..(343): Ceres Seq. ID no. 12602852
  misc_feature (1)..(337): Homolog of NCBI NO: 34911842 NR Description: lipase-like protein [Oryza sativa (japonica
  misc_feature (118)..(144): Homolog of NCBI NO: 34911870 NR Description: lipase-like protein [Oryza sativa (japonica
  misc_feature (1)..(90): Homolog of NCBI NO: 34911870 NR Description: lipase-like protein [Oryza sativa (japonica
  misc_feature (132)..(338): Homolog of NCBI NO: 34911870 NR Description: lipase-like protein [Oryza sativa (japonica
  misc_feature (1)..(76): Homolog of NCBI NO: 15233922 NR Description: lipase-like protein; protein id: At4g18550.1
  misc_feature (95)..(336): Homolog of NCBI NO: 15233922 NR Description: lipase-like protein; protein id: At4g18550.1
  misc_feature (1)..(341): Homolog of NCBI NO: 34910484 NR Description: putative lipase [Oryza sativa (japonica
  misc_feature (1)..(90): Homolog of NCBI NO: 4103627 NR Description: lipase [Dianthus caryophyllus]
  misc_feature (109)..(343): Homolog of NCBI NO: 4103627 NR Description: lipase [Dianthus caryophyllus]
  misc_feature (1)..(343): Homolog of NCBI NO: 15227978 NR Description: putative lipase
MLENASDYEVVNFLYATARVSLPEGLLLQSQSRDSWDRESNWFGYIAVTSDERSKALGRREIYIALRGTSRNYEWVNVLGARPTSADPLLHGPEQDGSGGVVEGTTFDSDSEDEEGCKVMLGWLTIYTSNHPESKFTKLSLRSQLLAKIKELLLKYKDEKPSIVLTGHSLGATEAVLAAYDIAENGSSDDVPVTAIVFGCPQVGNKEFRDEVMSHKNLKILHVRNTIDLLTRYPGGLLGYVDIGINFVIDTKKSPFLSDSRNPGDWHNLQAMLHVVAGWNGKKGEFKLMVKRSIALVNKSCEFLKAECLVPGSWWVEKNKGLIKNEDGEWVLAPVEEEPVPEF

SEQ ID NO: 43371 - DNA, 1099 bp, Arabidopsis thaliana
  misc_feature (1)..(1099): Ceres Seq. ID no. 12337087
  misc_feature: MA Experiment ID: 108435 Result: Up-regulated in Transcription
  misc_feature: MA Experiment 108435 PARAMETER Experiment Name: At_stm_Mutants_cDNA_P Parameter: Plant Line Value: wt Landsburg vs stm
  misc_feature: MA Experiment 108435 PARAMETER Experiment Name: At_stm_Mutants_cDNA_P Parameter: Tissue Value: Shoot Apical Meristem Region
  misc_feature: MA Experiment ID: 108461 Result: Up-regulated in Transcription
  misc_feature: MA Experiment 108461 PARAMETER Experiment Name: At_Germinating_Seeds_cDNA_P Parameter: Age (day) Value: 1 vs. 0
  misc_feature: MA Experiment 108461 PARAMETER Experiment Name: At_Germinating_Seeds_cDNA_P Parameter: Tissue Value: Germinating Seeds
  misc_feature: MA Experiment ID: 108473 Result: Down-regulated in Transcription
  misc_feature: MA Experiment 108473 PARAMETER Experiment Name: At_Drought_Flowers_cDNA_P Parameter: Timepoint (hr) Value: 7 d
  misc_feature: MA Experiment 108473 PARAMETER Experiment Name: At_Drought_Flowers_cDNA_P Parameter: Tissue Value: Flower
  misc_feature: MA Experiment 108473 PARAMETER Experiment Name: At_Drought_Flowers_cDNA_P Parameter: Treatment Value: Drought vs. No Drought
  misc_feature: MA Experiment ID: 108501 Result: Down-regulated in Transcription
  misc_feature: MA Experiment 108501 PARAMETER Experiment Name: At_ap2_floral_buds_cDNA_P Parameter: Plant Line Value: ap2 (Ler.)
  misc_feature: MA Experiment 108501 PARAMETER Experiment Name: At_ap2_floral_buds_cDNA_P Parameter: Tissue Value: Closed Flower
  misc_feature: MA Experiment ID: 108561 Result: Down-regulated in Transcription
  misc_feature: MA Experiment 108561 PARAMETER Experiment Name: At_100uM_ABA_cDNA_P Parameter: Timepoint (hr) Value: 6
  misc_feature: MA Experiment 108561 PARAMETER Experiment Name: At_100uM_ABA_cDNA_P Parameter: Tissue Value: Aerial
  misc_feature: MA Experiment 108561 PARAMETER Experiment Name: At_100uM_ABA_cDNA_P Parameter: Treatment Value: 100uM ABA vs. No Treatment
  misc_feature: MA Experiment ID: 108577 Result: Down-regulated in Transcription
  misc_feature: MA Experiment 108577 PARAMETER Experiment Name: At_42deg_Heat_cDNA_P Parameter: Temperature (deg C) Value: 42 vs. 22
  misc_feature: MA Experiment 108577 PARAMETER Experiment Name: At_42deg_Heat_cDNA_P Parameter: Timepoint (hr) Value: 6
  misc_feature: MA Experiment 108577 PARAMETER Experiment Name: At_42deg_Heat_cDNA_P Parameter: Tissue Value: Aerial
  misc_feature: MA Experiment ID: 20000069 Result: Down-regulated in Transcription
  misc_feature: MA Experiment 20000069 PARAMETER Experiment Name: At_100uM_ABA_Mutants_cDNA_P Parameter: Plant Line Value: CS23
  misc_feature: MA Experiment 20000069 PARAMETER Experiment Name: At_100uM_ABA_Mutants_cDNA_P Parameter: Timepoint (hr) Value: 6
  misc_feature: MA Experiment 20000069 PARAMETER Experiment Name: At_100uM_ABA_Mutants_cDNA_P Parameter: Tissue Value: Aerial
  misc_feature: MA Experiment 20000069 PARAMETER Experiment Name: At_100uM_ABA_Mutants_cDNA_P Parameter: Treatment Value: 100uM ABA vs. No Treatment
  misc_feature: MA Experiment ID: 20000093 Result: Down-regulated in Transcription
  misc_feature: MA Experiment 20000093 PARAMETER Experiment Name: At_42deg_Heat_cDNA_P Parameter: Temperature (deg C) Value: 42 vs. 22
  misc_feature: MA Experiment 20000093 PARAMETER Experiment Name: At_42deg_Heat_cDNA_P Parameter: Timepoint (hr) Value: 0.5
  misc_feature: MA Experiment 20000093 PARAMETER Experiment Name: At_42deg_Heat_cDNA_P Parameter: Tissue Value: Aerial
  misc_feature: MA Experiment ID: 20000111 Result: Down-regulated in Transcription
  misc_feature: MA Experiment 20000111 PARAMETER Experiment Name: At_42deg_Heat_cDNA_P Parameter: Temperature (deg C) Value: 42 vs. 22
  misc_feature: MA Experiment 20000111 PARAMETER Experiment Name: At_42deg_Heat_cDNA_P Parameter: Timepoint (hr) Value: 6
  misc_feature: MA Experiment 20000111 PARAMETER Experiment Name: At_42deg_Heat_cDNA_P Parameter: Tissue Value: Aerial
  misc_feature: MA Experiment ID: 20000112 Result: Down-regulated in Transcription
  misc_feature: MA Experiment 20000112 PARAMETER Experiment Name: At_42deg_Heat_cDNA_P Parameter: Temperature (deg C) Value: 42 vs. 22
  misc_feature: MA Experiment 20000112 PARAMETER Experiment Name: At_42deg_Heat_cDNA_P Parameter: Timepoint (hr) Value: 2
  misc_feature: MA Experiment 20000112 PARAMETER Experiment Name: At_42deg_Heat_cDNA_P Parameter: Tissue Value: Aerial
  misc_feature: MA Experiment ID: 20000185 Result: Down-regulated in Transcription
  misc_feature: MA Experiment 20000185 PARAMETER Experiment Name: At_Roots__P Parameter: Age (day) Value: 7 vs. 21
  misc_feature: MA Experiment 20000185 PARAMETER Experiment Name: At_Roots__P Parameter: Organism Value: A. thaliana
  misc_feature: MA Experiment 20000185 PARAMETER Experiment Name: At_Roots__P Parameter: Tissue Value: Roots vs. Whole Plant
  misc_feature: MA Experiment ID: 20000234 Result: Up-regulated in Transcription
  misc_feature: MA Experiment 20000234 PARAMETER Experiment Name: At_Siliques_P Parameter: Age (day) Value: 21
  misc_feature: MA Experiment 20000234 PARAMETER Experiment Name: At_Siliques_P Parameter: Organism Value: A. thaliana
  misc_feature: MA Experiment 20000234 PARAMETER Experiment Name: At_Siliques_P Parameter: Plant Line Value: WS
  misc_feature: MA Experiment 20000234 PARAMETER Experiment Name: At_Siliques_P Parameter: Tissue Value: Less Than 5mm Siliques vs. Whole Plant
  misc_feature: MA Experiment ID: 20000265 Result: Up-regulated in Transcription
  misc_feature: MA Experiment 20000265 PARAMETER Experiment Name: At_Open_Flower_P Parameter: Age (day) Value: 21
  misc_feature: MA Experiment 20000265 PARAMETER Experiment Name: At_Open_Flower_P Parameter: Plant Line Value: WS
  misc_feature: MA Experiment 20000265 PARAMETER Experiment Name: At_Open_Flower_P Parameter: Tissue Value: Closed Flower vs. Whole Plant
  misc_feature: MA Experiment ID: 20000286 Result: Up-regulated in Transcription
  misc_feature: MA Experiment 20000286 PARAMETER Experiment Name: At_Open_Flower_P Parameter: Age (day) Value: 21
  misc_feature: MA Experiment 20000286 PARAMETER Experiment Name: At_Open_Flower_P Parameter: Plant Line Value: WS
  misc_feature: MA Experiment 20000286 PARAMETER Experiment Name: At_Open_Flower_P Parameter: Tissue Value: Half Open vs. Whole Plant
  misc_feature: MA Experiment ID: 20000439 Result: Down-regulated in Transcription
  misc_feature: MA Experiment 20000439 PARAMETER Experiment Name: At_Roots__P Parameter: Age (day) Value: 14 vs. 21
  misc_feature: MA Experiment 20000439 PARAMETER Experiment Name: At_Roots__P Parameter: Organism Value: A. thaliana
  misc_feature: MA Experiment 20000439 PARAMETER Experiment Name: At_Roots__P Parameter: Tissue Value: Roots vs. Whole Plant
  misc_feature: MA Experiment ID: 20001248 Result: Down-regulated in Transcription
  misc_feature: MA Experiment 20001248 PARAMETER Experiment Name: At_Far-red-induction_P Parameter: Age (day) Value: 7
  misc_feature: MA Experiment 20001248 PARAMETER Experiment Name: At_Far-red-induction_P Parameter: Light Value: Far-red vs. White
  misc_feature: MA Experiment 20001248 PARAMETER Experiment Name: At_Far-red-induction_P Parameter: Organism Value: A. thaliana
  misc_feature: MA Experiment 20001248 PARAMETER Experiment Name: At_Far-red-induction_P Parameter: Plant Line Value: Columbia
  misc_feature: MA Experiment 20001248 PARAMETER Experiment Name: At_Far-red-induction_P Parameter: Timepoint (hr) Value: 4
  misc_feature: MA Experiment 20001248 PARAMETER Experiment Name: At_Far-red-induction_P Parameter: Tissue Value: Whole Plant
  misc_feature: MA Experiment ID: 20001450 Result: Down-regulated in Transcription
  misc_feature: MA Experiment 20001450 PARAMETER Experiment Name: At_Far-red-induction_P Parameter: Age (day) Value: 7
  misc_feature: MA Experiment 20001450 PARAMETER Experiment Name: At_Far-red-induction_P Parameter: Light Value: Far-red vs. White
  misc_feature: MA Experiment 20001450 PARAMETER Experiment Name: At_Far-red-induction_P Parameter: Organism Value: A. thaliana
  misc_feature: MA Experiment 20001450 PARAMETER Experiment Name: At_Far-red-induction_P Parameter: Plant Line Value: Columbia
  misc_feature: MA Experiment 20001450 PARAMETER Experiment Name: At_Far-red-induction_P Parameter: Timepoint (hr) Value: 8
  misc_feature: MA Experiment 20001450 PARAMETER Experiment Name: At_Far-red-induction_P Parameter: Tissue Value: Whole Plant
  misc_feature: MA Experiment ID: 20001451 Result: Down-regulated in Transcription
  misc_feature: MA Experiment 20001451 PARAMETER Experiment Name: At_Far-red-induction_P Parameter: Age (day) Value: 7
  misc_feature: MA Experiment 20001451 PARAMETER Experiment Name: At_Far-red-induction_P Parameter: Light Value: Far-red vs. White
  misc_feature: MA Experiment 20001451 PARAMETER Experiment Name: At_Far-red-induction_P Parameter: Organism Value: A. thaliana
  misc_feature: MA Experiment 20001451 PARAMETER Experiment Name: At_Far-red-induction_P Parameter: Plant Line Value: Columbia
  misc_feature: MA Experiment 20001451 PARAMETER Experiment Name: At_Far-red-induction_P Parameter: Timepoint (hr) Value: 24
  misc_feature: MA Experiment 20001451 PARAMETER Experiment Name: At_Far-red-induction_P Parameter: Tissue Value: Whole Plant
  misc_feature: MA Experiment ID: 20001555 Result: Down-regulated in Transcription
  misc_feature: MA Experiment 20001555 PARAMETER Experiment Name: At_Drought_Soil_Dry_P Parameter: Age (day) Value: 24
  misc_feature: MA Experiment 20001555 PARAMETER Experiment Name: At_Drought_Soil_Dry_P Parameter: Organism Value: A. thaliana
  misc_feature: MA Experiment 20001555 PARAMETER Experiment Name: At_Drought_Soil_Dry_P Parameter: Plant Line Value: WS
  misc_feature: MA Experiment 20001555 PARAMETER Experiment Name: At_Drought_Soil_Dry_P Parameter: Post Timepoint (hr) Value: None
  misc_feature: MA Experiment 20001555 PARAMETER Experiment Name: At_Drought_Soil_Dry_P Parameter: Post-Treatment Value: None
  misc_feature: MA Experiment 20001555 PARAMETER Experiment Name: At_Drought_Soil_Dry_P Parameter: Timepoint (day) Value: 10
  misc_feature: MA Experiment 20001555 PARAMETER Experiment Name: At_Drought_Soil_Dry_P Parameter: Treatment Value: Drought vs. No Drought
  misc_feature: MA Experiment ID: 20001556 Result: Down-regulated in Transcription
  misc_feature: MA Experiment 20001556 PARAMETER Experiment Name: At_Drought_Soil_Dry_P Parameter: Age (day) Value: 26
  misc_feature: MA Experiment 20001556 PARAMETER Experiment Name: At_Drought_Soil_Dry_P Parameter: Organism Value: A. thaliana
  misc_feature: MA Experiment 20001556 PARAMETER Experiment Name: At_Drought_Soil_Dry_P Parameter: Plant Line Value: WS
  misc_feature: MA Experiment 20001556 PARAMETER Experiment Name: At_Drought_Soil_Dry_P Parameter: Post Timepoint (hr) Value: None
  misc_feature: MA Experiment 20001556 PARAMETER Experiment Name: At_Drought_Soil_Dry_P Parameter: Post-Treatment Value: None
  misc_feature: MA Experiment 20001556 PARAMETER Experiment Name: At_Drought_Soil_Dry_P Parameter: Timepoint (day) Value: 12
  misc_feature: MA Experiment 20001556 PARAMETER Experiment Name: At_Drought_Soil_Dry_P Parameter: Treatment Value: Drought vs. No Drought
  misc_feature: MA Experiment ID: 20001557 Result: Down-regulated in Transcription
  misc_feature: MA Experiment 20001557 PARAMETER Experiment Name: At_Drought_Soil_Dry_P Parameter: Age (day) Value: 27
  misc_feature: MA Experiment 20001557 PARAMETER Experiment Name: At_Drought_Soil_Dry_P Parameter: Organism Value: A. thaliana
  misc_feature: MA Experiment 20001557 PARAMETER Experiment Name: At_Drought_Soil_Dry_P Parameter: Plant Line Value: WS
  misc_feature: MA Experiment 20001557 PARAMETER Experiment Name: At_Drought_Soil_Dry_P Parameter: Post Timepoint (hr) Value: 3
  misc_feature: MA Experiment 20001557 PARAMETER Experiment Name: At_Drought_Soil_Dry_P Parameter: Post-Treatment Value: Re-Water vs. No Drought
  misc_feature: MA Experiment 20001557 PARAMETER Experiment Name: At_Drought_Soil_Dry_P Parameter: Timepoint (day) Value: 13
  misc_feature: MA Experiment 20001557 PARAMETER Experiment Name: At_Drought_Soil_Dry_P Parameter: Treatment Value: Drought vs. No Drought
  misc_feature: MA Experiment ID: 20001559 Result: Down-regulated in Transcription
  misc_feature: MA Experiment 20001559 PARAMETER Experiment Name: At_Drought_Soil_Dry_P Parameter: Age (day) Value: 28
  misc_feature: MA Experiment 20001559 PARAMETER Experiment Name: At_Drought_Soil_Dry_P Parameter: Organism Value: A. thaliana
  misc_feature: MA Experiment 20001559 PARAMETER Experiment Name: At_Drought_Soil_Dry_P Parameter: Plant Line Value: WS
  misc_feature: MA Experiment 20001559 PARAMETER Experiment Name: At_Drought_Soil_Dry_P Parameter: Post Timepoint (hr) Value: 29
  misc_feature: MA Experiment 20001559 PARAMETER Experiment Name: At_Drought_Soil_Dry_P Parameter: Post-Treatment Value: Re-Water vs. No Drought
  misc_feature: MA Experiment 20001559 PARAMETER Experiment Name: At_Drought_Soil_Dry_P Parameter: Timepoint (day) Value: 14
  misc_feature: MA Experiment 20001559 PARAMETER Experiment Name: At_Drought_Soil_Dry_P Parameter: Treatment Value: Drought vs. No Drought
  misc_feature: MA Experiment ID: 20001773 Result: Up-regulated in Transcription
  misc_feature: MA Experiment 20001773 PARAMETER Experiment Name: At_Far-red-enriched-adult_P Parameter: Age (day) Value: 30
  misc_feature: MA Experiment 20001773 PARAMETER Experiment Name: At_Far-red-enriched-adult_P Parameter: Light Value: Far-red enriched vs. White
  misc_feature: MA Experiment 20001773 PARAMETER Experiment Name: At_Far-red-enriched-adult_P Parameter: Organism Value: A. thaliana
  misc_feature: MA Experiment 20001773 PARAMETER Experiment Name: At_Far-red-enriched-adult_P Parameter: Plant Line Value: Columbia
  misc_feature: MA Experiment 20001773 PARAMETER Experiment Name: At_Far-red-enriched-adult_P Parameter: Timepoint (hr) Value: 48
  misc_feature: MA Experiment 20001773 PARAMETER Experiment Name: At_Far-red-enriched-adult_P Parameter: Tissue Value: Aerial
  misc_feature: MA Experiment ID: 20001906 Result: Down-regulated in Transcription
  misc_feature: MA Experiment 20001906 PARAMETER Experiment Name: At_Drought_Reproduction_P Parameter: Age (day) Value: 35
  misc_feature: MA Experiment 20001906 PARAMETER Experiment Name: At_Drought_Reproduction_P Parameter: Organism Value: A. thaliana
  misc_feature: MA Experiment 20001906 PARAMETER Experiment Name: At_Drought_Reproduction_P Parameter: Plant Line Value: WS
  misc_feature: MA Experiment 20001906 PARAMETER Experiment Name: At_Drought_Reproduction_P Parameter: Timepoint (day) Value: 5
  misc_feature: MA Experiment 20001906 PARAMETER Experiment Name: At_Drought_Reproduction_P Parameter: Tissue Value: Siliques
  misc_feature: MA Experiment 20001906 PARAMETER Experiment Name: At_Drought_Reproduction_P Parameter: Treatment Value: Drought vs. No Drought
atttcatagcaaaacaccaaaacagagttcacagaaacatattcaaagatttttcacaaatattaccattttaaatctataaacaatgacgaactcggtggctaagttggcactactagggttttgcattctgcaagtgacgagcttacttgttccgcaagcaaatgctagggctttccttgtgtttggagattctctcgttgacaatggtaacaatgactttcttgctaccactgctcgtgccgataattacccttatggtatcgattttccaactcatcgtcctacgggccgtttctccaatggtctaaacattccagatctcgtcaattctctcttcctgactacgttgtctttgtcatttctgaataccgcaaagtcttacggaaaatgtacgatttgggtgctcgacgtgtccttgtgactggaacaggaccaatgggttgcgtcccggccgagctggcgcaacgtagccgcaacgggcgagtgtgctaccgaactccaacgagccgcgtcactattcaacccacaactaattcaaatgataacagacctcaacaacgaagttggatcttcggccttcattgccgctaatactcaacaaatgcacatggacttcattagcgacccacaagcatatggattcgtcacgtcgaaggtggcttgttgtggacaagggccgtacaatgggatagggctatgcactccattatcaaatctttgcccaaacagagatctctttgccttttgggatccttttcacccatcagaaaaagcaagtagaatcatagctcaacaaatcctcaatggctctcctgaatacatgcatcccatgaatcttagcaccatcctcaccgttgattccatgacctaagcttctattcctcatctatcccaaatccactttatgctttgtttttgttttgcctttctcgtttattatatatttttacattggtgctttaattagtttccttgagttatgttgtgagttttgtgttgttcatcaataattagtcaccaattgtgagctgagaagtaatattcaacaatcttacgaatgttcactatcatttttttttgttcaatctttttattt

SEQ ID NO: 43372 - protein, 112 aa, Arabidopsis thaliana
  peptide (1)..(112): Ceres Seq. ID no. 12337088
  misc_feature (31)..(82): Pfam Name: GDSL-like Lipase/Acylhydrolase Pfam Description: GDSL-like Lipase/Acylhydrolase
  misc_feature (31)..(84): Homolog of NCBI NO: 15220512 NR Description: lipase/hydrolase, putative
  misc_feature (30)..(94): Homolog of NCBI NO: 15227849 NR Description: putative GDSL-motif lipase/hydrolase
  misc_feature (24)..(95): Homolog of NCBI NO: 22758315 NR Description: putative early nodulin gene (Enod) related
  misc_feature (1)..(95): Homolog of NCBI NO: 37535146 NR Description: putative early nodulin gene (Enod) related
  misc_feature (25)..(95): Homolog of NCBI NO: 28071322 NR Description: P0705A05.30 [Oryza sativa (japonica
  misc_feature (9)..(95): Homolog of NCBI NO: 32489520 NR Description: OSJNBa0043L24.11 [Oryza sativa (japonica
  misc_feature (11)..(95): Homolog of NCBI NO: 15229265 NR Description: putative GDSL-motif lipase/acylhydrolase
  misc_feature (1)..(82): Homolog of NCBI NO: 15238814 NR Description: putative protein; protein id: At5g18430.1
  misc_feature (16)..(82): Homolog of NCBI NO: 15235421 NR Description: Proline-rich APG - like protein
  misc_feature (1)..(82): Homolog of NCBI NO: 15242808 NR Description: putative protein
MTNSVAKLALLGFCILQVTSLLVPQANARAFLVFGDSLVDNGNNDFLATTARADNYPYGIDFPTHRPTGRFSNGLNIPDLVNSLFLTTLSLSFLNTAKSYGKCTIWVLDVSL

SEQ ID NO: 43373 - protein, 110 aa, Arabidopsis thaliana
  peptide (1)..(110): Ceres Seq. ID no. 12337089
  misc_feature (1)..(87): Pfam Name: GDSL-like Lipase/Acylhydrolase Pfam Description: GDSL-like Lipase/Acylhydrolase
  misc_feature (1)..(103): Homolog of NCBI NO: 15220512 NR Description: lipase/hydrolase, putative
  misc_feature (1)..(103): Homolog of NCBI NO: 15227849 NR Description: putative GDSL-motif lipase/hydrolase
  misc_feature (1)..(108): Homolog of NCBI NO: 22758315 NR Description: putative early nodulin gene (Enod) related
  misc_feature (1)..(108): Homolog of NCBI NO: 37535146 NR Description: putative early nodulin gene (Enod) related
  misc_feature (1)..(110): Homolog of NCBI NO: 28071322 NR Description: P0705A05.30 [Oryza sativa (japonica
  misc_feature (1)..(107): Homolog of NCBI NO: 32489520 NR Description: OSJNBa0043L24.11 [Oryza sativa (japonica
  misc_feature (1)..(108): Homolog of NCBI NO: 15229265 NR Description: putative GDSL-motif lipase/acylhydrolase
  misc_feature (1)..(106): Homolog of NCBI NO: 15238814 NR Description: putative protein; protein id: At5g18430.1
  misc_feature (1)..(108): Homolog of NCBI NO: 15235421 NR Description: Proline-rich APG - like protein
  misc_feature (1)..(110): Homolog of NCBI NO: 15242808 NR Description: putative protein
MITDLNNEVGSSAFIAANTQQMHMDFISDPQAYGFVTSKVACCGQGPYNGIGLCTPLSNLCPNRDLFAFWDPFHPSEKASRIIAQQILNGSPEYMHPMNLSTILTVDSMT

SEQ ID NO: 43374 - protein, 89 aa, Arabidopsis thaliana
  peptide (1)..(89): Ceres Seq. ID no. 12337090
  misc_feature (1)..(66): Pfam Name: GDSL-like Lipase/Acylhydrolase Pfam Description: GDSL-like Lipase/Acylhydrolase
  misc_feature (1)..(82): Homolog of NCBI NO: 15220512 NR Description: lipase/hydrolase, putative
  misc_feature (1)..(82): Homolog of NCBI NO: 15227849 NR Description: putative GDSL-motif lipase/hydrolase
  misc_feature (1)..(87): Homolog of NCBI NO: 22758315 NR Description: putative early nodulin gene (Enod) related
  misc_feature (1)..(87): Homolog of NCBI NO: 37535146 NR Description: putative early nodulin gene (Enod) related
  misc_feature (1)..(89): Homolog of NCBI NO: 28071322 NR Description: P0705A05.30 [Oryza sativa (japonica
  misc_feature (1)..(86): Homolog of NCBI NO: 32489520 NR Description: OSJNBa0043L24.11 [Oryza sativa (japonica
  misc_feature (1)..(87): Homolog of NCBI NO: 15229265 NR Description: putative GDSL-motif lipase/acylhydrolase
  misc_feature (1)..(85): Homolog of NCBI NO: 15238814 NR Description: putative protein; protein id: At5g18430.1
  misc_feature (1)..(87): Homolog of NCBI NO: 15235421 NR Description: Proline-rich APG - like protein
  misc_feature (1)..(89): Homolog of NCBI NO: 15242808 NR Description: putative protein
MHMDFISDPQAYGFVTSKVACCGQGPYNGIGLCTPLSNLCPNRDLFAFWDPFHPSEKASRIIAQQILNGSPEYMHPMNLSTILTVDSMT

SEQ ID NO: 43375 - DNA, 1368 bp, Arabidopsis thaliana
  misc_feature (1)..(1368): Ceres Seq. ID no. 12422296
  misc_feature: MA Experiment ID: 108434 Result: Up-regulated in Transcription
  misc_feature: MA Experiment 108434 PARAMETER Experiment Name: At_Root_Tips_cDNA_P Parameter: Tissue Value: Root Tips
  misc_feature: MA Experiment ID: 108594 Result: Up-regulated in Transcription
  misc_feature: MA Experiment 108594 PARAMETER Experiment Name: At_Ler-rhl_Root_cDNA_P Parameter: Plant Line Value: null
  misc_feature: MA Experiment ID: 108595 Result: Down-regulated in Transcription
  misc_feature: MA Experiment 108595 PARAMETER Experiment Name: At_Ler-pi_Ovule_cDNA_P Parameter: Plant Line Value: null
  misc_feature: MA Experiment ID: 20000069 Result: Down-regulated in Transcription
  misc_feature: MA Experiment 20000069 PARAMETER Experiment Name: At_100uM_ABA_Mutants_cDNA_P Parameter: Plant Line Value: CS23
  misc_feature: MA Experiment 20000069 PARAMETER Experiment Name: At_100uM_ABA_Mutants_cDNA_P Parameter: Timepoint (hr) Value: 6
  misc_feature: MA Experiment 20000069 PARAMETER Experiment Name: At_100uM_ABA_Mutants_cDNA_P Parameter: Tissue Value: Aerial
  misc_feature: MA Experiment 20000069 PARAMETER Experiment Name: At_100uM_ABA_Mutants_cDNA_P Parameter: Treatment Value: 100uM ABA vs. No Treatment
  misc_feature: MA Experiment ID: 20000071 Result: Down-regulated in Transcription
  misc_feature: MA Experiment 20000071 PARAMETER Experiment Name: At_100uM_ABA_Mutants_cDNA_P Parameter: Plant Line Value: CS8104
  misc_feature: MA Experiment 20000071 PARAMETER Experiment Name: At_100uM_ABA_Mutants_cDNA_P Parameter: Timepoint (hr) Value: 6
  misc_feature: MA Experiment 20000071 PARAMETER Experiment Name: At_100uM_ABA_Mutants_cDNA_P Parameter: Tissue Value: Aerial
  misc_feature: MA Experiment 20000071 PARAMETER Experiment Name: At_100uM_ABA_Mutants_cDNA_P Parameter: Treatment Value: 100uM ABA vs. No Treatment
  misc_feature: MA Experiment ID: 20000072 Result: Down-regulated in Transcription
  misc_feature: MA Experiment 20000072 PARAMETER Experiment Name: At_100uM_ABA_Mutants_cDNA_P Parameter: Plant Line Value: CS8105
  misc_feature: MA Experiment 20000072 PARAMETER Experiment Name: At_100uM_ABA_Mutants_cDNA_P Parameter: Timepoint (hr) Value: 6
  misc_feature: MA Experiment 20000072 PARAMETER Experiment Name: At_100uM_ABA_Mutants_cDNA_P Parameter: Tissue Value: Aerial
  misc_feature: MA Experiment 20000072 PARAMETER Experiment Name: At_100uM_ABA_Mutants_cDNA_P Parameter: Treatment Value: 100uM ABA vs. No Treatment
  misc_feature: MA Experiment ID: 20000089 Result: Down-regulated in Transcription
  misc_feature: MA Experiment ID: 20000117 Result: Down-regulated in Transcription
  misc_feature: MA Experiment 20000117 PARAMETER Experiment Name: At_100uM_ABA_Mutants_cDNA_P Parameter: Plant Line Value: Columbia
  misc_feature: MA Experiment 20000117 PARAMETER Experiment Name: At_100uM_ABA_Mutants_cDNA_P Parameter: Timepoint (hr) Value: 6
  misc_feature: MA Experiment 20000117 PARAMETER Experiment Name: At_100uM_ABA_Mutants_cDNA_P Parameter: Tissue Value: Aerial
  misc_feature: MA Experiment 20000117 PARAMETER Experiment Name: At_100uM_ABA_Mutants_cDNA_P Parameter: Treatment Value: 100uM ABA vs. No Treatment
  misc_feature: MA Experiment ID: 20000184 Result: Up-regulated in Transcription
  misc_feature: MA Experiment 20000184 PARAMETER Experiment Name: At_Shoots__P Parameter: Age (day) Value: 7
  misc_feature: MA Experiment 20000184 PARAMETER Experiment Name: At_Shoots__P Parameter: Tissue Value: Shoots vs. Whole Plant
aactgataaagtgataacggagttggttggaacgtgaaacgcttataaaaataaaccggtttaatttcaccggtttaccttccgccgtagatatcagccgcaatgtacattctcgacaccggagctcgattctccgccgtcagattctcaccggtattcaatcctcctccaacatctctccgtagacgatacttcatcgtaagagctaatcttccattcccaaagcatcaagctaagtatcataaagagcttgaggtcgccattgatgctgttgatcgagcttgtcgtctctgtgttgatgtcaaaagatctcttttttcttctaaagagaagattgttgagaagaatgatcaaactccagttacaattgcagattttggagttcaagctttagtcagcttggagctttcgaaattgtttccttcaataccattagtggctgaggaagactctcattttgtgcgtgctaataaccttgtaagctctgtggtaagtgaagtcaaatcaaaagcaagcattggagacaatcacttgtctgatgctgatgtacttgaagcaattgatagaggtggcaaagatgcttacacgttttgcaacaaaccagctacttattgggttttggatccaattgatggcaccaggggatttcttaaaggagatgaggctttatatgtggtaggattggcccttgttgtagataatgaaattgtgctaggagtcatgggttgtccaaactggccaggagattcttcagatggatctactggaaccctaatgctctcgcatataggctgtggaacgtggaccaagaagttacaaaatgtctctggcaatgtagccggtgattggataaggtgtttcgttgatgcttgtgttttaatgaacaaagcaagattttgtatacaagaaagccaaacctgggaatcacttcctctctctggtttcttcgacgcaagtactgtttcagaggacttaaaacataaagagattcttcttttgcccacatgttgtggaagtttgtgcaagtatctgatggtagcttctggcagagcatcagtttttcttctccgagccaaaactcagagaacaataaagtcgtgggatcatgctgttgggatcatatgtgtacatgaagctggaggaaaggtaacagattgggaaggagatgaaataaatttggaggaagatcaatcagaaaggaggctcatttttccggcgggcggtgttgtagtaagcaacggaagtttacataatcagattcttgagatgatctcttctgcttcaccaactctttgatttatgacactactactctctatacacttgttaatgtttaccgttactatttatttatcataatccttttct

SEQ ID NO: 43376 - protein, 397 aa, Arabidopsis thaliana
  peptide (1)..(397): Ceres Seq. ID no. 12422297
  misc_feature (305)..(387): Homolog of NCBI NO: 2736075 NR Description: PAP-specific phosphatase; HAL2-like protein
  misc_feature (49)..(213): Homolog of NCBI NO: 2736075 NR Description: PAP-specific phosphatase; HAL2-like protein
  misc_feature (46)..(390): Homolog of NCBI NO: 15237567 NR Description: 3(2),5-bisphosphate nucleotidase
  misc_feature (46)..(393): Homolog of NCBI NO: 3913517 NR Description: 3'(2'),5'-BISPHOSPHATE NUCLEOTIDASE
  misc_feature (46)..(390): Homolog of NCBI NO: 15237589 NR Description: 3(2),5-bisphosphate nucleotidase (emb|CAB05889.1)
  misc_feature (37)..(212): Homolog of NCBI NO: 34394007 NR Description: putative 3(2),5-bisphosphate nucleotidase
  misc_feature (37)..(68): Homolog of NCBI NO: 34394008 NR Description: putative 3(2),5-bisphosphate nucleotidase
  misc_feature (101)..(392): Homolog of NCBI NO: 34394008 NR Description: putative 3(2),5-bisphosphate nucleotidase
  misc_feature (122)..(392): Homolog of NCBI NO: 34394007 NR Description: putative 3(2),5-bisphosphate nucleotidase
  misc_feature (1)..(397): Homolog of NCBI NO: 15234590 NR Description: 3(2),5-BISPHOSPHATE NUCLEOTIDASE -like protein
MYILDTGARFSAVRFSPVFNPPPTSLRRRYFIVRANLPFPKHQAKYHKELEVAIDAVDRACRLCVDVKRSLFSSKEKIVEKNDQTPVTIADFGVQALVSLELSKLFPSIPLVAEEDSHFVRANNLVSSVVSEVKSKASIGDNHLSDADVLEAIDRGGKDAYTFCNKPATYWVLDPIDGTRGFLKGDEALYVVGLALVVDNEIVLGVMGCPNWPGDSSDGSTGTLMLSHIGCGTWTKKLQNVSGNVAGDWIRCFVDACVLMNKARFCIQESQTWESLPLSGFFDASTVSEDLKHKEILLLPTCCGSLCKYLMVASGRASVFLLRAKTQRTIKSWDHAVGIICVHEAGGKVTDWEGDEINLEEDQSERRLIFPAGGVVVSNGSLHNQILEMISSASPTL

SEQ ID NO: 43377 - DNA, 625 bp, Arabidopsis thaliana
  misc_feature (1)..(625): Ceres Seq. ID no. 12396021
  misc_feature: MA Experiment ID: 108462 Result: Up-regulated in Transcription
  misc_feature: MA Experiment 108462 PARAMETER Experiment Name: At_Germinating_Seeds_cDNA_P Parameter: Age (day) Value: 2 vs. 0
  misc_feature: MA Experiment 108462 PARAMETER Experiment Name: At_Germinating_Seeds_cDNA_P Parameter: Tissue Value: Germinating Seeds
  misc_feature: MA Experiment ID: 108463 Result: Up-regulated in Transcription
  misc_feature: MA Experiment 108463 PARAMETER Experiment Name: At_Germinating_Seeds_cDNA_P Parameter: Age (day) Value: 3 vs. 0
  misc_feature: MA Experiment 108463 PARAMETER Experiment Name: At_Germinating_Seeds_cDNA_P Parameter: Tissue Value: Germinating Seeds
  misc_feature: MA Experiment ID: 108473 Result: Up-regulated in Transcription
  misc_feature: MA Experiment 108473 PARAMETER Experiment Name: At_Drought_Flowers_cDNA_P Parameter: Timepoint (hr) Value: 7 d
  misc_feature: MA Experiment 108473 PARAMETER Experiment Name: At_Drought_Flowers_cDNA_P Parameter: Tissue Value: Flower
  misc_feature: MA Experiment 108473 PARAMETER Experiment Name: At_Drought_Flowers_cDNA_P Parameter: Treatment Value: Drought vs. No Drought
  misc_feature: MA Experiment ID: 108488 Result: Down-regulated in Transcription
  misc_feature: MA Experiment ID: 108561 Result: Up-regulated in Transcription
  misc_feature: MA Experiment 108561 PARAMETER Experiment Name: At_100uM_ABA_cDNA_P Parameter: Timepoint (hr) Value: 6
  misc_feature: MA Experiment 108561 PARAMETER Experiment Name: At_100uM_ABA_cDNA_P Parameter: Tissue Value: Aerial
  misc_feature: MA Experiment 108561 PARAMETER Experiment Name: At_100uM_ABA_cDNA_P Parameter: Treatment Value: 100uM ABA vs. No Treatment
  misc_feature: MA Experiment ID: 108572 Result: Up-regulated in Transcription
  misc_feature: MA Experiment 108572 PARAMETER Experiment Name: At_Drought_cDNA_P Parameter: Timepoint (hr) Value: 1
  misc_feature: MA Experiment 108572 PARAMETER Experiment Name: At_Drought_cDNA_P Parameter: Tissue Value: Aerial
  misc_feature: MA Experiment 108572 PARAMETER Experiment Name: At_Drought_cDNA_P Parameter: Treatment Value: Drought vs. No Drought
  misc_feature: MA Experiment ID: 108576 Result: Up-regulated in Transcription
  misc_feature: MA Experiment 108576 PARAMETER Experiment Name: At_42deg_Heat_cDNA_P Parameter: Temperature (deg C) Value: 42 vs. 22
  misc_feature: MA Experiment 108576 PARAMETER Experiment Name: At_42deg_Heat_cDNA_P Parameter: Timepoint (hr) Value: 1
  misc_feature: MA Experiment 108576 PARAMETER Experiment Name: At_42deg_Heat_cDNA_P Parameter: Tissue Value: Aerial
  misc_feature: MA Experiment ID: 108577 Result: Up-regulated in Transcription
  misc_feature: MA Experiment 108577 PARAMETER Experiment Name: At_42deg_Heat_cDNA_P Parameter: Temperature (deg C) Value: 42 vs. 22
  misc_feature: MA Experiment 108577 PARAMETER Experiment Name: At_42deg_Heat_cDNA_P Parameter: Timepoint (hr) Value: 6
  misc_feature: MA Experiment 108577 PARAMETER Experiment Name: At_42deg_Heat_cDNA_P Parameter: Tissue Value: Aerial
  misc_feature: MA Experiment ID: 108594 Result: Down-regulated in Transcription
  misc_feature: MA Experiment 108594 PARAMETER Experiment Name: At_Ler-rhl_Root_cDNA_P Parameter: Plant Line Value: null
  misc_feature: MA Experiment ID: 108595 Result: Up-regulated in Transcription
  misc_feature: MA Experiment 108595 PARAMETER Experiment Name: At_Ler-pi_Ovule_cDNA_P Parameter: Plant Line Value: null
  misc_feature: MA Experiment ID: 108607 Result: Up-regulated in Transcription
  misc_feature: MA Experiment 108607 PARAMETER Experiment Name: At_100uM_ABA_cDNA_P Parameter: Timepoint (hr) Value: 4
  misc_feature: MA Experiment 108607 PARAMETER Experiment Name: At_100uM_ABA_cDNA_P Parameter: Tissue Value: Aerial
  misc_feature: MA Experiment 108607 PARAMETER Experiment Name: At_100uM_ABA_cDNA_P Parameter: Treatment Value: 100uM ABA vs. No Treatment
  misc_feature: MA Experiment ID: 108608 Result: Up-regulated in Transcription
  misc_feature: MA Experiment 108608 PARAMETER Experiment Name: At_100uM_ABA_cDNA_P Parameter: Timepoint (hr) Value: 1
  misc_feature: MA Experiment 108608 PARAMETER Experiment Name: At_100uM_ABA_cDNA_P Parameter: Tissue Value: Aerial
  misc_feature: MA Experiment 108608 PARAMETER Experiment Name: At_100uM_ABA_cDNA_P Parameter: Treatment Value: 100uM ABA vs. No Treatment
  misc_feature: MA Experiment ID: 108609 Result: Up-regulated in Transcription
  misc_feature: MA Experiment 108609 PARAMETER Experiment Name: At_100uM_ABA_cDNA_P Parameter: Timepoint (hr) Value: 24
  misc_feature: MA Experiment 108609 PARAMETER Experiment Name: At_100uM_ABA_cDNA_P Parameter: Tissue Value: Aerial
  misc_feature: MA Experiment 108609 PARAMETER Experiment Name: At_100uM_ABA_cDNA_P Parameter: Treatment Value: 100uM ABA vs. No Treatment
  misc_feature: MA Experiment ID: 108668 Result: Up-regulated in Transcription
  misc_feature: MA Experiment 108668 PARAMETER Experiment Name: At_2mM_SA_cDNA_P Parameter: Plant Line Value: WS
  misc_feature: MA Experiment 108668 PARAMETER Experiment Name: At_2mM_SA_cDNA_P Parameter: Timepoint (hr) Value: 6
  misc_feature: MA Experiment 108668 PARAMETER Experiment Name: At_2mM_SA_cDNA_P Parameter: Treatment Value: 2mM SA vs. No Treatment
  misc_feature: MA Experiment ID: 20000070 Result: Up-regulated in Transcription
  misc_feature: MA Experiment 20000070 PARAMETER Experiment Name: At_100uM_ABA_Mutants_cDNA_P Parameter: Plant Line Value: CS24
  misc_feature: MA Experiment 20000070 PARAMETER Experiment Name: At_100uM_ABA_Mutants_cDNA_P Parameter: Timepoint (hr) Value: 6
  misc_feature: MA Experiment 20000070 PARAMETER Experiment Name: At_100uM_ABA_Mutants_cDNA_P Parameter: Tissue Value: Aerial
  misc_feature: MA Experiment 20000070 PARAMETER Experiment Name: At_100uM_ABA_Mutants_cDNA_P Parameter: Treatment Value: 100uM ABA vs. No Treatment
  misc_feature: MA Experiment ID: 20000087 Result: Up-regulated in Transcription
  misc_feature: MA Experiment 20000087 PARAMETER Experiment Name: At_100uM_ABA_Mutants_cDNA_P Parameter: Plant Line Value: WS
  misc_feature: MA Experiment 20000087 PARAMETER Experiment Name: At_100uM_ABA_Mutants_cDNA_P Parameter: Timepoint (hr) Value: 6
  misc_feature: MA Experiment 20000087 PARAMETER Experiment Name: At_100uM_ABA_Mutants_cDNA_P Parameter: Tissue Value: Aerial
  misc_feature: MA Experiment 20000087 PARAMETER Experiment Name: At_100uM_ABA_Mutants_cDNA_P Parameter: Treatment Value: 100uM ABA vs. No Treatment
  misc_feature: MA Experiment ID: 20000089 Result: Up-regulated in Transcription
  misc_feature: MA Experiment ID: 20000093 Result: Up-regulated in Transcription
  misc_feature: MA Experiment 20000093 PARAMETER Experiment Name: At_42deg_Heat_cDNA_P Parameter: Temperature (deg C) Value: 42 vs. 22
  misc_feature: MA Experiment 20000093 PARAMETER Experiment Name: At_42deg_Heat_cDNA_P Parameter: Timepoint (hr) Value: 0.5
  misc_feature: MA Experiment 20000093 PARAMETER Experiment Name: At_42deg_Heat_cDNA_P Parameter: Tissue Value: Aerial
  misc_feature: MA Experiment ID: 20000117 Result: Up-regulated in Transcription
  misc_feature: MA Experiment 20000117 PARAMETER Experiment Name: At_100uM_ABA_Mutants_cDNA_P Parameter: Plant Line Value: Columbia
  misc_feature: MA Experiment 20000117 PARAMETER Experiment Name: At_100uM_ABA_Mutants_cDNA_P Parameter: Timepoint (hr) Value: 6
  misc_feature: MA Experiment 20000117 PARAMETER Experiment Name: At_100uM_ABA_Mutants_cDNA_P Parameter: Tissue Value: Aerial
  misc_feature: MA Experiment 20000117 PARAMETER Experiment Name: At_100uM_ABA_Mutants_cDNA_P Parameter: Treatment Value: 100uM ABA vs. No Treatment
  misc_feature: MA Experiment ID: 20000166 Result: Up-regulated in Transcription
  misc_feature: MA Experiment 20000166 PARAMETER Experiment Name: At_100uM_ABA_P Parameter: Age (day) Value: 14
  misc_feature: MA Experiment 20000166 PARAMETER Experiment Name: At_100uM_ABA_P Parameter: Organism Value: A. thaliana
  misc_feature: MA Experiment 20000166 PARAMETER Experiment Name: At_100uM_ABA_P Parameter: Plant Line Value: WS
  misc_feature: MA Experiment 20000166 PARAMETER Experiment Name: At_100uM_ABA_P Parameter: Timepoint (hr) Value: 1
  misc_feature: MA Experiment 20000166 PARAMETER Experiment Name: At_100uM_ABA_P Parameter: Tissue Value: Aerial
  misc_feature: MA Experiment 20000166 PARAMETER Experiment Name: At_100uM_ABA_P Parameter: Treatment Value: 100uM ABA vs. No Treatment
  misc_feature: MA Experiment ID: 20000171 Result: Up-regulated in Transcription
  misc_feature: MA Experiment 20000171 PARAMETER Experiment Name: At_42deg_Heat_P Parameter: Age (day) Value: 14
  misc_feature: MA Experiment 20000171 PARAMETER Experiment Name: At_42deg_Heat_P Parameter: Organism Value: A. thaliana
  misc_feature: MA Experiment 20000171 PARAMETER Experiment Name: At_42deg_Heat_P Parameter: Plant Line Value: WS
  misc_feature: MA Experiment 20000171 PARAMETER Experiment Name: At_42deg_Heat_P Parameter: Temperature (deg C) Value: 42 vs. 22
  misc_feature: MA Experiment 20000171 PARAMETER Experiment Name: At_42deg_Heat_P Parameter: Timepoint (hr) Value: 1
  misc_feature: MA Experiment 20000171 PARAMETER Experiment Name: At_42deg_Heat_P Parameter: Tissue Value: Aerial
  misc_feature: MA Experiment ID: 20000173 Result: Up-regulated in Transcription
  misc_feature: MA Experiment 20000173 PARAMETER Experiment Name: At_42deg_Heat_P Parameter: Age (day) Value: 14
  misc_feature: MA Experiment 20000173 PARAMETER Experiment Name: At_42deg_Heat_P Parameter: Organism Value: A. thaliana
  misc_feature: MA Experiment 20000173 PARAMETER Experiment Name: At_42deg_Heat_P Parameter: Plant Line Value: WS
  misc_feature: MA Experiment 20000173 PARAMETER Experiment Name: At_42deg_Heat_P Parameter: Temperature (deg C) Value: 42 vs. 22
  misc_feature: MA Experiment 20000173 PARAMETER Experiment Name: At_42deg_Heat_P Parameter: Timepoint (hr) Value: 6
  misc_feature: MA Experiment 20000173 PARAMETER Experiment Name: At_42deg_Heat_P Parameter: Tissue Value: Aerial
  misc_feature: MA Experiment ID: 20000179 Result: Up-regulated in Transcription
  misc_feature: MA Experiment 20000179 PARAMETER Experiment Name: At_Germinating_Seeds_P Parameter: Age (hr) Value: 6 vs. 0
  misc_feature: MA Experiment 20000179 PARAMETER Experiment Name: At_Germinating_Seeds_P Parameter: Tissue Value: Germinating Seeds
  misc_feature: MA Experiment ID: 20000180 Result: Up-regulated in Transcription
  misc_feature: MA Experiment 20000180 PARAMETER Experiment Name: At_Germinating_Seeds_P Parameter: Age (hr) Value: 24 vs. 0
  misc_feature: MA Experiment 20000180 PARAMETER Experiment Name: At_Germinating_Seeds_P Parameter: Tissue Value: Germinating Seeds
  misc_feature: MA Experiment ID: 20000182 Result: Up-regulated in Transcription
  misc_feature: MA Experiment 20000182 PARAMETER Experiment Name: At_2mM_SA_P Parameter: Age (day) Value: 14
  misc_feature: MA Experiment 20000182 PARAMETER Experiment Name: At_2mM_SA_P Parameter: Organism Value: A. thaliana
  misc_feature: MA Experiment 20000182 PARAMETER Experiment Name: At_2mM_SA_P Parameter: Plant Line Value: WS
  misc_feature: MA Experiment 20000182 PARAMETER Experiment Name: At_2mM_SA_P Parameter: Timepoint (hr) Value: 6
  misc_feature: MA Experiment 20000182 PARAMETER Experiment Name: At_2mM_SA_P Parameter: Tissue Value: Aerial
  misc_feature: MA Experiment 20000182 PARAMETER Experiment Name: At_2mM_SA_P Parameter: Treatment Value: 2mM SA vs. No Treatment
  misc_feature: MA Experiment ID: 20000224 Result: Up-regulated in Transcription
  misc_feature: MA Experiment ID: 20000264 Result: Down-regulated in Transcription
  misc_feature: MA Experiment 20000264 PARAMETER Experiment Name: At_Open_Flower_P Parameter: Age (day) Value: 21
  misc_feature: MA Experiment 20000264 PARAMETER Experiment Name: At_Open_Flower_P Parameter: Plant Line Value: WS
  misc_feature: MA Experiment 20000264 PARAMETER Experiment Name: At_Open_Flower_P Parameter: Tissue Value: Open Flower vs. Whole Plant
  misc_feature: MA Experiment ID: 20000265 Result: Down-regulated in Transcription
  misc_feature: MA Experiment 20000265 PARAMETER Experiment Name: At_Open_Flower_P Parameter: Age (day) Value: 21
  misc_feature: MA Experiment 20000265 PARAMETER Experiment Name: At_Open_Flower_P Parameter: Plant Line Value: WS
  misc_feature: MA Experiment 20000265 PARAMETER Experiment Name: At_Open_Flower_P Parameter: Tissue Value: Closed Flower vs. Whole Plant
  misc_feature: MA Experiment ID: 20000286 Result: Down-regulated in Transcription
  misc_feature: MA Experiment 20000286 PARAMETER Experiment Name: At_Open_Flower_P Parameter: Age (day) Value: 21
  misc_feature: MA Experiment 20000286 PARAMETER Experiment Name: At_Open_Flower_P Parameter: Plant Line Value: WS
  misc_feature: MA Experiment 20000286 PARAMETER Experiment Name: At_Open_Flower_P Parameter: Tissue Value: Half Open vs. Whole Plant
  misc_feature: MA Experiment ID: 20000436 Result: Up-regulated in Transcription
  misc_feature: MA Experiment 20000436 PARAMETER Experiment Name: At_Drought_P Parameter: Age (day) Value: 7
  misc_feature: MA Experiment 20000436 PARAMETER Experiment Name: At_Drought_P Parameter: Organism Value: A. thaliana
  misc_feature: MA Experiment 20000436 PARAMETER Experiment Name: At_Drought_P Parameter: Plant Line Value: WS
  misc_feature: MA Experiment 20000436 PARAMETER Experiment Name: At_Drought_P Parameter: Timepoint (hr) Value: 12
  misc_feature: MA Experiment 20000436 PARAMETER Experiment Name: At_Drought_P Parameter: Tissue Value: Whole Plant
  misc_feature: MA Experiment 20000436 PARAMETER Experiment Name: At_Drought_P Parameter: Treatment Value: Drought vs. No Drought
  misc_feature: MA Experiment ID: 20000437 Result: Up-regulated in Transcription
  misc_feature: MA Experiment 20000437 PARAMETER Experiment Name: At_Drought_P Parameter: Age (day) Value: 8
  misc_feature: MA Experiment 20000437 PARAMETER Experiment Name: At_Drought_P Parameter: Organism Value: A. thaliana
  misc_feature: MA Experiment 20000437 PARAMETER Experiment Name: At_Drought_P Parameter: Plant Line Value: WS
  misc_feature: MA Experiment 20000437 PARAMETER Experiment Name: At_Drought_P Parameter: Timepoint (hr) Value: 24
  misc_feature: MA Experiment 20000437 PARAMETER Experiment Name: At_Drought_P Parameter: Tissue Value: Whole Plant
  misc_feature: MA Experiment 20000437 PARAMETER Experiment Name: At_Drought_P Parameter: Treatment Value: Drought vs. No Drought
  misc_feature: MA Experiment ID: 20000441 Result: Up-regulated in Transcription
  misc_feature: MA Experiment 20000441 PARAMETER Experiment Name: At_1uM_BR-BRZ__P Parameter: Tissue Value: Shoot Apices
  misc_feature: MA Experiment 20000441 PARAMETER Experiment Name: At_1uM_BR-BRZ__P Parameter: Treatment Value: 1uM BR vs. No Treatment
  misc_feature: MA Experiment ID: 20000443 Result: Up-regulated in Transcription
  misc_feature: MA Experiment 20000443 PARAMETER Experiment Name: At_1uM_BR-BRZ__P Parameter: Tissue Value: Shoot Apices
  misc_feature: MA Experiment 20000443 PARAMETER Experiment Name: At_1uM_BR-BRZ__P Parameter: Treatment Value: 1uM BRZ vs. No Treatment
  misc_feature: MA Experiment ID: 20000453 Result: Up-regulated in Transcription
  misc_feature: MA Experiment 20000453 PARAMETER Experiment Name: At_100uM_ABA_P Parameter: Age (day) Value: 15
  misc_feature: MA Experiment 20000453 PARAMETER Experiment Name: At_100uM_ABA_P Parameter: Organism Value: A. thaliana
  misc_feature: MA Experiment 20000453 PARAMETER Experiment Name: At_100uM_ABA_P Parameter: Plant Line Value: WS
  misc_feature: MA Experiment 20000453 PARAMETER Experiment Name: At_100uM_ABA_P Parameter: Timepoint (hr) Value: 24
  misc_feature: MA Experiment 20000453 PARAMETER Experiment Name: At_100uM_ABA_P Parameter: Tissue Value: Aerial
  misc_feature: MA Experiment 20000453 PARAMETER Experiment Name: At_100uM_ABA_P Parameter: Treatment Value: 100uM ABA vs. No Treatment
  misc_feature: MA Experiment ID: 20000709 Result: Up-regulated in Transcription
  misc_feature: MA Experiment 20000709 PARAMETER Experiment Name: At_15mM_NH4NO3_L-to-H_P Parameter: Age (hr) Value: 14
  misc_feature: MA Experiment 20000709 PARAMETER Experiment Name: At_15mM_NH4NO3_L-to-H_P Parameter: Organism Value: A. thaliana
  misc_feature: MA Experiment 20000709 PARAMETER Experiment Name: At_15mM_NH4NO3_L-to-H_P Parameter: Plant Line Value: WS
  misc_feature: MA Experiment 20000709 PARAMETER Experiment Name: At_15mM_NH4NO3_L-to-H_P Parameter: Timepoint (hr) Value: 4
  misc_feature: MA Experiment 20000709 PARAMETER Experiment Name: At_15mM_NH4NO3_L-to-H_P Parameter: Tissue Value: Aerial
  misc_feature: MA Experiment 20000709 PARAMETER Experiment Name: At_15mM_NH4NO3_L-to-H_P Parameter: Treatment Value: 15mM NH4NO3 vs. 30mM Mannitol
  misc_feature: MA Experiment ID: 20001247 Result: Down-regulated in Transcription
  misc_feature: MA Experiment 20001247 PARAMETER Experiment Name: At_Far-red-induction_P Parameter: Age (day) Value: 7
  misc_feature: MA Experiment 20001247 PARAMETER Experiment Name: At_Far-red-induction_P Parameter: Light Value: Far-red vs. White
  misc_feature: MA Experiment 20001247 PARAMETER Experiment Name: At_Far-red-induction_P Parameter: Organism Value: A. thaliana
  misc_feature: MA Experiment 20001247 PARAMETER Experiment Name: At_Far-red-induction_P Parameter: Plant Line Value: Columbia
  misc_feature: MA Experiment 20001247 PARAMETER Experiment Name: At_Far-red-induction_P Parameter: Timepoint (hr) Value: 1
  misc_feature: MA Experiment 20001247 PARAMETER Experiment Name: At_Far-red-induction_P Parameter: Tissue Value: Whole Plant
  misc_feature: MA Experiment ID: 20001248 Result: Down-regulated in Transcription
  misc_feature: MA Experiment 20001248 PARAMETER Experiment Name: At_Far-red-induction_P Parameter: Age (day) Value: 7
  misc_feature: MA Experiment 20001248 PARAMETER Experiment Name: At_Far-red-induction_P Parameter: Light Value: Far-red vs. White
  misc_feature: MA Experiment 20001248 PARAMETER Experiment Name: At_Far-red-induction_P Parameter: Organism Value: A. thaliana
  misc_feature: MA Experiment 20001248 PARAMETER Experiment Name: At_Far-red-induction_P Parameter: Plant Line Value: Columbia
  misc_feature: MA Experiment 20001248 PARAMETER Experiment Name: At_Far-red-induction_P Parameter: Timepoint (hr) Value: 4
  misc_feature: MA Experiment 20001248 PARAMETER Experiment Name: At_Far-red-induction_P Parameter: Tissue Value: Whole Plant
  misc_feature: MA Experiment ID: 20001450 Result: Down-regulated in Transcription
  misc_feature: MA Experiment 20001450 PARAMETER Experiment Name: At_Far-red-induction_P Parameter: Age (day) Value: 7
  misc_feature: MA Experiment 20001450 PARAMETER Experiment Name: At_Far-red-induction_P Parameter: Light Value: Far-red vs. White
  misc_feature: MA Experiment 20001450 PARAMETER Experiment Name: At_Far-red-induction_P Parameter: Organism Value: A. thaliana
  misc_feature: MA Experiment 20001450 PARAMETER Experiment Name: At_Far-red-induction_P Parameter: Plant Line Value: Columbia
  misc_feature: MA Experiment 20001450 PARAMETER Experiment Name: At_Far-red-induction_P Parameter: Timepoint (hr) Value: 8
  misc_feature: MA Experiment 20001450 PARAMETER Experiment Name: At_Far-red-induction_P Parameter: Tissue Value: Whole Plant
  misc_feature: MA Experiment ID: 20001554 Result: Up-regulated in Transcription
  misc_feature: MA Experiment 20001554 PARAMETER Experiment Name: At_Drought_Soil_Dry_P Parameter: Age (day) Value: 21
  misc_feature: MA Experiment 20001554 PARAMETER Experiment Name: At_Drought_Soil_Dry_P Parameter: Organism Value: A. thaliana
  misc_feature: MA Experiment 20001554 PARAMETER Experiment Name: At_Drought_Soil_Dry_P Parameter: Plant Line Value: WS
  misc_feature: MA Experiment 20001554 PARAMETER Experiment Name: At_Drought_Soil_Dry_P Parameter: Post Timepoint (hr) Value: None
  misc_feature: MA Experiment 20001554 PARAMETER Experiment Name: At_Drought_Soil_Dry_P Parameter: Post-Treatment Value: None
  misc_feature: MA Experiment 20001554 PARAMETER Experiment Name: At_Drought_Soil_Dry_P Parameter: Timepoint (day) Value: 7
  misc_feature: MA Experiment 20001554 PARAMETER Experiment Name: At_Drought_Soil_Dry_P Parameter: Treatment Value: Drought vs. No Drought
  misc_feature: MA Experiment ID: 20001555 Result: Up-regulated in Transcription
  misc_feature: MA Experiment 20001555 PARAMETER Experiment Name: At_Drought_Soil_Dry_P Parameter: Age (day) Value: 24
  misc_feature: MA Experiment 20001555 PARAMETER Experiment Name: At_Drought_Soil_Dry_P Parameter: Organism Value: A. thaliana
  misc_feature: MA Experiment 20001555 PARAMETER Experiment Name: At_Drought_Soil_Dry_P Parameter: Plant Line Value: WS
  misc_feature: MA Experiment 20001555 PARAMETER Experiment Name: At_Drought_Soil_Dry_P Parameter: Post Timepoint (hr) Value: None
  misc_feature: MA Experiment 20001555 PARAMETER Experiment Name: At_Drought_Soil_Dry_P Parameter: Post-Treatment Value: None
  misc_feature: MA Experiment 20001555 PARAMETER Experiment Name: At_Drought_Soil_Dry_P Parameter: Timepoint (day) Value: 10
  misc_feature: MA Experiment 20001555 PARAMETER Experiment Name: At_Drought_Soil_Dry_P Parameter: Treatment Value: Drought vs. No Drought
  misc_feature: MA Experiment ID: 20001772 Result: Down-regulated in Transcription
  misc_feature: MA Experiment 20001772 PARAMETER Experiment Name: At_Far-red-enriched-adult_P Parameter: Age (day) Value: 29
  misc_feature: MA Experiment 20001772 PARAMETER Experiment Name: At_Far-red-enriched-adult_P Parameter: Light Value: Far-red enriched vs. White
  misc_feature: MA Experiment 20001772 PARAMETER Experiment Name: At_Far-red-enriched-adult_P Parameter: Organism Value: A. thaliana
  misc_feature: MA Experiment 20001772 PARAMETER Experiment Name: At_Far-red-enriched-adult_P Parameter: Plant Line Value: Columbia
  misc_feature: MA Experiment 20001772 PARAMETER Experiment Name: At_Far-red-enriched-adult_P Parameter: Timepoint (hr) Value: 24
  misc_feature: MA Experiment 20001772 PARAMETER Experiment Name: At_Far-red-enriched-adult_P Parameter: Tissue Value: Aerial
  misc_feature: MA Experiment ID: 20001905 Result: Up-regulated in Transcription
  misc_feature: MA Experiment 20001905 PARAMETER Experiment Name: At_Drought_Reproduction_P Parameter: Age (day) Value: 40
  misc_feature: MA Experiment 20001905 PARAMETER Experiment Name: At_Drought_Reproduction_P Parameter: Organism Value: A. thaliana
  misc_feature: MA Experiment 20001905 PARAMETER Experiment Name: At_Drought_Reproduction_P Parameter: Plant Line Value: WS
  misc_feature: MA Experiment 20001905 PARAMETER Experiment Name: At_Drought_Reproduction_P Parameter: Timepoint (day) Value: 10
  misc_feature: MA Experiment 20001905 PARAMETER Experiment Name: At_Drought_Reproduction_P Parameter: Tissue Value: Rosettes
  misc_feature: MA Experiment 20001905 PARAMETER Experiment Name: At_Drought_Reproduction_P Parameter: Treatment Value: Drought vs. No Drought
  misc_feature: MA Experiment ID: 20001906 Result: Up-regulated in Transcription
  misc_feature: MA Experiment 20001906 PARAMETER Experiment Name: At_Drought_Reproduction_P Parameter: Age (day) Value: 35
  misc_feature: MA Experiment 20001906 PARAMETER Experiment Name: At_Drought_Reproduction_P Parameter: Organism Value: A. thaliana
  misc_feature: MA Experiment 20001906 PARAMETER Experiment Name: At_Drought_Reproduction_P Parameter: Plant Line Value: WS
  misc_feature: MA Experiment 20001906 PARAMETER Experiment Name: At_Drought_Reproduction_P Parameter: Timepoint (day) Value: 5
  misc_feature: MA Experiment 20001906 PARAMETER Experiment Name: At_Drought_Reproduction_P Parameter: Tissue Value: Siliques
  misc_feature: MA Experiment 20001906 PARAMETER Experiment Name: At_Drought_Reproduction_P Parameter: Treatment Value: Drought vs. No Drought
  misc_feature: MA Experiment ID: 20001908 Result: Up-regulated in Transcription
  misc_feature: MA Experiment 20001908 PARAMETER Experiment Name: At_Drought_Reproduction_P Parameter: Age (day) Value: 40
  misc_feature: MA Experiment 20001908 PARAMETER Experiment Name: At_Drought_Reproduction_P Parameter: Organism Value: A. thaliana
  misc_feature: MA Experiment 20001908 PARAMETER Experiment Name: At_Drought_Reproduction_P Parameter: Plant Line Value: WS
  misc_feature: MA Experiment 20001908 PARAMETER Experiment Name: At_Drought_Reproduction_P Parameter: Timepoint (day) Value: 10
  misc_feature: MA Experiment 20001908 PARAMETER Experiment Name: At_Drought_Reproduction_P Parameter: Tissue Value: Siliques
  misc_feature: MA Experiment 20001908 PARAMETER Experiment Name: At_Drought_Reproduction_P Parameter: Treatment Value: Drought vs. No Drought
  misc_feature: MA Experiment ID: 20001911 Result: Up-regulated in Transcription
  misc_feature: MA Experiment 20001911 PARAMETER Experiment Name: At_Drought_Reproduction_P Parameter: Age (day) Value: 40
  misc_feature: MA Experiment 20001911 PARAMETER Experiment Name: At_Drought_Reproduction_P Parameter: Organism Value: A. thaliana
  misc_feature: MA Experiment 20001911 PARAMETER Experiment Name: At_Drought_Reproduction_P Parameter: Plant Line Value: WS
  misc_feature: MA Experiment 20001911 PARAMETER Experiment Name: At_Drought_Reproduction_P Parameter: Timepoint (day) Value: 10
  misc_feature: MA Experiment 20001911 PARAMETER Experiment Name: At_Drought_Reproduction_P Parameter: Tissue Value: Flowers
  misc_feature: MA Experiment 20001911 PARAMETER Experiment Name: At_Drought_Reproduction_P Parameter: Treatment Value: Drought vs. No Drought
atcttcatcgtttctcaatttcaaaactcagattaataaaattttcgcgttgttcctttctctcaattcatcgacgatgccgagcagatacccagaagcagtaacacaagactgggaaccagtagttctccacaaatcaaaacaaaagagccaagacctacgcgatccgaaagcggttaacgcagctctgagaaacggtgtcgcggttcaaacggttaagaaattcgatgccggttcgaacaaaaaggggaaatctacggcggttccggtgattaacacgaagaagctggaagaagaaacagagcctgcggcgatggatcgtgtgaaagcagaggtgaggttgatgatacagaaagcgagattggagaagaagatgtcacaagcggatttggcgaaacagatcaatgagaggactcaggtagttcaggaatatgagaatggtaaagctgttcctaatcaggctgtgcttgcgaagatggagaaggttctaggtgttaaacttaggggtaaaattgggaaatgattaaacgatgtcgtttatcttgtattttgttgaccaatgtaaaaagtaaaaaaaaagtcttgttgttttgtttgataaatgaaaaaacaatatatatctttt

SEQ ID NO: 43378 - protein, 173 aa, Arabidopsis thaliana
  peptide (1)..(173): Ceres Seq. ID no. 12396022
  misc_feature (116)..(170): Pfam Name: Helix-turn-helix Pfam Description: Helix-turn-helix
  misc_feature (34)..(170): Homolog of NCBI NO: 20086364 NR Description: putative multiprotein bridging factor 1
  misc_feature (34)..(170): Homolog of NCBI NO: 8895787 NR Description: multiprotein bridging factor 1 [Solanum tuberosum]
  misc_feature (34)..(170): Homolog of NCBI NO: 18406032 NR Description: expressed protein
  misc_feature (34)..(170): Homolog of NCBI NO: 38637102 NR Description: putative ethylene-responsive transcriptional
  misc_feature (34)..(170): Homolog of NCBI NO: 7488897 NR Description: hypothetical protein - castor bean
  misc_feature (34)..(170): Homolog of NCBI NO: 15231105 NR Description: transcriptional coactivator - like protein
  misc_feature (26)..(173): Homolog of NCBI NO: 5669634 NR Description: ethylene-responsive transcriptional coactivator
  misc_feature (26)..(173): Homolog of NCBI NO: 19225065 NR Description: ethylene-responsive transciptional
  misc_feature (26)..(173): Homolog of NCBI NO: 15230125 NR Description: ethylene-responsive transcriptional coactivator,
  misc_feature (26)..(173): Homolog of NCBI NO: 21553721 NR Description: ethylene-responsive transcriptional coactivator,
SSSFLNFKTQINKIFALFLSLNSSTMPSRYPEAVTQDWEPVVLHKSKQKSQDLRDPKAVNAALRNGVAVQTVKKFDAGSNKKGKSTAVPVINTKKLEEETEPAAMDRVKAEVRLMIQKARLEKKMSQADLAKQINERTQVVQEYENGKAVPNQAVLAKMEKVLGVKLRGKIGK

SEQ ID NO: 43379 - protein, 148 aa, Arabidopsis thaliana
  peptide (1)..(148): Ceres Seq. ID no. 12396023
  misc_feature (91)..(145): Pfam Name: Helix-turn-helix Pfam Description: Helix-turn-helix
  misc_feature (9)..(145): Homolog of NCBI NO: 20086364 NR Description: putative multiprotein bridging factor 1
  misc_feature (9)..(145): Homolog of NCBI NO: 8895787 NR Description: multiprotein bridging factor 1 [Solanum tuberosum]
  misc_feature (9)..(145): Homolog of NCBI NO: 18406032 NR Description: expressed protein
  misc_feature (9)..(145): Homolog of NCBI NO: 38637102 NR Description: putative ethylene-responsive transcriptional
  misc_feature (9)..(145): Homolog of NCBI NO: 7488897 NR Description: hypothetical protein - castor bean
  misc_feature (9)..(145): Homolog of NCBI NO: 15231105 NR Description: transcriptional coactivator - like protein
  misc_feature (1)..(148): Homolog of NCBI NO: 5669634 NR Description: ethylene-responsive transcriptional coactivator
  misc_feature (1)..(148): Homolog of NCBI NO: 19225065 NR Description: ethylene-responsive transciptional
  misc_feature (1)..(148): Homolog of NCBI NO: 15230125 NR Description: ethylene-responsive transcriptional coactivator,
  misc_feature (1)..(148): Homolog of NCBI NO: 21553721 NR Description: ethylene-responsive transcriptional coactivator,
MPSRYPEAVTQDWEPVVLHKSKQKSQDLRDPKAVNAALRNGVAVQTVKKFDAGSNKKGKSTAVPVINTKKLEEETEPAAMDRVKAEVRLMIQKARLEKKMSQADLAKQINERTQVVQEYENGKAVPNQAVLAKMEKVLGVKLRGKIGK

SEQ ID NO: 43380 - DNA, 627 bp, Arabidopsis thaliana
  misc_feature (1)..(627): Ceres Seq. ID no. 13592805
  misc_feature: MA Experiment ID: 20000185 Result: Up-regulated in Transcription
  misc_feature: MA Experiment 20000185 PARAMETER Experiment Name: At_Roots__P Parameter: Age (day) Value: 7 vs. 21
  misc_feature: MA Experiment 20000185 PARAMETER Experiment Name: At_Roots__P Parameter: Organism Value: A. thaliana
  misc_feature: MA Experiment 20000185 PARAMETER Experiment Name: At_Roots__P Parameter: Tissue Value: Roots vs. Whole Plant
  misc_feature: MA Experiment ID: 20001451 Result: Down-regulated in Transcription
  misc_feature: MA Experiment 20001451 PARAMETER Experiment Name: At_Far-red-induction_P Parameter: Age (day) Value: 7
  misc_feature: MA Experiment 20001451 PARAMETER Experiment Name: At_Far-red-induction_P Parameter: Light Value: Far-red vs. White
  misc_feature: MA Experiment 20001451 PARAMETER Experiment Name: At_Far-red-induction_P Parameter: Organism Value: A. thaliana
  misc_feature: MA Experiment 20001451 PARAMETER Experiment Name: At_Far-red-induction_P Parameter: Plant Line Value: Columbia
  misc_feature: MA Experiment 20001451 PARAMETER Experiment Name: At_Far-red-induction_P Parameter: Timepoint (hr) Value: 24
  misc_feature: MA Experiment 20001451 PARAMETER Experiment Name: At_Far-red-induction_P Parameter: Tissue Value: Whole Plant
tctctctcgaatctctctctataatccgatctgagaaatttcgccggagctaggttttgttgtttaccgatcaatcctttaatttgactcatatgagattgaaggtggggaaacaaagggagaaatattgcagaatctggccgagttccaattctcttgtgtgatgttcaatgcggttctggagaatgcatgtagtgagatgggagcaagaatgtctgccatggacagctcaagcagaaacgcaggagaaatgctcgaccgtctcaccctcacatacaacaggactcgtcaagcttctattacaacagagcttattgagattatctctggagcttctgctcttgaagctgctaaataagcccatccgtgttagttctcttttcttcgctttgatatttacccccaccttgaaggagaagaatgtgttaaaattttactgaatcagtttcctttgctggcttcttgttgagacctaccaatgtttgctcaacgatttttaataaacatacctgtaatttccagcaggatttcgaataattgcattaacattttgttctgattcagactcgcttcctccagagtctgtagtgttgttttgtgcaaacaccatgtactccggtttatttg

SEQ ID NO: 43381 - protein, 89 aa, Arabidopsis thaliana
  peptide (1)..(89): Ceres Seq. ID no. 13592806
MRFWRMHVVRWEQECLPWTAQAETQEKCSTVSPSHTTGLVKLLLQQSLLRLSLELLLLKLLNKPIRVSSLFFALIFTPTLKEKNVLKFY

SEQ ID NO: 43382 - protein, 84 aa, Arabidopsis thaliana
  peptide (1)..(84): Ceres Seq. ID no. 13592807
MHVVRWEQECLPWTAQAETQEKCSTVSPSHTTGLVKLLLQQSLLRLSLELLLLKLLNKPIRVSSLFFALIFTPTLKEKNVLKFY

SEQ ID NO: 43383 - protein, 64 aa, Arabidopsis thaliana
  peptide (1)..(64): Ceres Seq. ID no. 13592808
  misc_feature (1)..(60): Pfam Name: ATP synthase Pfam Description: ATP synthase
  misc_feature (1)..(60): Homolog of NCBI NO: 15889878 NR Description: AGR_C_4756p [Agrobacterium tumefaciens]
  misc_feature (1)..(60): Homolog of NCBI NO: 15966788 NR Description: PROBABLE ATP SYNTHASE GAMMA CHAIN PROTEIN
  misc_feature (1)..(64): Homolog of NCBI NO: 11466530 NR Description: ATP synthase F1 subunit alpha [Reclinomonas
  misc_feature (1)..(60): Homolog of NCBI NO: 13473457 NR Description: ATP synthase gamma subunit [Mesorhizobium loti]
  misc_feature (1)..(61): Homolog of NCBI NO: 7436157 NR Description: probable H+-transporting two-sector ATPase (EC
  misc_feature (1)..(61): Homolog of NCBI NO: 543867 NR Description: ATP synthase gamma chain, mitochondrial precursor
  misc_feature (1)..(61): Homolog of NCBI NO: 37532654 NR Description: putative ATP SYNTHASE GAMMA CHAIN, MITOCHONDRIAL
  misc_feature (1)..(64): Homolog of NCBI NO: 22530902 NR Description: mitochondrial F1-ATPase, gamma subunit
  misc_feature (1)..(64): Homolog of NCBI NO: 15227257 NR Description: mitochondrial F1-ATPase, gamma subunit
  misc_feature (1)..(64): Homolog of NCBI NO: 7436158 NR Description: probable H+-transporting two-sector ATPase (EC
MFNAVLENACSEMGARMSAMDSSSRNAGEMLDRLTLTYNRTRQASITTELIEIISGASALEAAK

SEQ ID NO: 43384 - DNA, 1819 bp, Arabidopsis thaliana
  misc_feature (1)..(1819): Ceres Seq. ID no. 12370303
  misc_feature: MA Experiment ID: 108573 Result: Up-regulated in Transcription
  misc_feature: MA Experiment 108573 PARAMETER Experiment Name: At_Drought_cDNA_P Parameter: Timepoint (hr) Value: 6
  misc_feature: MA Experiment 108573 PARAMETER Experiment Name: At_Drought_cDNA_P Parameter: Tissue Value: Aerial
  misc_feature: MA Experiment 108573 PARAMETER Experiment Name: At_Drought_cDNA_P Parameter: Treatment Value: Drought vs. No Drought
  misc_feature: MA Experiment ID: 108585 Result: Up-regulated in Transcription
  misc_feature: MA Experiment 108585 PARAMETER Experiment Name: At_5mM_NaNP_cDNA_P Parameter: Timepoint (hr) Value: 6
  misc_feature: MA Experiment 108585 PARAMETER Experiment Name: At_5mM_NaNP_cDNA_P Parameter: Tissue Value: Aerial
  misc_feature: MA Experiment 108585 PARAMETER Experiment Name: At_5mM_NaNP_cDNA_P Parameter: Treatment Value: null
  misc_feature: MA Experiment ID: 108595 Result: Down-regulated in Transcription
  misc_feature: MA Experiment 108595 PARAMETER Experiment Name: At_Ler-pi_Ovule_cDNA_P Parameter: Plant Line Value: null
  misc_feature: MA Experiment ID: 20000227 Result: Up-regulated in Transcription
  misc_feature: MA Experiment 20000227 PARAMETER Experiment Name: At_Root-Tips-vs-Tops_P Parameter: Tissue Value: Root Tips vs. Root Tops
  misc_feature: MA Experiment ID: 20000436 Result: Up-regulated in Transcription
  misc_feature: MA Experiment 20000436 PARAMETER Experiment Name: At_Drought_P Parameter: Age (day) Value: 7
  misc_feature: MA Experiment 20000436 PARAMETER Experiment Name: At_Drought_P Parameter: Organism Value: A. thaliana
  misc_feature: MA Experiment 20000436 PARAMETER Experiment Name: At_Drought_P Parameter: Plant Line Value: WS
  misc_feature: MA Experiment 20000436 PARAMETER Experiment Name: At_Drought_P Parameter: Timepoint (hr) Value: 12
  misc_feature: MA Experiment 20000436 PARAMETER Experiment Name: At_Drought_P Parameter: Tissue Value: Whole Plant
  misc_feature: MA Experiment 20000436 PARAMETER Experiment Name: At_Drought_P Parameter: Treatment Value: Drought vs. No Drought
  misc_feature: MA Experiment ID: 20000437 Result: Up-regulated in Transcription
  misc_feature: MA Experiment 20000437 PARAMETER Experiment Name: At_Drought_P Parameter: Age (day) Value: 8
  misc_feature: MA Experiment 20000437 PARAMETER Experiment Name: At_Drought_P Parameter: Organism Value: A. thaliana
  misc_feature: MA Experiment 20000437 PARAMETER Experiment Name: At_Drought_P Parameter: Plant Line Value: WS
  misc_feature: MA Experiment 20000437 PARAMETER Experiment Name: At_Drought_P Parameter: Timepoint (hr) Value: 24
  misc_feature: MA Experiment 20000437 PARAMETER Experiment Name: At_Drought_P Parameter: Tissue Value: Whole Plant
  misc_feature: MA Experiment 20000437 PARAMETER Experiment Name: At_Drought_P Parameter: Treatment Value: Drought vs. No Drought
  misc_feature: MA Experiment ID: 20001557 Result: Up-regulated in Transcription
  misc_feature: MA Experiment 20001557 PARAMETER Experiment Name: At_Drought_Soil_Dry_P Parameter: Age (day) Value: 27
  misc_feature: MA Experiment 20001557 PARAMETER Experiment Name: At_Drought_Soil_Dry_P Parameter: Organism Value: A. thaliana
  misc_feature: MA Experiment 20001557 PARAMETER Experiment Name: At_Drought_Soil_Dry_P Parameter: Plant Line Value: WS
  misc_feature: MA Experiment 20001557 PARAMETER Experiment Name: At_Drought_Soil_Dry_P Parameter: Post Timepoint (hr) Value: 3
  misc_feature: MA Experiment 20001557 PARAMETER Experiment Name: At_Drought_Soil_Dry_P Parameter: Post-Treatment Value: Re-Water vs. No Drought
  misc_feature: MA Experiment 20001557 PARAMETER Experiment Name: At_Drought_Soil_Dry_P Parameter: Timepoint (day) Value: 13
  misc_feature: MA Experiment 20001557 PARAMETER Experiment Name: At_Drought_Soil_Dry_P Parameter: Treatment Value: Drought vs. No Drought
  misc_feature: MA Experiment ID: 20001560 Result: Up-regulated in Transcription
  misc_feature: MA Experiment 20001560 PARAMETER Experiment Name: At_Drought_Soil_Dry_P Parameter: Age (day) Value: 28
  misc_feature: MA Experiment 20001560 PARAMETER Experiment Name: At_Drought_Soil_Dry_P Parameter: Organism Value: A. thaliana
  misc_feature: MA Experiment 20001560 PARAMETER Experiment Name: At_Drought_Soil_Dry_P Parameter: Plant Line Value: WS
  misc_feature: MA Experiment 20001560 PARAMETER Experiment Name: At_Drought_Soil_Dry_P Parameter: Post Timepoint (hr) Value: None
  misc_feature: MA Experiment 20001560 PARAMETER Experiment Name: At_Drought_Soil_Dry_P Parameter: Post-Treatment Value: None
  misc_feature: MA Experiment 20001560 PARAMETER Experiment Name: At_Drought_Soil_Dry_P Parameter: Timepoint (day) Value: 14
  misc_feature: MA Experiment 20001560 PARAMETER Experiment Name: At_Drought_Soil_Dry_P Parameter: Treatment Value: Drought vs. No Drought
  misc_feature: MA Experiment ID: 20001904 Result: Up-regulated in Transcription
  misc_feature: MA Experiment 20001904 PARAMETER Experiment Name: At_Drought_Reproduction_P Parameter: Age (day) Value: 37
  misc_feature: MA Experiment 20001904 PARAMETER Experiment Name: At_Drought_Reproduction_P Parameter: Organism Value: A. thaliana
  misc_feature: MA Experiment 20001904 PARAMETER Experiment Name: At_Drought_Reproduction_P Parameter: Plant Line Value: WS
  misc_feature: MA Experiment 20001904 PARAMETER Experiment Name: At_Drought_Reproduction_P Parameter: Timepoint (day) Value: 7
  misc_feature: MA Experiment 20001904 PARAMETER Experiment Name: At_Drought_Reproduction_P Parameter: Tissue Value: Rosettes
  misc_feature: MA Experiment 20001904 PARAMETER Experiment Name: At_Drought_Reproduction_P Parameter: Treatment Value: Drought vs. No Drought
  misc_feature: MA Experiment ID: 20001905 Result: Up-regulated in Transcription
  misc_feature: MA Experiment 20001905 PARAMETER Experiment Name: At_Drought_Reproduction_P Parameter: Age (day) Value: 40
  misc_feature: MA Experiment 20001905 PARAMETER Experiment Name: At_Drought_Reproduction_P Parameter: Organism Value: A. thaliana
  misc_feature: MA Experiment 20001905 PARAMETER Experiment Name: At_Drought_Reproduction_P Parameter: Plant Line Value: WS
  misc_feature: MA Experiment 20001905 PARAMETER Experiment Name: At_Drought_Reproduction_P Parameter: Timepoint (day) Value: 10
  misc_feature: MA Experiment 20001905 PARAMETER Experiment Name: At_Drought_Reproduction_P Parameter: Tissue Value: Rosettes
  misc_feature: MA Experiment 20001905 PARAMETER Experiment Name: At_Drought_Reproduction_P Parameter: Treatment Value: Drought vs. No Drought
  misc_feature: MA Experiment ID: 20001911 Result: Up-regulated in Transcription
  misc_feature: MA Experiment 20001911 PARAMETER Experiment Name: At_Drought_Reproduction_P Parameter: Age (day) Value: 40
  misc_feature: MA Experiment 20001911 PARAMETER Experiment Name: At_Drought_Reproduction_P Parameter: Organism Value: A. thaliana
  misc_feature: MA Experiment 20001911 PARAMETER Experiment Name: At_Drought_Reproduction_P Parameter: Plant Line Value: WS
  misc_feature: MA Experiment 20001911 PARAMETER Experiment Name: At_Drought_Reproduction_P Parameter: Timepoint (day) Value: 10
  misc_feature: MA Experiment 20001911 PARAMETER Experiment Name: At_Drought_Reproduction_P Parameter: Tissue Value: Flowers
  misc_feature: MA Experiment 20001911 PARAMETER Experiment Name: At_Drought_Reproduction_P Parameter: Treatment Value: Drought vs. No Drought
gtcttttggtgggtcttcgtcaaagctctctcctttacggtccttttctccagcgcatgaaataataaaggacacctgtatttattaaaatcactacattttccgtaacaaaaaaaatcaaactttgttttctcaatggacggtgcgggagaatcacgactcggtggtgatggtggtggtgatggttctgttggagttcagatccgacaaacacggatgctaccggattttctccagagcgtgaatctcaagtatgtgaaattaggttacaattacttaatctcaaatctcttgactctctgtttattccctctcgccgttgttatctccgtcgaagcctctcagatgaacccagatgatctcaaacagctctggatccatctacaatacaatctggttagtatcatcatctgttcagcgattctagtcttcgggttaacggtttatgttacgacccgacctagacccgtttacttggttgatttctcttgttatctcccacctgatcatctcaaagctccttacgctcggttcatggaacattctagactcaccggagatttcgatgactctgctctcgagtttcaacgcaagatccttgagcgttctggtttaggggaagacacttgtccctgaagctatgcattatgttccaccgagaatttcaatggctgctgctagagaagaagctgaacaagtcatgtttggtgctttagataaccttttcgctaacactaatgtgaaaccaaaggatattggaatccttgttgtgaattgtagtctctttaatccaactccttcgttatctgcaatgattgtgaacaagtataagcttagaggtaacattagaagctacaatctaggcggtatgggttgcagcgcgggagttatcgctgtggatcttgctaaagacatgttgttggtacataggaacacttatgcggttgttgtttctactgagaacattactcagaattggtattttggtaacaagaaatcgatgttgataccgaactgcttgtttcgagttggtggctctgcggttttgctatcgaacaagtcgagggacaagagacggtctaagtacaggcttgtacatgtagtcaggactcaccgtggagcagatgataaagctttccgttgtgtttatcaagagcaggatgatacagggagaaccggggtttcgttgtcgaaagatctaatggcgattgcaggggaaactctcaaaaccaatatcactacattgggtcctcttgttctaccgataagtgagcagattctcttctttatgactctagttgtgaagaagctctttaacggtaaagtgaaaccgtatatcccggatttcaaacttgctttcgagcatttctgtatccatgctggtggaagagctgtgatcgatgagttagagaagaatctgcagctttcaccagttcatgtcgaggcttcgaggatgactcttcatcgatttggtaacacatcttcgagctccatttggtatgaattggcttacattgaagcgaagggaaggatgcgaagaggtaatcgtgtttggcaaatcgcgttcggaagtggatttaaatgtaatagcgcgatttgggaagcattaaggcatgtgaaaccttcgaacaacagtccttgtgaagattgtattgacaagtatccggtaactttaagttattagcttcgtttgaggaactgttattgtgtaacttcgagactaatccatggttgttttttttcttagagaagaaacccttagatttgatctctgacaatgtcaatgtgtttgttgtttatgtgttttggagagtttgtg

SEQ ID NO: 43385 - protein, 347 aa, Arabidopsis thaliana
  peptide (1)..(347): Ceres Seq. ID no. 12370304
  misc_feature (181)..(324): Pfam Name: Chalcone and stilbene synthases, C-terminal domain Pfam Description: Chalcone and stilbene synthases, C-terminal
  misc_feature (1)..(343): Homolog of NCBI NO: 15222592 NR Description: fatty acid condensing enzyme CUT1, putative
  misc_feature (1)..(343): Homolog of NCBI NO: 21593111 NR Description: very-long-chain fatty acid condensing enzyme CUT1
  misc_feature (1)..(343): Homolog of NCBI NO: 15221431 NR Description: very-long-chain fatty acid condensing enzyme
  misc_feature (1)..(343): Homolog of NCBI NO: 17979464 NR Description: At1g68530/T26J14_10 [Arabidopsis thaliana]
  misc_feature (1)..(343): Homolog of NCBI NO: 15225767 NR Description: putative beta-ketoacyl-CoA synthase; protein id:
  misc_feature (1)..(343): Homolog of NCBI NO: 9714501 NR Description: putative fatty acid elongase [Zea mays]
  misc_feature (1)..(343): Homolog of NCBI NO: 29417540 NR Description: beta-ketoacyl-CoA-synthase [Marchantia polymorpha]
  misc_feature (1)..(345): Homolog of NCBI NO: 15236133 NR Description: putative ketoacyl-CoA synthase; protein id:
  misc_feature (1)..(347): Homolog of NCBI NO: 15226724 NR Description: putative beta-ketoacyl-CoA synthase; protein id:
  misc_feature (1)..(347): Homolog of NCBI NO: 15223556 NR Description: very-long-chain fatty acid condensing enzyme
MHYVPPRISMAAAREEAEQVMFGALDNLFANTNVKPKDIGILVVNCSLFNPTPSLSAMIVNKYKLRGNIRSYNLGGMGCSAGVIAVDLAKDMLLVHRNTYAVVVSTENITQNWYFGNKKSMLIPNCLFRVGGSAVLLSNKSRDKRRSKYRLVHVVRTHRGADDKAFRCVYQEQDDTGRTGVSLSKDLMAIAGETLKTNITTLGPLVLPISEQILFFMTLVVKKLFNGKVKPYIPDFKLAFEHFCIHAGGRAVIDELEKNLQLSPVHVEASRMTLHRFGNTSSSSIWYELAYIEAKGRMRRGNRVWQIAFGSGFKCNSAIWEALRHVKPSNNSPCEDCIDKYPVTLSY

SEQ ID NO: 43386 - protein, 338 aa, Arabidopsis thaliana
  peptide (1)..(338): Ceres Seq. ID no. 12370305
  misc_feature (172)..(315): Pfam Name: Chalcone and stilbene synthases, C-terminal domain Pfam Description: Chalcone and stilbene synthases, C-terminal
  misc_feature (1)..(334): Homolog of NCBI NO: 15222592 NR Description: fatty acid condensing enzyme CUT1, putative
  misc_feature (1)..(334): Homolog of NCBI NO: 21593111 NR Description: very-long-chain fatty acid condensing enzyme CUT1
  misc_feature (1)..(334): Homolog of NCBI NO: 15221431 NR Description: very-long-chain fatty acid condensing enzyme
  misc_feature (1)..(334): Homolog of NCBI NO: 17979464 NR Description: At1g68530/T26J14_10 [Arabidopsis thaliana]
  misc_feature (1)..(334): Homolog of NCBI NO: 15225767 NR Description: putative beta-ketoacyl-CoA synthase; protein id:
  misc_feature (1)..(334): Homolog of NCBI NO: 9714501 NR Description: putative fatty acid elongase [Zea mays]
  misc_feature (1)..(334): Homolog of NCBI NO: 29417540 NR Description: beta-ketoacyl-CoA-synthase [Marchantia polymorpha]
  misc_feature (1)..(336): Homolog of NCBI NO: 15236133 NR Description: putative ketoacyl-CoA synthase; protein id:
  misc_feature (1)..(338): Homolog of NCBI NO: 15226724 NR Description: putative beta-ketoacyl-CoA synthase; protein id:
  misc_feature (1)..(338): Homolog of NCBI NO: 15223556 NR Description: very-long-chain fatty acid condensing enzyme
MAAAREEAEQVMFGALDNLFANTNVKPKDIGILVVNCSLFNPTPSLSAMIVNKYKLRGNIRSYNLGGMGCSAGVIAVDLAKDMLLVHRNTYAVVVSTENITQNWYFGNKKSMLIPNCLFRVGGSAVLLSNKSRDKRRSKYRLVHVVRTHRGADDKAFRCVYQEQDDTGRTGVSLSKDLMAIAGETLKTNITTLGPLVLPISEQILFFMTLVVKKLFNGKVKPYIPDFKLAFEHFCIHAGGRAVIDELEKNLQLSPVHVEASRMTLHRFGNTSSSSIWYELAYIEAKGRMRRGNRVWQIAFGSGFKCNSAIWEALRHVKPSNNSPCEDCIDKYPVTLSY

SEQ ID NO: 43387 - protein, 327 aa, Arabidopsis thaliana
  peptide (1)..(327): Ceres Seq. ID no. 12370306
  misc_feature (161)..(304): Pfam Name: Chalcone and stilbene synthases, C-terminal domain Pfam Description: Chalcone and stilbene synthases, C-terminal
  misc_feature (1)..(323): Homolog of NCBI NO: 15222592 NR Description: fatty acid condensing enzyme CUT1, putative
  misc_feature (1)..(323): Homolog of NCBI NO: 21593111 NR Description: very-long-chain fatty acid condensing enzyme CUT1
  misc_feature (1)..(323): Homolog of NCBI NO: 15221431 NR Description: very-long-chain fatty acid condensing enzyme
  misc_feature (1)..(323): Homolog of NCBI NO: 17979464 NR Description: At1g68530/T26J14_10 [Arabidopsis thaliana]
  misc_feature (1)..(323): Homolog of NCBI NO: 15225767 NR Description: putative beta-ketoacyl-CoA synthase; protein id:
  misc_feature (1)..(323): Homolog of NCBI NO: 9714501 NR Description: putative fatty acid elongase [Zea mays]
  misc_feature (1)..(323): Homolog of NCBI NO: 29417540 NR Description: beta-ketoacyl-CoA-synthase [Marchantia polymorpha]
  misc_feature (1)..(325): Homolog of NCBI NO: 15236133 NR Description: putative ketoacyl-CoA synthase; protein id:
  misc_feature (1)..(327): Homolog of NCBI NO: 15226724 NR Description: putative beta-ketoacyl-CoA synthase; protein id:
  misc_feature (1)..(327): Homolog of NCBI NO: 15223556 NR Description: very-long-chain fatty acid condensing enzyme
MFGALDNLFANTNVKPKDIGILVVNCSLFNPTPSLSAMIVNKYKLRGNIRSYNLGGMGCSAGVIAVDLAKDMLLVHRNTYAVVVSTENITQNWYFGNKKSMLIPNCLFRVGGSAVLLSNKSRDKRRSKYRLVHVVRTHRGADDKAFRCVYQEQDDTGRTGVSLSKDLMAIAGETLKTNITTLGPLVLPISEQILFFMTLVVKKLFNGKVKPYIPDFKLAFEHFCIHAGGRAVIDELEKNLQLSPVHVEASRMTLHRFGNTSSSSIWYELAYIEAKGRMRRGNRVWQIAFGSGFKCNSAIWEALRHVKPSNNSPCEDCIDKYPVTLSY

SEQ ID NO: 43388 - DNA, 1130 bp, Arabidopsis thaliana
  misc_feature (1)..(1130): Ceres Seq. ID no. 12739117
  misc_feature: MA Experiment ID: 108461 Result: Down-regulated in Transcription
  misc_feature: MA Experiment 108461 PARAMETER Experiment Name: At_Germinating_Seeds_cDNA_P Parameter: Age (day) Value: 1 vs. 0
  misc_feature: MA Experiment 108461 PARAMETER Experiment Name: At_Germinating_Seeds_cDNA_P Parameter: Tissue Value: Germinating Seeds
  misc_feature: MA Experiment ID: 108462 Result: Down-regulated in Transcription
  misc_feature: MA Experiment 108462 PARAMETER Experiment Name: At_Germinating_Seeds_cDNA_P Parameter: Age (day) Value: 2 vs. 0
  misc_feature: MA Experiment 108462 PARAMETER Experiment Name: At_Germinating_Seeds_cDNA_P Parameter: Tissue Value: Germinating Seeds
  misc_feature: MA Experiment ID: 108463 Result: Down-regulated in Transcription
  misc_feature: MA Experiment 108463 PARAMETER Experiment Name: At_Germinating_Seeds_cDNA_P Parameter: Age (day) Value: 3 vs. 0
  misc_feature: MA Experiment 108463 PARAMETER Experiment Name: At_Germinating_Seeds_cDNA_P Parameter: Tissue Value: Germinating Seeds
  misc_feature: MA Experiment ID: 108464 Result: Down-regulated in Transcription
  misc_feature: MA Experiment 108464 PARAMETER Experiment Name: At_Germinating_Seeds_cDNA_P Parameter: Age (day) Value: 4 vs. 0
  misc_feature: MA Experiment 108464 PARAMETER Experiment Name: At_Germinating_Seeds_cDNA_P Parameter: Tissue Value: Germinating Seeds
  misc_feature: MA Experiment ID: 108572 Result: Down-regulated in Transcription
  misc_feature: MA Experiment 108572 PARAMETER Experiment Name: At_Drought_cDNA_P Parameter: Timepoint (hr) Value: 1
  misc_feature: MA Experiment 108572 PARAMETER Experiment Name: At_Drought_cDNA_P Parameter: Tissue Value: Aerial
  misc_feature: MA Experiment 108572 PARAMETER Experiment Name: At_Drought_cDNA_P Parameter: Treatment Value: Drought vs. No Drought
  misc_feature: MA Experiment ID: 20000113 Result: Down-regulated in Transcription
  misc_feature: MA Experiment 20000113 PARAMETER Experiment Name: At_42deg_Heat_cDNA_P Parameter: Temperature (deg C) Value: 42 vs. 22
  misc_feature: MA Experiment 20000113 PARAMETER Experiment Name: At_42deg_Heat_cDNA_P Parameter: Timepoint (hr) Value: 8
  misc_feature: MA Experiment 20000113 PARAMETER Experiment Name: At_42deg_Heat_cDNA_P Parameter: Tissue Value: Aerial
  misc_feature: MA Experiment ID: 20000180 Result: Down-regulated in Transcription
  misc_feature: MA Experiment 20000180 PARAMETER Experiment Name: At_Germinating_Seeds_P Parameter: Age (hr) Value: 24 vs. 0
  misc_feature: MA Experiment 20000180 PARAMETER Experiment Name: At_Germinating_Seeds_P Parameter: Tissue Value: Germinating Seeds
  misc_feature: MA Experiment ID: 20000184 Result: Down-regulated in Transcription
  misc_feature: MA Experiment 20000184 PARAMETER Experiment Name: At_Shoots__P Parameter: Age (day) Value: 7
  misc_feature: MA Experiment 20000184 PARAMETER Experiment Name: At_Shoots__P Parameter: Tissue Value: Shoots vs. Whole Plant
  misc_feature: MA Experiment ID: 20000185 Result: Down-regulated in Transcription
  misc_feature: MA Experiment 20000185 PARAMETER Experiment Name: At_Roots__P Parameter: Age (day) Value: 7 vs. 21
  misc_feature: MA Experiment 20000185 PARAMETER Experiment Name: At_Roots__P Parameter: Organism Value: A. thaliana
  misc_feature: MA Experiment 20000185 PARAMETER Experiment Name: At_Roots__P Parameter: Tissue Value: Roots vs. Whole Plant
  misc_feature: MA Experiment ID: 20000439 Result: Down-regulated in Transcription
  misc_feature: MA Experiment 20000439 PARAMETER Experiment Name: At_Roots__P Parameter: Age (day) Value: 14 vs. 21
  misc_feature: MA Experiment 20000439 PARAMETER Experiment Name: At_Roots__P Parameter: Organism Value: A. thaliana
  misc_feature: MA Experiment 20000439 PARAMETER Experiment Name: At_Roots__P Parameter: Tissue Value: Roots vs. Whole Plant
  misc_feature: MA Experiment ID: 20001248 Result: Up-regulated in Transcription
  misc_feature: MA Experiment 20001248 PARAMETER Experiment Name: At_Far-red-induction_P Parameter: Age (day) Value: 7
  misc_feature: MA Experiment 20001248 PARAMETER Experiment Name: At_Far-red-induction_P Parameter: Light Value: Far-red vs. White
  misc_feature: MA Experiment 20001248 PARAMETER Experiment Name: At_Far-red-induction_P Parameter: Organism Value: A. thaliana
  misc_feature: MA Experiment 20001248 PARAMETER Experiment Name: At_Far-red-induction_P Parameter: Plant Line Value: Columbia
  misc_feature: MA Experiment 20001248 PARAMETER Experiment Name: At_Far-red-induction_P Parameter: Timepoint (hr) Value: 4
  misc_feature: MA Experiment 20001248 PARAMETER Experiment Name: At_Far-red-induction_P Parameter: Tissue Value: Whole Plant
  misc_feature: MA Experiment ID: 20001557 Result: Up-regulated in Transcription
  misc_feature: MA Experiment 20001557 PARAMETER Experiment Name: At_Drought_Soil_Dry_P Parameter: Age (day) Value: 27
  misc_feature: MA Experiment 20001557 PARAMETER Experiment Name: At_Drought_Soil_Dry_P Parameter: Organism Value: A. thaliana
  misc_feature: MA Experiment 20001557 PARAMETER Experiment Name: At_Drought_Soil_Dry_P Parameter: Plant Line Value: WS
  misc_feature: MA Experiment 20001557 PARAMETER Experiment Name: At_Drought_Soil_Dry_P Parameter: Post Timepoint (hr) Value: 3
  misc_feature: MA Experiment 20001557 PARAMETER Experiment Name: At_Drought_Soil_Dry_P Parameter: Post-Treatment Value: Re-Water vs. No Drought
  misc_feature: MA Experiment 20001557 PARAMETER Experiment Name: At_Drought_Soil_Dry_P Parameter: Timepoint (day) Value: 13
  misc_feature: MA Experiment 20001557 PARAMETER Experiment Name: At_Drought_Soil_Dry_P Parameter: Treatment Value: Drought vs. No Drought
gcgaagccgcaaagaaagcggcggtggaagctgagacatgcaacaatggcgttcgtgtcattctcttcttctccttctctctctcttacactcgcgattcaacattaatttcgttcttcttcatacacatatatagatagtgtcttcattttccaaccatgaccggtagagaaatcctccacaatatgaaggaatccgtcaaggagaaagttgggcttggtgcatctgcttcatctgcagattcagggaaaggtaagagcaagatgtcgaagcagatcacacatggttttcatttggtgaaagggaaagcttttcacgagatggaagattatgtggttgccaaattcaaggaagttgatgataatgagcttggtctgtttgctatcttcgatggccatcttagccacgagattccggactacttgtgctcccatttgtttgagaacatcttgaaagagccgaatttctggcaagaacctgagaaagcgataaagaaagcttactatataacggatacaacgattctagacaaggcagatgatttgggaaaaggaggttctactgctgtgactgcgatattgatcaattgccagaagctggtggttgctaatgttggtgactctcgagctgttatttgccaaaatggtgttgcgaagccactctcagttgatcatgagccgaacatggagaaggatgaaatcgagaacagaggaggattcgtttctaactttcctggggatgttcctcgagttgatggtcaactggctgtggcaagggcatttggtgataagagtttaaagatgcatttgagttcagaaccatatgttacggtggagatagttgatgatgatgcagaatttcttatcctagcaagtgatggactatggaaggtcatgtcaaaccaagaagccgttgactcaatcaagggaataaaagatgcgaaggctgcagcaaagcaccttgcagaggaggctgttgcaaggaaaagctcagacgatatctcagtcgtcgtcgtgaaatttcagtgacattagctttcggttagtcttttcttcttcttttgggcgactctaacactttacttgaatctgtattataagccttttcaattaagacgttacgcaaataag

SEQ ID NO: 43389 - protein, 289 aa, Arabidopsis thaliana
  peptide (1)..(289): Ceres Seq. ID no. 12739118
  misc_feature (40)..(281): Pfam Name: Protein phosphatase 2C Pfam Description: Protein phosphatase 2C
  misc_feature (13)..(289): Homolog of NCBI NO: 21537096 NR Description: protein phosphatase type 2C, putative
  misc_feature (13)..(289): Homolog of NCBI NO: 18395099 NR Description: protein phosphatase 2C (PP2C), putative
  misc_feature (36)..(288): Homolog of NCBI NO: 7488280 NR Description: protein phosphatase 2C homolog F20O9.80 -
  misc_feature (1)..(289): Homolog of NCBI NO: 25411985 NR Description: probable protein phosphatase 2C [imported] -
  misc_feature (1)..(289): Homolog of NCBI NO: 18399423 NR Description: protein phosphatase 2C (PP2C)
  misc_feature (1)..(288): Homolog of NCBI NO: 23307574 NR Description: putative protein phosphatase 2C homolog
  misc_feature (1)..(288): Homolog of NCBI NO: 18417190 NR Description: protein phosphatase 2C (PP2C)
  misc_feature (1)..(289): Homolog of NCBI NO: 4336436 NR Description: protein phosphatase type 2C [Lotus japonicus]
  misc_feature (1)..(289): Homolog of NCBI NO: 21539551 NR Description: putative protein phosphatase type 2C [Arabidopsis
  misc_feature (1)..(289): Homolog of NCBI NO: 15232538 NR Description: protein phosphatase 2C (PP2C); protein id:
MTGREILHNMKESVKEKVGLGASASSADSGKGKSKMSKQITHGFHLVKGKAFHEMEDYVVAKFKEVDDNELGLFAIFDGHLSHEIPDYLCSHLFENILKEPNFWQEPEKAIKKAYYITDTTILDKADDLGKGGSTAVTAILINCQKLVVANVGDSRAVICQNGVAKPLSVDHEPNMEKDEIENRGGFVSNFPGDVPRVDGQLAVARAFGDKSLKMHLSSEPYVTVEIVDDDAEFLILASDGLWKVMSNQEAVDSIKGIKDAKAAAKHLAEEAVARKSSDDISVVVVKFQ

SEQ ID NO: 43390 - protein, 280 aa, Arabidopsis thaliana
  peptide (1)..(280): Ceres Seq. ID no. 12739119
  misc_feature (31)..(272): Pfam Name: Protein phosphatase 2C Pfam Description: Protein phosphatase 2C
  misc_feature (4)..(280): Homolog of NCBI NO: 21537096 NR Description: protein phosphatase type 2C, putative
  misc_feature (4)..(280): Homolog of NCBI NO: 18395099 NR Description: protein phosphatase 2C (PP2C), putative
  misc_feature (27)..(279): Homolog of NCBI NO: 7488280 NR Description: protein phosphatase 2C homolog F20O9.80 -
  misc_feature (1)..(280): Homolog of NCBI NO: 25411985 NR Description: probable protein phosphatase 2C [imported] -
  misc_feature (1)..(280): Homolog of NCBI NO: 18399423 NR Description: protein phosphatase 2C (PP2C)
  misc_feature (1)..(279): Homolog of NCBI NO: 23307574 NR Description: putative protein phosphatase 2C homolog
  misc_feature (1)..(279): Homolog of NCBI NO: 18417190 NR Description: protein phosphatase 2C (PP2C)
  misc_feature (1)..(280): Homolog of NCBI NO: 4336436 NR Description: protein phosphatase type 2C [Lotus japonicus]
  misc_feature (1)..(280): Homolog of NCBI NO: 21539551 NR Description: putative protein phosphatase type 2C [Arabidopsis
  misc_feature (1)..(280): Homolog of NCBI NO: 15232538 NR Description: protein phosphatase 2C (PP2C); protein id:
MKESVKEKVGLGASASSADSGKGKSKMSKQITHGFHLVKGKAFHEMEDYVVAKFKEVDDNELGLFAIFDGHLSHEIPDYLCSHLFENILKEPNFWQEPEKAIKKAYYITDTTILDKADDLGKGGSTAVTAILINCQKLVVANVGDSRAVICQNGVAKPLSVDHEPNMEKDEIENRGGFVSNFPGDVPRVDGQLAVARAFGDKSLKMHLSSEPYVTVEIVDDDAEFLILASDGLWKVMSNQEAVDSIKGIKDAKAAAKHLAEEAVARKSSDDISVVVVKFQ

SEQ ID NO: 43391 - protein, 254 aa, Arabidopsis thaliana
  peptide (1)..(254): Ceres Seq. ID no. 12739120
  misc_feature (5)..(246): Pfam Name: Protein phosphatase 2C Pfam Description: Protein phosphatase 2C
  misc_feature (1)..(254): Homolog of NCBI NO: 21537096 NR Description: protein phosphatase type 2C, putative
  misc_feature (1)..(254): Homolog of NCBI NO: 18395099 NR Description: protein phosphatase 2C (PP2C), putative
  misc_feature (1)..(253): Homolog of NCBI NO: 7488280 NR Description: protein phosphatase 2C homolog F20O9.80 -
  misc_feature (1)..(254): Homolog of NCBI NO: 25411985 NR Description: probable protein phosphatase 2C [imported] -
  misc_feature (1)..(254): Homolog of NCBI NO: 18399423 NR Description: protein phosphatase 2C (PP2C)
  misc_feature (1)..(253): Homolog of NCBI NO: 23307574 NR Description: putative protein phosphatase 2C homolog
  misc_feature (1)..(253): Homolog of NCBI NO: 18417190 NR Description: protein phosphatase 2C (PP2C)
  misc_feature (1)..(254): Homolog of NCBI NO: 4336436 NR Description: protein phosphatase type 2C [Lotus japonicus]
  misc_feature (1)..(254): Homolog of NCBI NO: 21539551 NR Description: putative protein phosphatase type 2C [Arabidopsis
  misc_feature (1)..(254): Homolog of NCBI NO: 15232538 NR Description: protein phosphatase 2C (PP2C); protein id:
MSKQITHGFHLVKGKAFHEMEDYVVAKFKEVDDNELGLFAIFDGHLSHEIPDYLCSHLFENILKEPNFWQEPEKAIKKAYYITDTTILDKADDLGKGGSTAVTAILINCQKLVVANVGDSRAVICQNGVAKPLSVDHEPNMEKDEIENRGGFVSNFPGDVPRVDGQLAVARAFGDKSLKMHLSSEPYVTVEIVDDDAEFLILASDGLWKVMSNQEAVDSIKGIKDAKAAAKHLAEEAVARKSSDDISVVVVKFQ

SEQ ID NO: 43392 - DNA, 1484 bp, Arabidopsis thaliana; identical to SEQ ID NO: 42237
  misc_feature (1)..(1484): Ceres Seq. ID no. 12389109
  misc_feature: MA Experiment ID: 108434 Result: Up-regulated in Transcription
  misc_feature: MA Experiment 108434 PARAMETER Experiment Name: At_Root_Tips_cDNA_P Parameter: Tissue Value: Root Tips
  misc_feature: MA Experiment ID: 108461 Result: Up-regulated in Transcription
  misc_feature: MA Experiment 108461 PARAMETER Experiment Name: At_Germinating_Seeds_cDNA_P Parameter: Age (day) Value: 1 vs. 0
  misc_feature: MA Experiment 108461 PARAMETER Experiment Name: At_Germinating_Seeds_cDNA_P Parameter: Tissue Value: Germinating Seeds
  misc_feature: MA Experiment ID: 108595 Result: Down-regulated in Transcription
  misc_feature: MA Experiment 108595 PARAMETER Experiment Name: At_Ler-pi_Ovule_cDNA_P Parameter: Plant Line Value: null
  misc_feature: MA Experiment ID: 20000111 Result: Down-regulated in Transcription
  misc_feature: MA Experiment 20000111 PARAMETER Experiment Name: At_42deg_Heat_cDNA_P Parameter: Temperature (deg C) Value: 42 vs. 22
  misc_feature: MA Experiment 20000111 PARAMETER Experiment Name: At_42deg_Heat_cDNA_P Parameter: Timepoint (hr) Value: 6
  misc_feature: MA Experiment 20000111 PARAMETER Experiment Name: At_42deg_Heat_cDNA_P Parameter: Tissue Value: Aerial
  misc_feature: MA Experiment ID: 20000179 Result: Up-regulated in Transcription
  misc_feature: MA Experiment 20000179 PARAMETER Experiment Name: At_Germinating_Seeds_P Parameter: Age (hr) Value: 6 vs. 0
  misc_feature: MA Experiment 20000179 PARAMETER Experiment Name: At_Germinating_Seeds_P Parameter: Tissue Value: Germinating Seeds
  misc_feature: MA Experiment ID: 20000180 Result: Up-regulated in Transcription
  misc_feature: MA Experiment 20000180 PARAMETER Experiment Name: At_Germinating_Seeds_P Parameter: Age (hr) Value: 24 vs. 0
  misc_feature: MA Experiment 20000180 PARAMETER Experiment Name: At_Germinating_Seeds_P Parameter: Tissue Value: Germinating Seeds
  misc_feature: MA Experiment ID: 20000437 Result: Down-regulated in Transcription
  misc_feature: MA Experiment 20000437 PARAMETER Experiment Name: At_Drought_P Parameter: Age (day) Value: 8
  misc_feature: MA Experiment 20000437 PARAMETER Experiment Name: At_Drought_P Parameter: Organism Value: A. thaliana
  misc_feature: MA Experiment 20000437 PARAMETER Experiment Name: At_Drought_P Parameter: Plant Line Value: WS
  misc_feature: MA Experiment 20000437 PARAMETER Experiment Name: At_Drought_P Parameter: Timepoint (hr) Value: 24
  misc_feature: MA Experiment 20000437 PARAMETER Experiment Name: At_Drought_P Parameter: Tissue Value: Whole Plant
  misc_feature: MA Experiment 20000437 PARAMETER Experiment Name: At_Drought_P Parameter: Treatment Value: Drought vs. No Drought
  misc_feature: MA Experiment ID: 20001911 Result: Down-regulated in Transcription
  misc_feature: MA Experiment 20001911 PARAMETER Experiment Name: At_Drought_Reproduction_P Parameter: Age (day) Value: 40
  misc_feature: MA Experiment 20001911 PARAMETER Experiment Name: At_Drought_Reproduction_P Parameter: Organism Value: A. thaliana
  misc_feature: MA Experiment 20001911 PARAMETER Experiment Name: At_Drought_Reproduction_P Parameter: Plant Line Value: WS
  misc_feature: MA Experiment 20001911 PARAMETER Experiment Name: At_Drought_Reproduction_P Parameter: Timepoint (day) Value: 10
  misc_feature: MA Experiment 20001911 PARAMETER Experiment Name: At_Drought_Reproduction_P Parameter: Tissue Value: Flowers
  misc_feature: MA Experiment 20001911 PARAMETER Experiment Name: At_Drought_Reproduction_P Parameter: Treatment Value: Drought vs. No Drought

SEQ ID NO: 43393 - protein, 382 aa, Arabidopsis thaliana; identical to SEQ ID NO: 42238
  peptide (1)..(382): Ceres Seq. ID no. 12389110
  misc_feature (8)..(362): Pfam Name: 3-beta hydroxysteroid dehydrogenase/isomerase family Pfam Description: 3-beta hydroxysteroid dehydrogenase/isomerase
  misc_feature (8)..(362): Pfam Name: 3-beta hydroxysteroid dehydrogenase/isomerase family Pfam Description: 3-beta hydroxysteroid dehydrogenase/isomerase
  misc_feature (65)..(362): Homolog of NCBI NO: 31127258 NR Description: Nsdhl protein [Mus musculus]
  misc_feature (249)..(381): Homolog of NCBI NO: 21539467 NR Description: 3-beta-hydroxysteroid dehydrogenase [Arabidopsis
  misc_feature (12)..(83): Homolog of NCBI NO: 25408868 NR Description: probable sterol dehydrogenase [imported] -
  misc_feature (84)..(358): Homolog of NCBI NO: 25408868 NR Description: probable sterol dehydrogenase [imported] -
  misc_feature (12)..(359): Homolog of NCBI NO: 18406234 NR Description: putative sterol dehydrogenase
  misc_feature (65)..(362): Homolog of NCBI NO: 31127258 NR Description: Nsdhl protein [Mus musculus]
  misc_feature (12)..(83): Homolog of NCBI NO: 25408868 NR Description: probable sterol dehydrogenase [imported] -
  misc_feature (12)..(359): Homolog of NCBI NO: 18406234 NR Description: putative sterol dehydrogenase
  misc_feature (3)..(382): Homolog of NCBI NO: 21553411 NR Description: 3-beta-hydroxysteroid dehydrogenase, putative
  misc_feature (1)..(382): Homolog of NCBI NO: 18401656 NR Description: 3-beta-hydroxysteroid dehydrogenase, putative
  misc_feature (1)..(370): Homolog of NCBI NO: 30694041 NR Description: 3-beta hydroxysteroid dehydrogenase/isomerase
  misc_feature (6)..(374): Homolog of NCBI NO: 15225272 NR Description: 3-beta-hydroxysteroid dehydrogenase; protein id:
  misc_feature (6)..(213): Homolog of NCBI NO: 23198272 NR Description: 3-beta-hydroxysteroid dehydrogenase [Arabidopsis
  misc_feature (84)..(358): Homolog of NCBI NO: 25408868 NR Description: probable sterol dehydrogenase [imported] -
  misc_feature (249)..(381): Homolog of NCBI NO: 21539467 NR Description: 3-beta-hydroxysteroid dehydrogenase [Arabidopsis
  misc_feature (6)..(213): Homolog of NCBI NO: 23198272 NR Description: 3-beta-hydroxysteroid dehydrogenase [Arabidopsis
  misc_feature (6)..(374): Homolog of NCBI NO: 15225272 NR Description: 3-beta-hydroxysteroid dehydrogenase; protein id:
  misc_feature (1)..(370): Homolog of NCBI NO: 30694041 NR Description: 3-beta hydroxysteroid dehydrogenase/isomerase
  misc_feature (1)..(382): Homolog of NCBI NO: 18401656 NR Description: 3-beta-hydroxysteroid dehydrogenase, putative
  misc_feature (3)..(382): Homolog of NCBI NO: 21553411 NR Description: 3-beta-hydroxysteroid dehydrogenase, putative

SEQ ID NO: 43394 - protein, 380 aa, Arabidopsis thaliana; identical to SEQ ID NO: 42239
  peptide (1)..(380): Ceres Seq. ID no. 12389111
  misc_feature (6)..(360): Pfam Name: 3-beta hydroxysteroid dehydrogenase/isomerase family Pfam Description: 3-beta hydroxysteroid dehydrogenase/isomerase
  misc_feature (6)..(360): Pfam Name: 3-beta hydroxysteroid dehydrogenase/isomerase family Pfam Description: 3-beta hydroxysteroid dehydrogenase/isomerase
  misc_feature (63)..(360): Homolog of NCBI NO: 31127258 NR Description: Nsdhl protein [Mus musculus]
  misc_feature (247)..(379): Homolog of NCBI NO: 21539467 NR Description: 3-beta-hydroxysteroid dehydrogenase [Arabidopsis
  misc_feature (10)..(81): Homolog of NCBI NO: 25408868 NR Description: probable sterol dehydrogenase [imported] -
  misc_feature (82)..(356): Homolog of NCBI NO: 25408868 NR Description: probable sterol dehydrogenase [imported] -
  misc_feature (10)..(357): Homolog of NCBI NO: 18406234 NR Description: putative sterol dehydrogenase
  misc_feature (63)..(360): Homolog of NCBI NO: 31127258 NR Description: Nsdhl protein [Mus musculus]
  misc_feature (10)..(81): Homolog of NCBI NO: 25408868 NR Description: probable sterol dehydrogenase [imported] -
  misc_feature (10)..(357): Homolog of NCBI NO: 18406234 NR Description: putative sterol dehydrogenase
  misc_feature (1)..(380): Homolog of NCBI NO: 21553411 NR Description: 3-beta-hydroxysteroid dehydrogenase, putative
  misc_feature (1)..(380): Homolog of NCBI NO: 18401656 NR Description: 3-beta-hydroxysteroid dehydrogenase, putative
  misc_feature (1)..(368): Homolog of NCBI NO: 30694041 NR Description: 3-beta hydroxysteroid dehydrogenase/isomerase
  misc_feature (4)..(372): Homolog of NCBI NO: 15225272 NR Description: 3-beta-hydroxysteroid dehydrogenase; protein id:
  misc_feature (4)..(211): Homolog of NCBI NO: 23198272 NR Description: 3-beta-hydroxysteroid dehydrogenase [Arabidopsis
  misc_feature (82)..(356): Homolog of NCBI NO: 25408868 NR Description: probable sterol dehydrogenase [imported] -
  misc_feature (247)..(379): Homolog of NCBI NO: 21539467 NR Description: 3-beta-hydroxysteroid dehydrogenase [Arabidopsis
  misc_feature (4)..(211): Homolog of NCBI NO: 23198272 NR Description: 3-beta-hydroxysteroid dehydrogenase [Arabidopsis
  misc_feature (4)..(372): Homolog of NCBI NO: 15225272 NR Description: 3-beta-hydroxysteroid dehydrogenase; protein id:
  misc_feature (1)..(368): Homolog of NCBI NO: 30694041 NR Description: 3-beta hydroxysteroid dehydrogenase/isomerase
  misc_feature (1)..(380): Homolog of NCBI NO: 18401656 NR Description: 3-beta-hydroxysteroid dehydrogenase, putative
  misc_feature (1)..(380): Homolog of NCBI NO: 21553411 NR Description: 3-beta-hydroxysteroid dehydrogenase, putative

SEQ ID NO: 43395 - protein, 355 aa, Arabidopsis thaliana; identical to SEQ ID NO: 42240
  peptide (1)..(355): Ceres Seq. ID no. 12389112
  misc_feature (1)..(335): Pfam Name: 3-beta hydroxysteroid dehydrogenase/isomerase family Pfam Description: 3-beta hydroxysteroid dehydrogenase/isomerase
  misc_feature (1)..(335): Pfam Name: 3-beta hydroxysteroid dehydrogenase/isomerase family Pfam Description: 3-beta hydroxysteroid dehydrogenase/isomerase
  misc_feature (38)..(335): Homolog of NCBI NO: 31127258 NR Description: Nsdhl protein [Mus musculus]
  misc_feature (222)..(354): Homolog of NCBI NO: 21539467 NR Description: 3-beta-hydroxysteroid dehydrogenase [Arabidopsis
  misc_feature (1)..(56): Homolog of NCBI NO: 25408868 NR Description: probable sterol dehydrogenase [imported] -
  misc_feature (57)..(331): Homolog of NCBI NO: 25408868 NR Description: probable sterol dehydrogenase [imported] -
  misc_feature (1)..(332): Homolog of NCBI NO: 18406234 NR Description: putative sterol dehydrogenase
  misc_feature (38)..(335): Homolog of NCBI NO: 31127258 NR Description: Nsdhl protein [Mus musculus]
  misc_feature (1)..(56): Homolog of NCBI NO: 25408868 NR Description: probable sterol dehydrogenase [imported] -
  misc_feature (1)..(332): Homolog of NCBI NO: 18406234 NR Description: putative sterol dehydrogenase
  misc_feature (1)..(355): Homolog of NCBI NO: 21553411 NR Description: 3-beta-hydroxysteroid dehydrogenase, putative
  misc_feature (1)..(355): Homolog of NCBI NO: 18401656 NR Description: 3-beta-hydroxysteroid dehydrogenase, putative
  misc_feature (1)..(343): Homolog of NCBI NO: 30694041 NR Description: 3-beta hydroxysteroid dehydrogenase/isomerase
  misc_feature (1)..(347): Homolog of NCBI NO: 15225272 NR Description: 3-beta-hydroxysteroid dehydrogenase; protein id:
  misc_feature (1)..(186): Homolog of NCBI NO: 23198272 NR Description: 3-beta-hydroxysteroid dehydrogenase [Arabidopsis
  misc_feature (57)..(331): Homolog of NCBI NO: 25408868 NR Description: probable sterol dehydrogenase [imported] -
  misc_feature (222)..(354): Homolog of NCBI NO: 21539467 NR Description: 3-beta-hydroxysteroid dehydrogenase [Arabidopsis
  misc_feature (1)..(186): Homolog of NCBI NO: 23198272 NR Description: 3-beta-hydroxysteroid dehydrogenase [Arabidopsis
  misc_feature (1)..(347): Homolog of NCBI NO: 15225272 NR Description: 3-beta-hydroxysteroid dehydrogenase; protein id:
  misc_feature (1)..(343): Homolog of NCBI NO: 30694041 NR Description: 3-beta hydroxysteroid dehydrogenase/isomerase
  misc_feature (1)..(355): Homolog of NCBI NO: 18401656 NR Description: 3-beta-hydroxysteroid dehydrogenase, putative
  misc_feature (1)..(355): Homolog of NCBI NO: 21553411 NR Description: 3-beta-hydroxysteroid dehydrogenase, putative

SEQ ID NO: 43396 - DNA, 1031 bp, Arabidopsis thaliana
  misc_feature (1)..(1031): Ceres Seq. ID no. 12329917
  misc_feature: MA Experiment ID: 108561 Result: Down-regulated in Transcription
  misc_feature: MA Experiment 108561 PARAMETER Experiment Name: At_100uM_ABA_cDNA_P Parameter: Timepoint (hr) Value: 6
  misc_feature: MA Experiment 108561 PARAMETER Experiment Name: At_100uM_ABA_cDNA_P Parameter: Tissue Value: Aerial
  misc_feature: MA Experiment 108561 PARAMETER Experiment Name: At_100uM_ABA_cDNA_P Parameter: Treatment Value: 100uM ABA vs. No Treatment
  misc_feature: MA Experiment ID: 108585 Result: Down-regulated in Transcription
  misc_feature: MA Experiment 108585 PARAMETER Experiment Name: At_5mM_NaNP_cDNA_P Parameter: Timepoint (hr) Value: 6
  misc_feature: MA Experiment 108585 PARAMETER Experiment Name: At_5mM_NaNP_cDNA_P Parameter: Tissue Value: Aerial
  misc_feature: MA Experiment 108585 PARAMETER Experiment Name: At_5mM_NaNP_cDNA_P Parameter: Treatment Value: null
  misc_feature: MA Experiment ID: 108595 Result: Down-regulated in Transcription
  misc_feature: MA Experiment 108595 PARAMETER Experiment Name: At_Ler-pi_Ovule_cDNA_P Parameter: Plant Line Value: null
  misc_feature: MA Experiment ID: 20000087 Result: Down-regulated in Transcription
  misc_feature: MA Experiment 20000087 PARAMETER Experiment Name: At_100uM_ABA_Mutants_cDNA_P Parameter: Plant Line Value: WS
  misc_feature: MA Experiment 20000087 PARAMETER Experiment Name: At_100uM_ABA_Mutants_cDNA_P Parameter: Timepoint (hr) Value: 6
  misc_feature: MA Experiment 20000087 PARAMETER Experiment Name: At_100uM_ABA_Mutants_cDNA_P Parameter: Tissue Value: Aerial
  misc_feature: MA Experiment 20000087 PARAMETER Experiment Name: At_100uM_ABA_Mutants_cDNA_P Parameter: Treatment Value: 100uM ABA vs. No Treatment
  misc_feature: MA Experiment ID: 20000113 Result: Up-regulated in Transcription
  misc_feature: MA Experiment 20000113 PARAMETER Experiment Name: At_42deg_Heat_cDNA_P Parameter: Temperature (deg C) Value: 42 vs. 22
  misc_feature: MA Experiment 20000113 PARAMETER Experiment Name: At_42deg_Heat_cDNA_P Parameter: Timepoint (hr) Value: 8
  misc_feature: MA Experiment 20000113 PARAMETER Experiment Name: At_42deg_Heat_cDNA_P Parameter: Tissue Value: Aerial
  misc_feature: MA Experiment ID: 20000117 Result: Down-regulated in Transcription
  misc_feature: MA Experiment 20000117 PARAMETER Experiment Name: At_100uM_ABA_Mutants_cDNA_P Parameter: Plant Line Value: Columbia
  misc_feature: MA Experiment 20000117 PARAMETER Experiment Name: At_100uM_ABA_Mutants_cDNA_P Parameter: Timepoint (hr) Value: 6
  misc_feature: MA Experiment 20000117 PARAMETER Experiment Name: At_100uM_ABA_Mutants_cDNA_P Parameter: Tissue Value: Aerial
  misc_feature: MA Experiment 20000117 PARAMETER Experiment Name: At_100uM_ABA_Mutants_cDNA_P Parameter: Treatment Value: 100uM ABA vs. No Treatment
  misc_feature: MA Experiment ID: 20000184 Result: Up-regulated in Transcription
  misc_feature: MA Experiment 20000184 PARAMETER Experiment Name: At_Shoots__P Parameter: Age (day) Value: 7
  misc_feature: MA Experiment 20000184 PARAMETER Experiment Name: At_Shoots__P Parameter: Tissue Value: Shoots vs. Whole Plant
  misc_feature: MA Experiment ID: 20000185 Result: Down-regulated in Transcription
  misc_feature: MA Experiment 20000185 PARAMETER Experiment Name: At_Roots__P Parameter: Age (day) Value: 7 vs. 21
  misc_feature: MA Experiment 20000185 PARAMETER Experiment Name: At_Roots__P Parameter: Organism Value: A. thaliana
  misc_feature: MA Experiment 20000185 PARAMETER Experiment Name: At_Roots__P Parameter: Tissue Value: Roots vs. Whole Plant
  misc_feature: MA Experiment ID: 20000234 Result: Up-regulated in Transcription
  misc_feature: MA Experiment 20000234 PARAMETER Experiment Name: At_Siliques_P Parameter: Age (day) Value: 21
  misc_feature: MA Experiment 20000234 PARAMETER Experiment Name: At_Siliques_P Parameter: Organism Value: A. thaliana
  misc_feature: MA Experiment 20000234 PARAMETER Experiment Name: At_Siliques_P Parameter: Plant Line Value: WS
  misc_feature: MA Experiment 20000234 PARAMETER Experiment Name: At_Siliques_P Parameter: Tissue Value: Less Than 5mm Siliques vs. Whole Plant
  misc_feature: MA Experiment ID: 20000235 Result: Up-regulated in Transcription
  misc_feature: MA Experiment 20000235 PARAMETER Experiment Name: At_Siliques_P Parameter: Age (day) Value: 21
  misc_feature: MA Experiment 20000235 PARAMETER Experiment Name: At_Siliques_P Parameter: Organism Value: A. thaliana
  misc_feature: MA Experiment 20000235 PARAMETER Experiment Name: At_Siliques_P Parameter: Plant Line Value: WS
  misc_feature: MA Experiment 20000235 PARAMETER Experiment Name: At_Siliques_P Parameter: Tissue Value: 5-10mm Siliques vs. Whole Plant
  misc_feature: MA Experiment ID: 20000265 Result: Up-regulated in Transcription
  misc_feature: MA Experiment 20000265 PARAMETER Experiment Name: At_Open_Flower_P Parameter: Age (day) Value: 21
  misc_feature: MA Experiment 20000265 PARAMETER Experiment Name: At_Open_Flower_P Parameter: Plant Line Value: WS
  misc_feature: MA Experiment 20000265 PARAMETER Experiment Name: At_Open_Flower_P Parameter: Tissue Value: Closed Flower vs. Whole Plant
  misc_feature: MA Experiment ID: 20000436 Result: Down-regulated in Transcription
  misc_feature: MA Experiment 20000436 PARAMETER Experiment Name: At_Drought_P Parameter: Age (day) Value: 7
  misc_feature: MA Experiment 20000436 PARAMETER Experiment Name: At_Drought_P Parameter: Organism Value: A. thaliana
  misc_feature: MA Experiment 20000436 PARAMETER Experiment Name: At_Drought_P Parameter: Plant Line Value: WS
  misc_feature: MA Experiment 20000436 PARAMETER Experiment Name: At_Drought_P Parameter: Timepoint (hr) Value: 12
  misc_feature: MA Experiment 20000436 PARAMETER Experiment Name: At_Drought_P Parameter: Tissue Value: Whole Plant
  misc_feature: MA Experiment 20000436 PARAMETER Experiment Name: At_Drought_P Parameter: Treatment Value: Drought vs. No Drought
  misc_feature: MA Experiment ID: 20000437 Result: Down-regulated in Transcription
  misc_feature: MA Experiment 20000437 PARAMETER Experiment Name: At_Drought_P Parameter: Age (day) Value: 8
  misc_feature: MA Experiment 20000437 PARAMETER Experiment Name: At_Drought_P Parameter: Organism Value: A. thaliana
  misc_feature: MA Experiment 20000437 PARAMETER Experiment Name: At_Drought_P Parameter: Plant Line Value: WS
  misc_feature: MA Experiment 20000437 PARAMETER Experiment Name: At_Drought_P Parameter: Timepoint (hr) Value: 24
  misc_feature: MA Experiment 20000437 PARAMETER Experiment Name: At_Drought_P Parameter: Tissue Value: Whole Plant
  misc_feature: MA Experiment 20000437 PARAMETER Experiment Name: At_Drought_P Parameter: Treatment Value: Drought vs. No Drought
  misc_feature: MA Experiment ID: 20000438 Result: Up-regulated in Transcription
  misc_feature: MA Experiment 20000438 PARAMETER Experiment Name: At_Shoots__P Parameter: Age (day) Value: 14
  misc_feature: MA Experiment 20000438 PARAMETER Experiment Name: At_Shoots__P Parameter: Tissue Value: Shoots vs. Whole Plant
  misc_feature: MA Experiment ID: 20000439 Result: Down-regulated in Transcription
  misc_feature: MA Experiment 20000439 PARAMETER Experiment Name: At_Roots__P Parameter: Age (day) Value: 14 vs. 21
  misc_feature: MA Experiment 20000439 PARAMETER Experiment Name: At_Roots__P Parameter: Organism Value: A. thaliana
  misc_feature: MA Experiment 20000439 PARAMETER Experiment Name: At_Roots__P Parameter: Tissue Value: Roots vs. Whole Plant
  misc_feature: MA Experiment ID: 20000794 Result: Down-regulated in Transcription
  misc_feature: MA Experiment 20000794 PARAMETER Experiment Name: At_Petals_P Parameter: Age (day) Value: 23-25 days
  misc_feature: MA Experiment 20000794 PARAMETER Experiment Name: At_Petals_P Parameter: Plant Line Value: WS
  misc_feature: MA Experiment 20000794 PARAMETER Experiment Name: At_Petals_P Parameter: Tissue Value: Petals vs. Whole plant
  misc_feature: MA Experiment ID: 20001248 Result: Down-regulated in Transcription
  misc_feature: MA Experiment 20001248 PARAMETER Experiment Name: At_Far-red-induction_P Parameter: Age (day) Value: 7
  misc_feature: MA Experiment 20001248 PARAMETER Experiment Name: At_Far-red-induction_P Parameter: Light Value: Far-red vs. White
  misc_feature: MA Experiment 20001248 PARAMETER Experiment Name: At_Far-red-induction_P Parameter: Organism Value: A. thaliana
  misc_feature: MA Experiment 20001248 PARAMETER Experiment Name: At_Far-red-induction_P Parameter: Plant Line Value: Columbia
  misc_feature: MA Experiment 20001248 PARAMETER Experiment Name: At_Far-red-induction_P Parameter: Timepoint (hr) Value: 4
  misc_feature: MA Experiment 20001248 PARAMETER Experiment Name: At_Far-red-induction_P Parameter: Tissue Value: Whole Plant
  misc_feature: MA Experiment ID: 20001560 Result: Up-regulated in Transcription
  misc_feature: MA Experiment 20001560 PARAMETER Experiment Name: At_Drought_Soil_Dry_P Parameter: Age (day) Value: 28
  misc_feature: MA Experiment 20001560 PARAMETER Experiment Name: At_Drought_Soil_Dry_P Parameter: Organism Value: A. thaliana
  misc_feature: MA Experiment 20001560 PARAMETER Experiment Name: At_Drought_Soil_Dry_P Parameter: Plant Line Value: WS
  misc_feature: MA Experiment 20001560 PARAMETER Experiment Name: At_Drought_Soil_Dry_P Parameter: Post Timepoint (hr) Value: None
  misc_feature: MA Experiment 20001560 PARAMETER Experiment Name: At_Drought_Soil_Dry_P Parameter: Post-Treatment Value: None
  misc_feature: MA Experiment 20001560 PARAMETER Experiment Name: At_Drought_Soil_Dry_P Parameter: Timepoint (day) Value: 14
  misc_feature: MA Experiment 20001560 PARAMETER Experiment Name: At_Drought_Soil_Dry_P Parameter: Treatment Value: Drought vs. No Drought
  misc_feature: MA Experiment ID: 20001757 Result: Up-regulated in Transcription
  misc_feature: MA Experiment 20001757 PARAMETER Experiment Name: At_50mM_NH4NO3_L-to-H_P Parameter: Timepoint (hr) Value: 6
  misc_feature: MA Experiment 20001757 PARAMETER Experiment Name: At_50mM_NH4NO3_L-to-H_P Parameter: Tissue Value: Leaf
  misc_feature: MA Experiment 20001757 PARAMETER Experiment Name: At_50mM_NH4NO3_L-to-H_P Parameter: Treatment Value: 50mM NH4NO3 vs 100mM Mannitol
  misc_feature: MA Experiment ID: 20001906 Result: Down-regulated in Transcription
  misc_feature: MA Experiment 20001906 PARAMETER Experiment Name: At_Drought_Reproduction_P Parameter: Age (day) Value: 35
  misc_feature: MA Experiment 20001906 PARAMETER Experiment Name: At_Drought_Reproduction_P Parameter: Organism Value: A. thaliana
  misc_feature: MA Experiment 20001906 PARAMETER Experiment Name: At_Drought_Reproduction_P Parameter: Plant Line Value: WS
  misc_feature: MA Experiment 20001906 PARAMETER Experiment Name: At_Drought_Reproduction_P Parameter: Timepoint (day) Value: 5
  misc_feature: MA Experiment 20001906 PARAMETER Experiment Name: At_Drought_Reproduction_P Parameter: Tissue Value: Siliques
  misc_feature: MA Experiment 20001906 PARAMETER Experiment Name: At_Drought_Reproduction_P Parameter: Treatment Value: Drought vs. No Drought
cccacttcttatccattcgaagcaatgaagtcttcttctatcttcttcttcttcctcttctcatggccattctacttcactccctctctcttcatccaccaaaccctaaacctcaaaacccttataaacccaaaattctctcttcttctgctacctttcggagagatgtggtgcttagaacagcatcactctgtttcgtctccttcatctttcaaaaccaaattccagagtcattagctgatcctttgaagtctaccaaaccgttacgactcggcattgcgaacactaagtcttggttccagtactttggtagtgggttcgctattagggttcctcctgactttgaagacgtcaatgagcctgaggattactctgcgggattgtctctctatggtgacaaggcaaagccacaaactttcgccgctcggttccaaactcctgatggatcagaagttttgagtgtagtcattcgtccttcaaatcaacttaagatcactttcttagaggctaaagatatatctgatttgggatcattgaaggcagctgcaagactttttgttccaggtgcggcaacaatttactctgctcgtacaatcaaggtaaaggaagaagaaggtttaagaaattactacttctacgagtttggtagagatgaagaacgcatagctctagtagcctctgtgaacagagggaaggtttatatcgctggagcagctgcaccggaatccaaatggaaagacgatgagttgaagctccgatctgctgccatttctttcactattctatagtcaaaaggcagcttcttctaacagaaaactcgaaaatcactctctagtcgactcgaaaatgtggaactaagaacaaactggccaaatgcgataaccagacattgttctgagacacatttgtcattccattttcgtttatctgtttatttttggttgatgtaatatgttcattgatgttctgtataatgagaaaacaaatcatgattctttgtaccgcgaaagtcctagaacgtgtttttaccg

SEQ ID NO: 43397 - protein, 261 aa, Arabidopsis thaliana
  peptide (1)..(261): Ceres Seq. ID no. 12329918
  misc_feature (224)..(261): Pfam Name: PsbP Pfam Description: PsbP
  misc_feature (21)..(207): Homolog of NCBI NO: 15240916 NR Description: putative protein; protein id: At5g27390.1
  misc_feature (8)..(261): Homolog of NCBI NO: 26452557 NR Description: unknown protein [Arabidopsis thaliana]
HFLSIRSNEVFFYLLLLPLLMAILLHSLSLHPPNPKPQNPYKPKILSSSATFRRDVVLRTASLCFVSFIFQNQIPESLADPLKSTKPLRLGIANTKSWFQYFGSGFAIRVPPDFEDVNEPEDYSAGLSLYGDKAKPQTFAARFQTPDGSEVLSVVIRPSNQLKITFLEAKDISDLGSLKAAARLFVPGAATIYSARTIKVKEEEGLRNYYFYEFGRDEERIALVASVNRGKVYIAGAAAPESKWKDDELKLRSAAISFTIL

SEQ ID NO: 43398 - protein, 241 aa, Arabidopsis thaliana
  peptide (1)..(241): Ceres Seq. ID no. 12329919
  misc_feature (204)..(241): Pfam Name: PsbP Pfam Description: PsbP
  misc_feature (1)..(187): Homolog of NCBI NO: 15240916 NR Description: putative protein; protein id: At5g27390.1
  misc_feature (1)..(241): Homolog of NCBI NO: 26452557 NR Description: unknown protein [Arabidopsis thaliana]
MAILLHSLSLHPPNPKPQNPYKPKILSSSATFRRDVVLRTASLCFVSFIFQNQIPESLADPLKSTKPLRLGIANTKSWFQYFGSGFAIRVPPDFEDVNEPEDYSAGLSLYGDKAKPQTFAARFQTPDGSEVLSVVIRPSNQLKITFLEAKDISDLGSLKAAARLFVPGAATIYSARTIKVKEEEGLRNYYFYEFGRDEERIALVASVNRGKVYIAGAAAPESKWKDDELKLRSAAISFTIL

SEQ ID NO: 43399 - DNA, 1031 bp, Arabidopsis thaliana
  misc_feature (1)..(1031): Ceres Seq. ID no. 12602943
  misc_feature: MA Experiment ID: 20000179 Result: Up-regulated in Transcription
  misc_feature: MA Experiment 20000179 PARAMETER Experiment Name: At_Germinating_Seeds_P Parameter: Age (hr) Value: 6 vs. 0
  misc_feature: MA Experiment 20000179 PARAMETER Experiment Name: At_Germinating_Seeds_P Parameter: Tissue Value: Germinating Seeds
  misc_feature: MA Experiment ID: 20000180 Result: Up-regulated in Transcription
  misc_feature: MA Experiment 20000180 PARAMETER Experiment Name: At_Germinating_Seeds_P Parameter: Age (hr) Value: 24 vs. 0
  misc_feature: MA Experiment 20000180 PARAMETER Experiment Name: At_Germinating_Seeds_P Parameter: Tissue Value: Germinating Seeds
  misc_feature: MA Experiment ID: 20000185 Result: Down-regulated in Transcription
  misc_feature: MA Experiment 20000185 PARAMETER Experiment Name: At_Roots__P Parameter: Age (day) Value: 7 vs. 21
  misc_feature: MA Experiment 20000185 PARAMETER Experiment Name: At_Roots__P Parameter: Organism Value: A. thaliana
  misc_feature: MA Experiment 20000185 PARAMETER Experiment Name: At_Roots__P Parameter: Tissue Value: Roots vs. Whole Plant
  misc_feature: MA Experiment ID: 20000269 Result: Down-regulated in Transcription
  misc_feature: MA Experiment 20000269 PARAMETER Experiment Name: At_1mM_KNO3_L-vs-H_Roots_P Parameter: Age (day) Value: 7,10,12
  misc_feature: MA Experiment 20000269 PARAMETER Experiment Name: At_1mM_KNO3_L-vs-H_Roots_P Parameter: Organism Value: A. thaliana
  misc_feature: MA Experiment 20000269 PARAMETER Experiment Name: At_1mM_KNO3_L-vs-H_Roots_P Parameter: Plant Line Value: WS
  misc_feature: MA Experiment 20000269 PARAMETER Experiment Name: At_1mM_KNO3_L-vs-H_Roots_P Parameter: Timepoint (day) Value: 7,10,12
  misc_feature: MA Experiment 20000269 PARAMETER Experiment Name: At_1mM_KNO3_L-vs-H_Roots_P Parameter: Tissue Value: Roots
  misc_feature: MA Experiment 20000269 PARAMETER Experiment Name: At_1mM_KNO3_L-vs-H_Roots_P Parameter: Treatment Value: 1mM KNO3 vs. 50mM KNO3
  misc_feature: MA Experiment ID: 20000439 Result: Down-regulated in Transcription
  misc_feature: MA Experiment 20000439 PARAMETER Experiment Name: At_Roots__P Parameter: Age (day) Value: 14 vs. 21
  misc_feature: MA Experiment 20000439 PARAMETER Experiment Name: At_Roots__P Parameter: Organism Value: A. thaliana
  misc_feature: MA Experiment 20000439 PARAMETER Experiment Name: At_Roots__P Parameter: Tissue Value: Roots vs. Whole Plant
  misc_feature: MA Experiment ID: 20000794 Result: Down-regulated in Transcription
  misc_feature: MA Experiment 20000794 PARAMETER Experiment Name: At_Petals_P Parameter: Age (day) Value: 23-25 days
  misc_feature: MA Experiment 20000794 PARAMETER Experiment Name: At_Petals_P Parameter: Plant Line Value: WS
  misc_feature: MA Experiment 20000794 PARAMETER Experiment Name: At_Petals_P Parameter: Tissue Value: Petals vs. Whole plant
  misc_feature: MA Experiment ID: 20001557 Result: Down-regulated in Transcription
  misc_feature: MA Experiment 20001557 PARAMETER Experiment Name: At_Drought_Soil_Dry_P Parameter: Age (day) Value: 27
  misc_feature: MA Experiment 20001557 PARAMETER Experiment Name: At_Drought_Soil_Dry_P Parameter: Organism Value: A. thaliana
  misc_feature: MA Experiment 20001557 PARAMETER Experiment Name: At_Drought_Soil_Dry_P Parameter: Plant Line Value: WS
  misc_feature: MA Experiment 20001557 PARAMETER Experiment Name: At_Drought_Soil_Dry_P Parameter: Post Timepoint (hr) Value: 3
  misc_feature: MA Experiment 20001557 PARAMETER Experiment Name: At_Drought_Soil_Dry_P Parameter: Post-Treatment Value: Re-Water vs. No Drought
  misc_feature: MA Experiment 20001557 PARAMETER Experiment Name: At_Drought_Soil_Dry_P Parameter: Timepoint (day) Value: 13
  misc_feature: MA Experiment 20001557 PARAMETER Experiment Name: At_Drought_Soil_Dry_P Parameter: Treatment Value: Drought vs. No Drought
  misc_feature: MA Experiment ID: 20001757 Result: Up-regulated in Transcription
  misc_feature: MA Experiment 20001757 PARAMETER Experiment Name: At_50mM_NH4NO3_L-to-H_P Parameter: Timepoint (hr) Value: 6
  misc_feature: MA Experiment 20001757 PARAMETER Experiment Name: At_50mM_NH4NO3_L-to-H_P Parameter: Tissue Value: Leaf
  misc_feature: MA Experiment 20001757 PARAMETER Experiment Name: At_50mM_NH4NO3_L-to-H_P Parameter: Treatment Value: 50mM NH4NO3 vs 100mM Mannitol
  misc_feature: MA Experiment ID: 20001904 Result: Down-regulated in Transcription
  misc_feature: MA Experiment 20001904 PARAMETER Experiment Name: At_Drought_Reproduction_P Parameter: Age (day) Value: 37
  misc_feature: MA Experiment 20001904 PARAMETER Experiment Name: At_Drought_Reproduction_P Parameter: Organism Value: A. thaliana
  misc_feature: MA Experiment 20001904 PARAMETER Experiment Name: At_Drought_Reproduction_P Parameter: Plant Line Value: WS
  misc_feature: MA Experiment 20001904 PARAMETER Experiment Name: At_Drought_Reproduction_P Parameter: Timepoint (day) Value: 7
  misc_feature: MA Experiment 20001904 PARAMETER Experiment Name: At_Drought_Reproduction_P Parameter: Tissue Value: Rosettes
  misc_feature: MA Experiment 20001904 PARAMETER Experiment Name: At_Drought_Reproduction_P Parameter: Treatment Value: Drought vs. No Drought
  misc_feature: MA Experiment ID: 20001906 Result: Down-regulated in Transcription
  misc_feature: MA Experiment 20001906 PARAMETER Experiment Name: At_Drought_Reproduction_P Parameter: Age (day) Value: 35
  misc_feature: MA Experiment 20001906 PARAMETER Experiment Name: At_Drought_Reproduction_P Parameter: Organism Value: A. thaliana
  misc_feature: MA Experiment 20001906 PARAMETER Experiment Name: At_Drought_Reproduction_P Parameter: Plant Line Value: WS
  misc_feature: MA Experiment 20001906 PARAMETER Experiment Name: At_Drought_Reproduction_P Parameter: Timepoint (day) Value: 5
  misc_feature: MA Experiment 20001906 PARAMETER Experiment Name: At_Drought_Reproduction_P Parameter: Tissue Value: Siliques
  misc_feature: MA Experiment 20001906 PARAMETER Experiment Name: At_Drought_Reproduction_P Parameter: Treatment Value: Drought vs. No Drought
actttcaacttaatcacacacaaggagagaagagagaaagagagaaagagagacagagataatggcgtacagtgcgtgtttcctacaccagagcgcattggcttcatcagccgcacgatcatcatcttcctcctcatcccagcgtcacgtgtcgctctccaaacctgttcagatcatctgtaaagctcaacagtctcatgaagacgataactccgccgtctcccgccgtcttgctctcactctcctcgtcggcgccgctgctgttggttccaaagtatctcctgctgatgccgcctacggtgaagctgcaaacgtgtttgggaagccaaagacgaacacagacttcttgccatacaatggagatgggttcaaagtgcaggttccagcaaaatggaacccaagcaaagagattgagtatccaggacaagtccttaggttcgaagacaacttcgatgctactagcaatctcaatgtcatggtcactcctaccgacaagaagtccatcactgattacggttctcccgaagagttcctctctcaggttaattacctcctagggaaacaagcttacttcggtgagactgcctctgagggaggctttgacaacaatgcagtggcaacagcaaacattctggagtcatcatctcaggaagttggtgggaaaccctactattacttgtctgtgttgacaagaacggctgatggagacgaaggtgggaagcatcagctgatcacagcaaccgtgaatggagggaagctttacatctgcaaagcacaagctggagacaagaggtggttcaagggagccaggaaatttgtcgagagcgcagccacttctttcagtgttgcttgagtgaaagcaacacaacgtaacaatgctctgcttgctttcttcatttgtctcttgtaaaaaatggaaaatgaaactgagcttttgagaactatcaagatgatgttaccttttcggcatcacttgtgtacctatgataacagactcgttttccaagttttcttaaaaaacaactatattc

SEQ ID NO: 43400 - protein, 263 aa, Arabidopsis thaliana; identical to SEQ ID NO: 22602
  peptide (1)..(263): Ceres Seq. ID no. 12602944
  misc_feature (61)..(263): Pfam Name: PsbP Pfam Description: PsbP
  misc_feature (2)..(263): Homolog of NCBI NO: 266856 NR Description: Oxygen-evolving enhancer protein 2, chloroplast (OEE2) (23 kDa subunit of oxygen evolving system of photosystem
  misc_feature (1)..(263): Homolog of NCBI NO: 417604 NR Description: 23 kDa polypeptide of water-oxidizing complex of
  misc_feature (8)..(263): Homolog of NCBI NO: 19898 NR Description: photosystem II 23 kDa polypeptide [Nicotiana
  misc_feature (6)..(263): Homolog of NCBI NO: 1345550 NR Description: 23-kDa ploypeptide of photosystem II
  misc_feature (1)..(263): Homolog of NCBI NO: 7443216 NR Description: photosystem II oxygen-evolving complex protein 2
  misc_feature (1)..(263): Homolog of NCBI NO: 15224572 NR Description: photosystem II oxygen-evolving complex 23 (OEC23)
  misc_feature (13)..(263): Homolog of NCBI NO: 81723 NR Description: photosystem II oxygen-evolving complex protein 2
  misc_feature (1)..(263): Homolog of NCBI NO: 11133887 NR Description: OXYGEN-EVOLVING ENHANCER PROTEIN 2-2, CHLOROPLAST (OEE2) (23 KDA SUBUNIT OF OXYGEN EVOLVING SYSTEM OF PHOTOSYSTEM
  misc_feature (1)..(263): Homolog of NCBI NO: 131391 NR Description: Oxygen-evolving enhancer protein 2, chloroplast (OEE2) (23 kDa subunit of oxygen evolving system of photosystem
  misc_feature (1)..(263): Homolog of NCBI NO: 15222166 NR Description: photosystem II oxygen-evolving complex 23 (OEC23)

SEQ ID NO: 43401 - DNA, 1352 bp, Arabidopsis thaliana
  misc_feature (1)..(1352): Ceres Seq. ID no. 12603503
  misc_feature: MA Experiment ID: 20000179 Result: Down-regulated in Transcription
  misc_feature: MA Experiment 20000179 PARAMETER Experiment Name: At_Germinating_Seeds_P Parameter: Age (hr) Value: 6 vs. 0
  misc_feature: MA Experiment 20000179 PARAMETER Experiment Name: At_Germinating_Seeds_P Parameter: Tissue Value: Germinating Seeds
  misc_feature: MA Experiment ID: 20000180 Result: Down-regulated in Transcription
  misc_feature: MA Experiment 20000180 PARAMETER Experiment Name: At_Germinating_Seeds_P Parameter: Age (hr) Value: 24 vs. 0
  misc_feature: MA Experiment 20000180 PARAMETER Experiment Name: At_Germinating_Seeds_P Parameter: Tissue Value: Germinating Seeds
atacttttctttgagctcaagaaatatagtttactaaaaggctgggtttttctggatttcttactcccaaaccgatacaagatcgaagctttgccttctgtttcttttgagaatctaccatggctgctctacaataccttgaatcgcagaaaaatgcgcacccagagcttggtgagtggtacaattcgctcgcagatctgtaccagaagaagctctggcatcagctcactcttaagctcgagcagttcatcgctctctctgtctttcaggctggagatgctttaatacagctttacaacaatttcatcactgactttgagacgaggatcaatcttctgaagcttgcgcatttcgctgttgtagtctcccgacagtatcctgagaaagaagctgcagttagttatcttgaaggagtgattgagaagcttaaagctactaaagagtcaaggataaatgaaccaattagctatatagaaacacaaatagctttgttcaagcttgagcaaggtgaccagaaggagtgcaagaaaatcttggacgatggaaaaagcctgcttgatagtatgactgacattgatccatcagtttatgccaacttcttttgggtctcttctcagtaccataaagtccgtcaagagttctctgagttctataaaaatgctcttctttacctcgcttatacgtctgtggactcactctcggaatcatttaagctggatttggcttttgatttgtcgctttcagctctacttggggagaatatctataactttggggaactgttagcccatccaattttgaaaagtctgcttggaacaaatgtggaatggctttaccacattctacaagcattcaaccacggagatttagttcagtaccaagaactctgtcgtgtgcacaatgcatcgttgagtgctcaaccagcactggttgagaatgagaagaaactattagagaagatcaacattctctgccttattgagatcattttcagccgacctgctgaagataggaccatacctttgagtgtcattgccgagcgtactaaactttcaatcgaagatgttgagcaccttctcatgaagagcttatcgactcgaaatcttcttgaatgtgtgattctgtattggttgattgtgaaaactgaggagaatgagttattgcaggtgcacttgatagagggaatactagatcaggtgaatggaacagtttacgtctcatgggcgcaaccgagggtgttaggaataccgcagatcaagtcattgagggatcagctagacagctgggtcgataaggttcacaccacattgttatctgttgaggccgagacacctgatcttgttgcagcttaa

SEQ ID NO: 43402 - protein, 410 aa, Arabidopsis thaliana
  peptide (1)..(410): Ceres Seq. ID no. 12603504
  misc_feature (236)..(334): Pfam Name: PCI domain Pfam Description: PCI domain
  misc_feature (6)..(325): Homolog of NCBI NO: 3618343 NR Description: 26S proteasome subunit p40.5 [Homo sapiens]
  misc_feature (348)..(408): Homolog of NCBI NO: 29612578 NR Description: Similar to proteasome (prosome, macropain) 26S
  misc_feature (4)..(325): Homolog of NCBI NO: 29612578 NR Description: Similar to proteasome (prosome, macropain) 26S
  misc_feature (348)..(410): Homolog of NCBI NO: 17298163 NR Description: 26S proteasome regulatory particle non-ATPase
  misc_feature (106)..(334): Homolog of NCBI NO: 17298163 NR Description: 26S proteasome regulatory particle non-ATPase
  misc_feature (1)..(364): Homolog of NCBI NO: 22327608 NR Description: 26S proteasome regulatory subunit (RPN9), putative
  misc_feature (348)..(410): Homolog of NCBI NO: 34914614 NR Description: putative 26S proteasome subunit
  misc_feature (3)..(334): Homolog of NCBI NO: 34914614 NR Description: putative 26S proteasome subunit
  misc_feature (1)..(325): Homolog of NCBI NO: 9758666 NR Description: 26S proteasome subunit-like protein [Arabidopsis
  misc_feature (1)..(364): Homolog of NCBI NO: 30684612 NR Description: 26S proteasome regulatory subunit (RPN9) -related
MAALQYLESQKNAHPELGEWYNSLADLYQKKLWHQLTLKLEQFIALSVFQAGDALIQLYNNFITDFETRINLLKLAHFAVVVSRQYPEKEAAVSYLEGVIEKLKATKESRINEPISYIETQIALFKLEQGDQKECKKILDDGKSLLDSMTDIDPSVYANFFWVSSQYHKVRQEFSEFYKNALLYLAYTSVDSLSESFKLDLAFDLSLSALLGENIYNFGELLAHPILKSLLGTNVEWLYHILQAFNHGDLVQYQELCRVHNASLSAQPALVENEKKLLEKINILCLIEIIFSRPAEDRTIPLSVIAERTKLSIEDVEHLLMKSLSTRNLLECVILYWLIVKTEENELLQVHLIEGILDQVNGTVYVSWAQPRVLGIPQIKSLRDQLDSWVDKVHTTLLSVEAETPDLVAA

SEQ ID NO: 43403 - protein, 262 aa, Arabidopsis thaliana
  peptide (1)..(262): Ceres Seq. ID no. 12603505
  misc_feature (88)..(186): Pfam Name: PCI domain Pfam Description: PCI domain
  misc_feature (1)..(177): Homolog of NCBI NO: 3618343 NR Description: 26S proteasome subunit p40.5 [Homo sapiens]
  misc_feature (200)..(260): Homolog of NCBI NO: 29612578 NR Description: Similar to proteasome (prosome, macropain) 26S
  misc_feature (1)..(177): Homolog of NCBI NO: 29612578 NR Description: Similar to proteasome (prosome, macropain) 26S
  misc_feature (200)..(262): Homolog of NCBI NO: 17298163 NR Description: 26S proteasome regulatory particle non-ATPase
  misc_feature (1)..(186): Homolog of NCBI NO: 17298163 NR Description: 26S proteasome regulatory particle non-ATPase
  misc_feature (1)..(216): Homolog of NCBI NO: 22327608 NR Description: 26S proteasome regulatory subunit (RPN9), putative
  misc_feature (200)..(262): Homolog of NCBI NO: 34914614 NR Description: putative 26S proteasome subunit
  misc_feature (1)..(186): Homolog of NCBI NO: 34914614 NR Description: putative 26S proteasome subunit
  misc_feature (1)..(177): Homolog of NCBI NO: 9758666 NR Description: 26S proteasome subunit-like protein [Arabidopsis
  misc_feature (1)..(216): Homolog of NCBI NO: 30684612 NR Description: 26S proteasome regulatory subunit (RPN9) -related
MTDIDPSVYANFFWVSSQYHKVRQEFSEFYKNALLYLAYTSVDSLSESFKLDLAFDLSLSALLGENIYNFGELLAHPILKSLLGTNVEWLYHILQAFNHGDLVQYQELCRVHNASLSAQPALVENEKKLLEKINILCLIEIIFSRPAEDRTIPLSVIAERTKLSIEDVEHLLMKSLSTRNLLECVILYWLIVKTEENELLQVHLIEGILDQVNGTVYVSWAQPRVLGIPQIKSLRDQLDSWVDKVHTTLLSVEAETPDLVAA

SEQ ID NO: 43404 - DNA, 870 bp, Arabidopsis thaliana
  misc_feature (1)..(870): Ceres Seq. ID no. 12326553
aaagcaattgtcagatttcagcatctcccatggaggaatcaagattcgattctgaagatgttgattatgctgagattgttgttgttcgtcatggtgaaacatcttggaatgccgagagaaaaatccagggtcatttggatgttgagttaaatgatgcaggaagacaacaagcacaaagagttgcagagcggttatcgaaggagcagaagatatctcatgtatactcttctgacttgaagagagcctttgagactgctcagatcattgctgctaaatgcggcaagcttgaggtgcttaccgatcgtgatttgcgggaaagacatttaggagatatgcaagggcttgtgtatcaagaagcttcgaaaattcgtccggaagcttacaaggctttttcatctaaccgcacagacgttgatattccaggtggaggagaaagtcttgataaactttacgatagatgtacaactgcattacagagaatcggcgacaaacataaaggtgaaagagtagtagtagtgactcatggaggtgtgattcgatctctctacgaaagagctcgtccaagcgcaagaaaagttgaaaagatactcaatacatcggttaatgtgttccgtttattcgacggagacaaatggaccatccaagtttggggtgatgtgagtcatctcgaccaaaccggcttcttacaatcaggttttggtggtgatagaacctctggttagattctatactcttcttccccttggaagagcatttatgtaatttaagtttccgattttaacatttgaccccataactttaataaagtgatttgggaggattgataaagtaaattgctataaatttctactgtcaaatgttatatggttc

SEQ ID NO: 43405 - protein, 239 aa, Arabidopsis thaliana
  peptide (1)..(239): Ceres Seq. ID no. 12326554
  misc_feature (23)..(216): Pfam Name: Phosphoglycerate mutase family Pfam Description: Phosphoglycerate mutase family
  misc_feature (25)..(224): Homolog of NCBI NO: 23200124 NR Description: Chain A, Bacillus Stearothermophilus Phoe
  misc_feature (24)..(223): Homolog of NCBI NO: 22988026 NR Description: hypothetical protein [Burkholderia fungorum]
  misc_feature (24)..(226): Homolog of NCBI NO: 33596671 NR Description: probable phosphoglycerate mutase 2 [Bordetella
  misc_feature (24)..(226): Homolog of NCBI NO: 33592552 NR Description: probable phosphoglycerate mutase 2 [Bordetella
  misc_feature (25)..(223): Homolog of NCBI NO: 17545218 NR Description: PUTATIVE PHOSPHOGLYCERATE MUTASE 2 PROTEIN
  misc_feature (87)..(235): Homolog of NCBI NO: 26450240 NR Description: putative phosphoglycerate mutase [Arabidopsis
  misc_feature (18)..(223): Homolog of NCBI NO: 22976134 NR Description: hypothetical protein [Ralstonia metallidurans]
  misc_feature (17)..(235): Homolog of NCBI NO: 15237633 NR Description: phosphoglycerate mutase - like protein; protein
  misc_feature (17)..(235): Homolog of NCBI NO: 9955567 NR Description: phosphoglycerate mutase-like protein [Arabidopsis
  misc_feature (10)..(239): Homolog of NCBI NO: 15229783 NR Description: putative protein
SNCQISASPMEESRFDSEDVDYAEIVVVRHGETSWNAERKIQGHLDVELNDAGRQQAQRVAERLSKEQKISHVYSSDLKRAFETAQIIAAKCGKLEVLTDRDLRERHLGDMQGLVYQEASKIRPEAYKAFSSNRTDVDIPGGGESLDKLYDRCTTALQRIGDKHKGERVVVVTHGGVIRSLYERARPSARKVEKILNTSVNVFRLFDGDKWTIQVWGDVSHLDQTGFLQSGFGGDRTSG

SEQ ID NO: 43406 - protein, 230 aa, Arabidopsis thaliana
  peptide (1)..(230): Ceres Seq. ID no. 12326555
  misc_feature (14)..(207): Pfam Name: Phosphoglycerate mutase family Pfam Description: Phosphoglycerate mutase family
  misc_feature (16)..(215): Homolog of NCBI NO: 23200124 NR Description: Chain A, Bacillus Stearothermophilus Phoe
  misc_feature (15)..(214): Homolog of NCBI NO: 22988026 NR Description: hypothetical protein [Burkholderia fungorum]
  misc_feature (15)..(217): Homolog of NCBI NO: 33596671 NR Description: probable phosphoglycerate mutase 2 [Bordetella
  misc_feature (15)..(217): Homolog of NCBI NO: 33592552 NR Description: probable phosphoglycerate mutase 2 [Bordetella
  misc_feature (16)..(214): Homolog of NCBI NO: 17545218 NR Description: PUTATIVE PHOSPHOGLYCERATE MUTASE 2 PROTEIN
  misc_feature (78)..(226): Homolog of NCBI NO: 26450240 NR Description: putative phosphoglycerate mutase [Arabidopsis
  misc_feature (9)..(214): Homolog of NCBI NO: 22976134 NR Description: hypothetical protein [Ralstonia metallidurans]
  misc_feature (8)..(226): Homolog of NCBI NO: 15237633 NR Description: phosphoglycerate mutase - like protein; protein
  misc_feature (8)..(226): Homolog of NCBI NO: 9955567 NR Description: phosphoglycerate mutase-like protein [Arabidopsis
  misc_feature (1)..(230): Homolog of NCBI NO: 15229783 NR Description: putative protein
MEESRFDSEDVDYAEIVVVRHGETSWNAERKIQGHLDVELNDAGRQQAQRVAERLSKEQKISHVYSSDLKRAFETAQIIAAKCGKLEVLTDRDLRERHLGDMQGLVYQEASKIRPEAYKAFSSNRTDVDIPGGGESLDKLYDRCTTALQRIGDKHKGERVVVVTHGGVIRSLYERARPSARKVEKILNTSVNVFRLFDGDKWTIQVWGDVSHLDQTGFLQSGFGGDRTSG

SEQ ID NO: 43407 - protein, 129 aa, Arabidopsis thaliana
  peptide (1)..(129): Ceres Seq. ID no. 12326556
  misc_feature (1)..(106): Pfam Name: Phosphoglycerate mutase family Pfam Description: Phosphoglycerate mutase family
  misc_feature (1)..(114): Homolog of NCBI NO: 23200124 NR Description: Chain A, Bacillus Stearothermophilus Phoe
  misc_feature (1)..(113): Homolog of NCBI NO: 22988026 NR Description: hypothetical protein [Burkholderia fungorum]
  misc_feature (1)..(116): Homolog of NCBI NO: 33596671 NR Description: probable phosphoglycerate mutase 2 [Bordetella
  misc_feature (1)..(116): Homolog of NCBI NO: 33592552 NR Description: probable phosphoglycerate mutase 2 [Bordetella
  misc_feature (1)..(113): Homolog of NCBI NO: 17545218 NR Description: PUTATIVE PHOSPHOGLYCERATE MUTASE 2 PROTEIN
  misc_feature (1)..(125): Homolog of NCBI NO: 26450240 NR Description: putative phosphoglycerate mutase [Arabidopsis
  misc_feature (1)..(113): Homolog of NCBI NO: 22976134 NR Description: hypothetical protein [Ralstonia metallidurans]
  misc_feature (1)..(125): Homolog of NCBI NO: 15237633 NR Description: phosphoglycerate mutase - like protein; protein
  misc_feature (1)..(125): Homolog of NCBI NO: 9955567 NR Description: phosphoglycerate mutase-like protein [Arabidopsis
  misc_feature (1)..(129): Homolog of NCBI NO: 15229783 NR Description: putative protein
MQGLVYQEASKIRPEAYKAFSSNRTDVDIPGGGESLDKLYDRCTTALQRIGDKHKGERVVVVTHGGVIRSLYERARPSARKVEKILNTSVNVFRLFDGDKWTIQVWGDVSHLDQTGFLQSGFGGDRTSG

SEQ ID NO: 43408 - DNA, 1475 bp, Arabidopsis thaliana
  misc_feature (1)..(1475): Ceres Seq. ID no. 12336500
  misc_feature: MA Experiment ID: 108462 Result: Up-regulated in Transcription
  misc_feature: MA Experiment 108462 PARAMETER Experiment Name: At_Germinating_Seeds_cDNA_P Parameter: Age (day) Value: 2 vs. 0
  misc_feature: MA Experiment 108462 PARAMETER Experiment Name: At_Germinating_Seeds_cDNA_P Parameter: Tissue Value: Germinating Seeds
  misc_feature: MA Experiment ID: 20000171 Result: Up-regulated in Transcription
  misc_feature: MA Experiment 20000171 PARAMETER Experiment Name: At_42deg_Heat_P Parameter: Age (day) Value: 14
  misc_feature: MA Experiment 20000171 PARAMETER Experiment Name: At_42deg_Heat_P Parameter: Organism Value: A. thaliana
  misc_feature: MA Experiment 20000171 PARAMETER Experiment Name: At_42deg_Heat_P Parameter: Plant Line Value: WS
  misc_feature: MA Experiment 20000171 PARAMETER Experiment Name: At_42deg_Heat_P Parameter: Temperature (deg C) Value: 42 vs. 22
  misc_feature: MA Experiment 20000171 PARAMETER Experiment Name: At_42deg_Heat_P Parameter: Timepoint (hr) Value: 1
  misc_feature: MA Experiment 20000171 PARAMETER Experiment Name: At_42deg_Heat_P Parameter: Tissue Value: Aerial
  misc_feature: MA Experiment ID: 20000173 Result: Up-regulated in Transcription
  misc_feature: MA Experiment 20000173 PARAMETER Experiment Name: At_42deg_Heat_P Parameter: Age (day) Value: 14
  misc_feature: MA Experiment 20000173 PARAMETER Experiment Name: At_42deg_Heat_P Parameter: Organism Value: A. thaliana
  misc_feature: MA Experiment 20000173 PARAMETER Experiment Name: At_42deg_Heat_P Parameter: Plant Line Value: WS
  misc_feature: MA Experiment 20000173 PARAMETER Experiment Name: At_42deg_Heat_P Parameter: Temperature (deg C) Value: 42 vs. 22
  misc_feature: MA Experiment 20000173 PARAMETER Experiment Name: At_42deg_Heat_P Parameter: Timepoint (hr) Value: 6
  misc_feature: MA Experiment 20000173 PARAMETER Experiment Name: At_42deg_Heat_P Parameter: Tissue Value: Aerial
aagcaacctcatttataaacccctcgatttcttgcgttgttttcgaatttttattctctttcttttttttcttctcctctcgattcgaaaatttcacatctccggaattttcatttctggagaatattgtttcacatccctacaatggcgtctgagaatctgaatgacaagatctctgtttttaagaaactcaaagccaaatcagataataagatttgttttgattgcaatgcgaagaacccaacatgggcttccgttacttacgggatctttctctgcatcgattgctcagctgttcatcggagtcttggcgtccacattagcttcgtcaggtcaaccaatttagattcatggagctcagagcaattgaaaatgatgatatatggaggaaacaacagggcacaagtctttttcaaacagtacggatggagcgatggaggtaaaaccgaggctaagtatacctcaagagctgctgatttgtataaacagatacttgctaaagaagttgcaaaaagcaaggctgaggaagaattggatttgcctccatctcctcctgattcaacacaagtgcctaatggactctccagcatcaaaaccagtgaagctcttaaagagagtaatactctaaagcagcaagaaaagcctgatgttgttcccgtctcaccaagaatttctcgcagcgttaagaaacctcttggtgctaagaagacaggcaaaactggcggacttggcgcccggaagctaactactaagtcgagcgggactctttatgatcaaaagccagaggaatctgttattatacaagcgacatcaccagtttcagctaaatcagccaggtcatcgttttcctctcgttttgattatgcggacaatgttcaaaacagggaagattacatgagccctcaagtcgttagtcatgtagctccaccaaaatcatcaggcttctttgaggaagagttggagatgaacggaggcaggtttcagaagaaaccaatcacaagttcctcaaaactgcaaattcaagaaacagacgaagcacggaagaaattcacaaacgccaaatcaatatcctctgctcagtactttggaaatgacaacaactctgctgaccttgaggccaaaagttcattgaagaagttttctggttcatcagcaatctctagtgctgatctgtttggagacggtgatggagatttccctcttgatctcactgcgggtgatcttctcaaccgcctatctctccaggcacaacaagacatatcatcattgaagaacatggcagaggagacaaagaagaagcttggctctgttgcttccagcttatgggtttgaaatgttcataattttctctaaagtccatcaaaacttttttattttattttttcttactctaatttccatttacaaaagcagttatcctattcttttactagggaaactctgttttgtttaattgaaagttaccaatattttgt

SEQ ID NO: 43409 - protein, 395 aa, Arabidopsis thaliana
  peptide (1)..(395): Ceres Seq. ID no. 12336501
  misc_feature (10)..(126): Pfam Name: Putative GTPase activating protein for Arf Pfam Description: Putative GTPase activating protein for Arf
  misc_feature (141)..(393): Homolog of NCBI NO: 37362182 NR Description: ADP-ribosylation factor GTPase activating protein
  misc_feature (292)..(393): Homolog of NCBI NO: 27695479 NR Description: Similar to ADP-ribosylation factor GTPase
  misc_feature (1)..(141): Homolog of NCBI NO: 27695479 NR Description: Similar to ADP-ribosylation factor GTPase
  misc_feature (1)..(392): Homolog of NCBI NO: 29126345 NR Description: putative zinc finger protein
  misc_feature (8)..(393): Homolog of NCBI NO: 37537094 NR Description: unknown protein [Oryza sativa (japonica
  misc_feature (2)..(394): Homolog of NCBI NO: 13430530 NR Description: unknown protein [Arabidopsis thaliana]
  misc_feature (2)..(394): Homolog of NCBI NO: 18414983 NR Description: Expressed protein; protein id: At4g17890.1
  misc_feature (2)..(394): Homolog of NCBI NO: 7487780 NR Description: hypothetical protein T6K21.70 - Arabidopsis
  misc_feature (1)..(394): Homolog of NCBI NO: 15237500 NR Description: zinc finger protein Glo3-like
  misc_feature (1)..(395): Homolog of NCBI NO: 18403775 NR Description: expressed protein
MASENLNDKISVFKKLKAKSDNKICFDCNAKNPTWASVTYGIFLCIDCSAVHRSLGVHISFVRSTNLDSWSSEQLKMMIYGGNNRAQVFFKQYGWSDGGKTEAKYTSRAADLYKQILAKEVAKSKAEEELDLPPSPPDSTQVPNGLSSIKTSEALKESNTLKQQEKPDVVPVSPRISRSVKKPLGAKKTGKTGGLGARKLTTKSSGTLYDQKPEESVIIQATSPVSAKSARSSFSSRFDYADNVQNREDYMSPQVVSHVAPPKSSGFFEEELEMNGGRFQKKPITSSSKLQIQETDEARKKFTNAKSISSAQYFGNDNNSADLEAKSSLKKFSGSSAISSADLFGDGDGDFPLDLTAGDLLNRLSLQAQQDISSLKNMAEETKKKLGSVASSLWV

SEQ ID NO: 43410 - protein, 319 aa, Arabidopsis thaliana
  peptide (1)..(319): Ceres Seq. ID no. 12336502
  misc_feature (65)..(317): Homolog of NCBI NO: 37362182 NR Description: ADP-ribosylation factor GTPase activating protein
  misc_feature (216)..(317): Homolog of NCBI NO: 27695479 NR Description: Similar to ADP-ribosylation factor GTPase
  misc_feature (1)..(65): Homolog of NCBI NO: 27695479 NR Description: Similar to ADP-ribosylation factor GTPase
  misc_feature (1)..(316): Homolog of NCBI NO: 29126345 NR Description: putative zinc finger protein
  misc_feature (1)..(317): Homolog of NCBI NO: 37537094 NR Description: unknown protein [Oryza sativa (japonica
  misc_feature (1)..(318): Homolog of NCBI NO: 13430530 NR Description: unknown protein [Arabidopsis thaliana]
  misc_feature (1)..(318): Homolog of NCBI NO: 18414983 NR Description: Expressed protein; protein id: At4g17890.1
  misc_feature (1)..(318): Homolog of NCBI NO: 7487780 NR Description: hypothetical protein T6K21.70 - Arabidopsis
  misc_feature (1)..(318): Homolog of NCBI NO: 15237500 NR Description: zinc finger protein Glo3-like
  misc_feature (1)..(319): Homolog of NCBI NO: 18403775 NR Description: expressed protein
MMIYGGNNRAQVFFKQYGWSDGGKTEAKYTSRAADLYKQILAKEVAKSKAEEELDLPPSPPDSTQVPNGLSSIKTSEALKESNTLKQQEKPDVVPVSPRISRSVKKPLGAKKTGKTGGLGARKLTTKSSGTLYDQKPEESVIIQATSPVSAKSARSSFSSRFDYADNVQNREDYMSPQVVSHVAPPKSSGFFEEELEMNGGRFQKKPITSSSKLQIQETDEARKKFTNAKSISSAQYFGNDNNSADLEAKSSLKKFSGSSAISSADLFGDGDGDFPLDLTAGDLLNRLSLQAQQDISSLKNMAEETKKKLGSVASSLWV

SEQ ID NO: 43411 - protein, 318 aa, Arabidopsis thaliana
  peptide (1)..(318): Ceres Seq. ID no. 12336503
  misc_feature (64)..(316): Homolog of NCBI NO: 37362182 NR Description: ADP-ribosylation factor GTPase activating protein
  misc_feature (215)..(316): Homolog of NCBI NO: 27695479 NR Description: Similar to ADP-ribosylation factor GTPase
  misc_feature (1)..(64): Homolog of NCBI NO: 27695479 NR Description: Similar to ADP-ribosylation factor GTPase
  misc_feature (1)..(315): Homolog of NCBI NO: 29126345 NR Description: putative zinc finger protein
  misc_feature (1)..(316): Homolog of NCBI NO: 37537094 NR Description: unknown protein [Oryza sativa (japonica
  misc_feature (1)..(317): Homolog of NCBI NO: 13430530 NR Description: unknown protein [Arabidopsis thaliana]
  misc_feature (1)..(317): Homolog of NCBI NO: 18414983 NR Description: Expressed protein; protein id: At4g17890.1
  misc_feature (1)..(317): Homolog of NCBI NO: 7487780 NR Description: hypothetical protein T6K21.70 - Arabidopsis
  misc_feature (1)..(317): Homolog of NCBI NO: 15237500 NR Description: zinc finger protein Glo3-like
  misc_feature (1)..(318): Homolog of NCBI NO: 18403775 NR Description: expressed protein
MIYGGNNRAQVFFKQYGWSDGGKTEAKYTSRAADLYKQILAKEVAKSKAEEELDLPPSPPDSTQVPNGLSSIKTSEALKESNTLKQQEKPDVVPVSPRISRSVKKPLGAKKTGKTGGLGARKLTTKSSGTLYDQKPEESVIIQATSPVSAKSARSSFSSRFDYADNVQNREDYMSPQVVSHVAPPKSSGFFEEELEMNGGRFQKKPITSSSKLQIQETDEARKKFTNAKSISSAQYFGNDNNSADLEAKSSLKKFSGSSAISSADLFGDGDGDFPLDLTAGDLLNRLSLQAQQDISSLKNMAEETKKKLGSVASSLWV

SEQ ID NO: 43412 - DNA, 1407 bp, Arabidopsis thaliana
  misc_feature (1)..(1407): Ceres Seq. ID no. 12439618
  misc_feature: MA Experiment ID: 108434 Result: Up-regulated in Transcription
  misc_feature: MA Experiment 108434 PARAMETER Experiment Name: At_Root_Tips_cDNA_P Parameter: Tissue Value: Root Tips
  misc_feature: MA Experiment ID: 108462 Result: Down-regulated in Transcription
  misc_feature: MA Experiment 108462 PARAMETER Experiment Name: At_Germinating_Seeds_cDNA_P Parameter: Age (day) Value: 2 vs. 0
  misc_feature: MA Experiment 108462 PARAMETER Experiment Name: At_Germinating_Seeds_cDNA_P Parameter: Tissue Value: Germinating Seeds
  misc_feature: MA Experiment ID: 108463 Result: Down-regulated in Transcription
  misc_feature: MA Experiment 108463 PARAMETER Experiment Name: At_Germinating_Seeds_cDNA_P Parameter: Age (day) Value: 3 vs. 0
  misc_feature: MA Experiment 108463 PARAMETER Experiment Name: At_Germinating_Seeds_cDNA_P Parameter: Tissue Value: Germinating Seeds
  misc_feature: MA Experiment ID: 108577 Result: Down-regulated in Transcription
  misc_feature: MA Experiment 108577 PARAMETER Experiment Name: At_42deg_Heat_cDNA_P Parameter: Temperature (deg C) Value: 42 vs. 22
  misc_feature: MA Experiment 108577 PARAMETER Experiment Name: At_42deg_Heat_cDNA_P Parameter: Timepoint (hr) Value: 6
  misc_feature: MA Experiment 108577 PARAMETER Experiment Name: At_42deg_Heat_cDNA_P Parameter: Tissue Value: Aerial
  misc_feature: MA Experiment ID: 20000437 Result: Down-regulated in Transcription
  misc_feature: MA Experiment 20000437 PARAMETER Experiment Name: At_Drought_P Parameter: Age (day) Value: 8
  misc_feature: MA Experiment 20000437 PARAMETER Experiment Name: At_Drought_P Parameter: Organism Value: A. thaliana
  misc_feature: MA Experiment 20000437 PARAMETER Experiment Name: At_Drought_P Parameter: Plant Line Value: WS
  misc_feature: MA Experiment 20000437 PARAMETER Experiment Name: At_Drought_P Parameter: Timepoint (hr) Value: 24
  misc_feature: MA Experiment 20000437 PARAMETER Experiment Name: At_Drought_P Parameter: Tissue Value: Whole Plant
  misc_feature: MA Experiment 20000437 PARAMETER Experiment Name: At_Drought_P Parameter: Treatment Value: Drought vs. No Drought
  misc_feature: MA Experiment ID: 20000496 Result: Up-regulated in Transcription
  misc_feature: MA Experiment 20000496 PARAMETER Experiment Name: At_Guard_Cells_P Parameter: Harvest Date Value: 7/19/2002
  misc_feature: MA Experiment 20000496 PARAMETER Experiment Name: At_Guard_Cells_P Parameter: Organism Value: Canola
  misc_feature: MA Experiment 20000496 PARAMETER Experiment Name: At_Guard_Cells_P Parameter: Tissue Value: Guard Cells vs. Leaves
  misc_feature: MA Experiment ID: 20001905 Result: Down-regulated in Transcription
  misc_feature: MA Experiment 20001905 PARAMETER Experiment Name: At_Drought_Reproduction_P Parameter: Age (day) Value: 40
  misc_feature: MA Experiment 20001905 PARAMETER Experiment Name: At_Drought_Reproduction_P Parameter: Organism Value: A. thaliana
  misc_feature: MA Experiment 20001905 PARAMETER Experiment Name: At_Drought_Reproduction_P Parameter: Plant Line Value: WS
  misc_feature: MA Experiment 20001905 PARAMETER Experiment Name: At_Drought_Reproduction_P Parameter: Timepoint (day) Value: 10
  misc_feature: MA Experiment 20001905 PARAMETER Experiment Name: At_Drought_Reproduction_P Parameter: Tissue Value: Rosettes
  misc_feature: MA Experiment 20001905 PARAMETER Experiment Name: At_Drought_Reproduction_P Parameter: Treatment Value: Drought vs. No Drought
atcgaaaatgagatcagagagagaggaggagtctctcatcgtgagtagggcttttgactccctccctactttgcctacttcttcttcttcctctgtggccactctacagtccacacctacttcaagacacctttctcatccttgagatcggcgtcagatcctccgccgcttctcctcttcactatctccggtcacaactcgtttttctctgtttttctttatctctactttatgcacaatctgactttctaagtggatttacagtgttaaagatgatggaatctggcgctggtttcgtggccatggaagagaggatctctcctggaagtttcttccagtatcctctttctggattccgtgcttctcctaatcgatccccttgtcctccctctgatcgtgaaaggtacttgactgaattattgcaagagagacaaaagttgggtccctttttgcaagttatgccaaattgctgcagactgcttaatcatgaaatcaggagggtctctagttttcctgatcttgatagatatgagcatggcagtccatttagatcgcttggtcagccgacaaatggaaagcttgatttagagggatggtcgatgatgcaagccgaggaaaactgtcacctccagagagcttctccatttcgcggtccttccccagtgggctggattgggatgccgggactccctaacccacccattgtgaaaaaagtgattagacttgatgtcccagtggataaatatccaagctataattttgttgggaggattcttgggccacgtggaaactccctaaaaagagttgagctagcaacccactgcagggtgtttatcagaggacgaggatctgtgaaggatactgtcaaggaggaaaaattaaaaggtaagccagggtacgagcatctctgcgagccactacatgtactgatcgaggccgagcttccagaagacataataaactctcgattggagcatgcagtgcatttcctggaatcactcctgaagccgatggacgagtcaatggatcactacaagagggaacagctgaaggagttagcggctttgaatggtacactaagggaggagagtccgagtccgagcttgagcccttgtttgagccccagcatgtcccctttcaacagcaagcgtgctaagacagagatatgatcaagagaaaccactagtgcatgggtcttgtgggcaggatcatgagtttgctaagttctaacgtttggactcttgaattaatttattttgtcattaactttattctttatttttgttggttagctgagatgaccattaaccagtgggtaataaactaataatggtgtttatgaaattgtaatctccttctcaatcattgtaacctttatttaagttttaaaccccaaacgtttatttc

SEQ ID NO: 43413 - protein, 298 aa, Arabidopsis thaliana; identical to SEQ ID NO: 30428
  peptide (1)..(298): Ceres Seq. ID no. 12439619
  misc_feature (150)..(205): Pfam Name: KH domain Pfam Description: KH domain
  misc_feature (41)..(296): Homolog of NCBI NO: 15241136 NR Description: KH domain protein; protein id: At5g56140.1
  misc_feature (30)..(296): Homolog of NCBI NO: 15224909 NR Description: KH domain protein
  misc_feature (41)..(296): Homolog of NCBI NO: 19424087 NR Description: putative RNA-binding protein [Arabidopsis
  misc_feature (31)..(295): Homolog of NCBI NO: 34900448 NR Description: contains EST C27129(C51039)~similar to
  misc_feature (4)..(296): Homolog of NCBI NO: 20268733 NR Description: unknown protein [Arabidopsis thaliana]
  misc_feature (4)..(296): Homolog of NCBI NO: 15236738 NR Description: KH domain protein; protein id: At4g26480.1
  misc_feature (62)..(296): Homolog of NCBI NO: 34907446 NR Description: P0434C04.5 [Oryza sativa (japonica
  misc_feature (136)..(298): Homolog of NCBI NO: 25402559 NR Description: hypothetical protein [imported] - Arabidopsis
  misc_feature (1)..(298): Homolog of NCBI NO: 16930473 NR Description: At1g09660/F21M12_5 [Arabidopsis thaliana]
  misc_feature (1)..(298): Homolog of NCBI NO: 22329449 NR Description: KH domain quaking protein, putative

SEQ ID NO: 43414 - protein, 297 aa, Arabidopsis thaliana; identical to SEQ ID NO: 30429
  peptide (1)..(297): Ceres Seq. ID no. 12439620
  misc_feature (149)..(204): Pfam Name: KH domain Pfam Description: KH domain
  misc_feature (40)..(295): Homolog of NCBI NO: 15241136 NR Description: KH domain protein; protein id: At5g56140.1
  misc_feature (29)..(295): Homolog of NCBI NO: 15224909 NR Description: KH domain protein
  misc_feature (40)..(295): Homolog of NCBI NO: 19424087 NR Description: putative RNA-binding protein [Arabidopsis
  misc_feature (30)..(294): Homolog of NCBI NO: 34900448 NR Description: contains EST C27129(C51039)~similar to
  misc_feature (3)..(295): Homolog of NCBI NO: 20268733 NR Description: unknown protein [Arabidopsis thaliana]
  misc_feature (3)..(295): Homolog of NCBI NO: 15236738 NR Description: KH domain protein; protein id: At4g26480.1
  misc_feature (61)..(295): Homolog of NCBI NO: 34907446 NR Description: P0434C04.5 [Oryza sativa (japonica
  misc_feature (135)..(297): Homolog of NCBI NO: 25402559 NR Description: hypothetical protein [imported] - Arabidopsis
  misc_feature (1)..(297): Homolog of NCBI NO: 16930473 NR Description: At1g09660/F21M12_5 [Arabidopsis thaliana]
  misc_feature (1)..(297): Homolog of NCBI NO: 22329449 NR Description: KH domain quaking protein, putative

SEQ ID NO: 43415 - protein, 288 aa, Arabidopsis thaliana; identical to SEQ ID NO: 30430
  peptide (1)..(288): Ceres Seq. ID no. 12439621
  misc_feature (140)..(195): Pfam Name: KH domain Pfam Description: KH domain
  misc_feature (31)..(286): Homolog of NCBI NO: 15241136 NR Description: KH domain protein; protein id: At5g56140.1
  misc_feature (20)..(286): Homolog of NCBI NO: 15224909 NR Description: KH domain protein
  misc_feature (31)..(286): Homolog of NCBI NO: 19424087 NR Description: putative RNA-binding protein [Arabidopsis
  misc_feature (21)..(285): Homolog of NCBI NO: 34900448 NR Description: contains EST C27129(C51039)~similar to
  misc_feature (1)..(286): Homolog of NCBI NO: 20268733 NR Description: unknown protein [Arabidopsis thaliana]
  misc_feature (1)..(286): Homolog of NCBI NO: 15236738 NR Description: KH domain protein; protein id: At4g26480.1
  misc_feature (52)..(286): Homolog of NCBI NO: 34907446 NR Description: P0434C04.5 [Oryza sativa (japonica
  misc_feature (126)..(288): Homolog of NCBI NO: 25402559 NR Description: hypothetical protein [imported] - Arabidopsis
  misc_feature (1)..(288): Homolog of NCBI NO: 16930473 NR Description: At1g09660/F21M12_5 [Arabidopsis thaliana]
  misc_feature (1)..(288): Homolog of NCBI NO: 22329449 NR Description: KH domain quaking protein, putative

SEQ ID NO: 43416 - DNA, 1177 bp, Arabidopsis thaliana
  misc_feature (1)..(1177): Ceres Seq. ID no. 13493986
  misc_feature: MA Experiment ID: 20000179 Result: Up-regulated in Transcription
  misc_feature: MA Experiment 20000179 PARAMETER Experiment Name: At_Germinating_Seeds_P Parameter: Age (hr) Value: 6 vs. 0
  misc_feature: MA Experiment 20000179 PARAMETER Experiment Name: At_Germinating_Seeds_P Parameter: Tissue Value: Germinating Seeds
  misc_feature: MA Experiment ID: 20000180 Result: Up-regulated in Transcription
  misc_feature: MA Experiment 20000180 PARAMETER Experiment Name: At_Germinating_Seeds_P Parameter: Age (hr) Value: 24 vs. 0
  misc_feature: MA Experiment 20000180 PARAMETER Experiment Name: At_Germinating_Seeds_P Parameter: Tissue Value: Germinating Seeds
  misc_feature: MA Experiment ID: 20000184 Result: Up-regulated in Transcription
  misc_feature: MA Experiment 20000184 PARAMETER Experiment Name: At_Shoots__P Parameter: Age (day) Value: 7
  misc_feature: MA Experiment 20000184 PARAMETER Experiment Name: At_Shoots__P Parameter: Tissue Value: Shoots vs. Whole Plant
  misc_feature: MA Experiment ID: 20000234 Result: Up-regulated in Transcription
  misc_feature: MA Experiment 20000234 PARAMETER Experiment Name: At_Siliques_P Parameter: Age (day) Value: 21
  misc_feature: MA Experiment 20000234 PARAMETER Experiment Name: At_Siliques_P Parameter: Organism Value: A. thaliana
  misc_feature: MA Experiment 20000234 PARAMETER Experiment Name: At_Siliques_P Parameter: Plant Line Value: WS
  misc_feature: MA Experiment 20000234 PARAMETER Experiment Name: At_Siliques_P Parameter: Tissue Value: Less Than 5mm Siliques vs. Whole Plant
  misc_feature: MA Experiment ID: 20000264 Result: Up-regulated in Transcription
  misc_feature: MA Experiment 20000264 PARAMETER Experiment Name: At_Open_Flower_P Parameter: Age (day) Value: 21
  misc_feature: MA Experiment 20000264 PARAMETER Experiment Name: At_Open_Flower_P Parameter: Plant Line Value: WS
  misc_feature: MA Experiment 20000264 PARAMETER Experiment Name: At_Open_Flower_P Parameter: Tissue Value: Open Flower vs. Whole Plant
  misc_feature: MA Experiment ID: 20000438 Result: Up-regulated in Transcription
  misc_feature: MA Experiment 20000438 PARAMETER Experiment Name: At_Shoots__P Parameter: Age (day) Value: 14
  misc_feature: MA Experiment 20000438 PARAMETER Experiment Name: At_Shoots__P Parameter: Tissue Value: Shoots vs. Whole Plant
  misc_feature: MA Experiment ID: 20000794 Result: Up-regulated in Transcription
  misc_feature: MA Experiment 20000794 PARAMETER Experiment Name: At_Petals_P Parameter: Age (day) Value: 23-25 days
  misc_feature: MA Experiment 20000794 PARAMETER Experiment Name: At_Petals_P Parameter: Plant Line Value: WS
  misc_feature: MA Experiment 20000794 PARAMETER Experiment Name: At_Petals_P Parameter: Tissue Value: Petals vs. Whole plant
  misc_feature: MA Experiment ID: 20001248 Result: Down-regulated in Transcription
  misc_feature: MA Experiment 20001248 PARAMETER Experiment Name: At_Far-red-induction_P Parameter: Age (day) Value: 7
  misc_feature: MA Experiment 20001248 PARAMETER Experiment Name: At_Far-red-induction_P Parameter: Light Value: Far-red vs. White
  misc_feature: MA Experiment 20001248 PARAMETER Experiment Name: At_Far-red-induction_P Parameter: Organism Value: A. thaliana
  misc_feature: MA Experiment 20001248 PARAMETER Experiment Name: At_Far-red-induction_P Parameter: Plant Line Value: Columbia
  misc_feature: MA Experiment 20001248 PARAMETER Experiment Name: At_Far-red-induction_P Parameter: Timepoint (hr) Value: 4
  misc_feature: MA Experiment 20001248 PARAMETER Experiment Name: At_Far-red-induction_P Parameter: Tissue Value: Whole Plant
agccgagaaacaacgcaaactccgattgagaggtgtttgcatgattcctgagcttgtctgtgtcaatagtgaggcactacatcgaggaataagaaagaagatctaaggagctaaagctattatgtcaacgaacactgaatcttcttcttattcttctcttcctagtcaaaggcttttgggtaaagtggcattgatcactggaggagccacagggataggtgagagcattgttcgtctgttccacaagcacggtgccaaagtctgcattgttgatctgcaagatgatctcggaggtgaggtgtgtaaaagtctgcttcgtggtgagtccaaggagacggcttttttcatccatggcgatgttagagtggaagatgacattagcaatgcggttgactttgcagtcaaaaattttgggacgcttgatatacttatcaacaatgcaggattatgtggagcaccgtgccctgatattcgtaattatagtttgagtgagttcgagatgacctttgatgtgaatgtgaaaggagcttttctaagcatgaaacatgcagctcgtgtaatgataccggagaagaaagggtcgatagtttccttatgtagtgtgggaggtgttgtgggaggcgttggtccacattcttatgttggttccaagcatgctgttctaggcttgactaggagtgttgcagcggagcttggacagcacgggatacgtgtgaactgtgtttcgccttacgcggttgcaactaaactcgctttggctcatttgccggaggaagaaagaacggaggatgcatttgttggtttcaggaattttgctgctgcaaacgcgaatctaaaaggggtggaactgacggttgatgatgtagcgaacgctgttctgtttttggctagcgatgactcgcggtacataagcggagataatttgatgattgatggaggattcacttgcactaaccactcctttaaagtcttcagatgatgcattttgctaaagaatgttgtttaatgtttattgtccgccaatttatcatgtctatcaaataatttaactgtggagcttattgtggttttaattgttacttttagcattgtagaaatgtttgatgttaactacatttcttactggtagacattgaacaaaatcagattctcataatgattaaaaagattgagtagc

SEQ ID NO: 43417 - protein, 285 aa, Arabidopsis thaliana
  peptide (1)..(285): Ceres Seq. ID no. 13493987
  misc_feature (7)..(283): Homolog of NCBI NO: 3598857 NR Description: short-chain alcohol dehydrogenase [Ipomoea
  misc_feature (236)..(279): Homolog of NCBI NO: 1717794 NR Description: SEX DETERMINATION PROTEIN TASSELSEED 2
  misc_feature (16)..(212): Homolog of NCBI NO: 1717794 NR Description: SEX DETERMINATION PROTEIN TASSELSEED 2
  misc_feature (16)..(281): Homolog of NCBI NO: 27530032 NR Description: alcohol dehydroge [Phaseolus lunatus]
  misc_feature (8)..(278): Homolog of NCBI NO: 7431010 NR Description: probable short chain alcohol dehydrogenase -
  misc_feature (8)..(285): Homolog of NCBI NO: 32487913 NR Description: OJ000315_02.17 [Oryza sativa (japonica
  misc_feature (8)..(285): Homolog of NCBI NO: 38346186 NR Description: OSJNBa0096F01.13 [Oryza sativa (japonica
  misc_feature (8)..(285): Homolog of NCBI NO: 38346185 NR Description: OSJNBa0096F01.12 [Oryza sativa (japonica
  misc_feature (15)..(285): Homolog of NCBI NO: 13752458 NR Description: stem secoisolariciresinol dehydrogenase
  misc_feature (1)..(285): Homolog of NCBI NO: 15218213 NR Description: short-chain dehydrogenase/reductase family
MSTNTESSSYSSLPSQRLLGKVALITGGATGIGESIVRLFHKHGAKVCIVDLQDDLGGEVCKSLLRGESKETAFFIHGDVRVEDDISNAVDFAVKNFGTLDILINNAGLCGAPCPDIRNYSLSEFEMTFDVNVKGAFLSMKHAARVMIPEKKGSIVSLCSVGGVVGGVGPHSYVGSKHAVLGLTRSVAAELGQHGIRVNCVSPYAVATKLALAHLPEEERTEDAFVGFRNFAAANANLKGVELTVDDVANAVLFLASDDSRYISGDNLMIDGGFTCTNHSFKVFR

SEQ ID NO: 43418 - protein, 159 aa, Arabidopsis thaliana
  peptide (1)..(159): Ceres Seq. ID no. 13493988
  misc_feature (1)..(157): Homolog of NCBI NO: 3598857 NR Description: short-chain alcohol dehydrogenase [Ipomoea
  misc_feature (110)..(153): Homolog of NCBI NO: 1717794 NR Description: SEX DETERMINATION PROTEIN TASSELSEED 2
  misc_feature (1)..(86): Homolog of NCBI NO: 1717794 NR Description: SEX DETERMINATION PROTEIN TASSELSEED 2
  misc_feature (1)..(155): Homolog of NCBI NO: 27530032 NR Description: alcohol dehydroge [Phaseolus lunatus]
  misc_feature (1)..(152): Homolog of NCBI NO: 7431010 NR Description: probable short chain alcohol dehydrogenase -
  misc_feature (1)..(159): Homolog of NCBI NO: 32487913 NR Description: OJ000315_02.17 [Oryza sativa (japonica
  misc_feature (1)..(159): Homolog of NCBI NO: 38346186 NR Description: OSJNBa0096F01.13 [Oryza sativa (japonica
  misc_feature (1)..(159): Homolog of NCBI NO: 38346185 NR Description: OSJNBa0096F01.12 [Oryza sativa (japonica
  misc_feature (1)..(159): Homolog of NCBI NO: 13752458 NR Description: stem secoisolariciresinol dehydrogenase
  misc_feature (1)..(159): Homolog of NCBI NO: 15218213 NR Description: short-chain dehydrogenase/reductase family
MTFDVNVKGAFLSMKHAARVMIPEKKGSIVSLCSVGGVVGGVGPHSYVGSKHAVLGLTRSVAAELGQHGIRVNCVSPYAVATKLALAHLPEEERTEDAFVGFRNFAAANANLKGVELTVDDVANAVLFLASDDSRYISGDNLMIDGGFTCTNHSFKVFR

SEQ ID NO: 43419 - protein, 146 aa, Arabidopsis thaliana
  peptide (1)..(146): Ceres Seq. ID no. 13493989
  misc_feature (1)..(144): Homolog of NCBI NO: 3598857 NR Description: short-chain alcohol dehydrogenase [Ipomoea
  misc_feature (97)..(140): Homolog of NCBI NO: 1717794 NR Description: SEX DETERMINATION PROTEIN TASSELSEED 2
  misc_feature (1)..(73): Homolog of NCBI NO: 1717794 NR Description: SEX DETERMINATION PROTEIN TASSELSEED 2
  misc_feature (1)..(142): Homolog of NCBI NO: 27530032 NR Description: alcohol dehydroge [Phaseolus lunatus]
  misc_feature (1)..(139): Homolog of NCBI NO: 7431010 NR Description: probable short chain alcohol dehydrogenase -
  misc_feature (1)..(146): Homolog of NCBI NO: 32487913 NR Description: OJ000315_02.17 [Oryza sativa (japonica
  misc_feature (1)..(146): Homolog of NCBI NO: 38346186 NR Description: OSJNBa0096F01.13 [Oryza sativa (japonica
  misc_feature (1)..(146): Homolog of NCBI NO: 38346185 NR Description: OSJNBa0096F01.12 [Oryza sativa (japonica
  misc_feature (1)..(146): Homolog of NCBI NO: 13752458 NR Description: stem secoisolariciresinol dehydrogenase
  misc_feature (1)..(146): Homolog of NCBI NO: 15218213 NR Description: short-chain dehydrogenase/reductase family
MKHAARVMIPEKKGSIVSLCSVGGVVGGVGPHSYVGSKHAVLGLTRSVAAELGQHGIRVNCVSPYAVATKLALAHLPEEERTEDAFVGFRNFAAANANLKGVELTVDDVANAVLFLASDDSRYISGDNLMIDGGFTCTNHSFKVFR

SEQ ID NO: 43420 - DNA, 1836 bp, Arabidopsis thaliana
  misc_feature (1)..(1836): Ceres Seq. ID no. 13575767
  misc_feature: MA Experiment ID: 20000180 Result: Down-regulated in Transcription
  misc_feature: MA Experiment 20000180 PARAMETER Experiment Name: At_Germinating_Seeds_P Parameter: Age (hr) Value: 24 vs. 0
  misc_feature: MA Experiment 20000180 PARAMETER Experiment Name: At_Germinating_Seeds_P Parameter: Tissue Value: Germinating Seeds
  misc_feature: MA Experiment ID: 20000234 Result: Up-regulated in Transcription
  misc_feature: MA Experiment 20000234 PARAMETER Experiment Name: At_Siliques_P Parameter: Age (day) Value: 21
  misc_feature: MA Experiment 20000234 PARAMETER Experiment Name: At_Siliques_P Parameter: Organism Value: A. thaliana
  misc_feature: MA Experiment 20000234 PARAMETER Experiment Name: At_Siliques_P Parameter: Plant Line Value: WS
  misc_feature: MA Experiment 20000234 PARAMETER Experiment Name: At_Siliques_P Parameter: Tissue Value: Less Than 5mm Siliques vs. Whole Plant
  misc_feature: MA Experiment ID: 20000235 Result: Up-regulated in Transcription
  misc_feature: MA Experiment 20000235 PARAMETER Experiment Name: At_Siliques_P Parameter: Age (day) Value: 21
  misc_feature: MA Experiment 20000235 PARAMETER Experiment Name: At_Siliques_P Parameter: Organism Value: A. thaliana
  misc_feature: MA Experiment 20000235 PARAMETER Experiment Name: At_Siliques_P Parameter: Plant Line Value: WS
  misc_feature: MA Experiment 20000235 PARAMETER Experiment Name: At_Siliques_P Parameter: Tissue Value: 5-10mm Siliques vs. Whole Plant
  misc_feature: MA Experiment ID: 20000264 Result: Up-regulated in Transcription
  misc_feature: MA Experiment 20000264 PARAMETER Experiment Name: At_Open_Flower_P Parameter: Age (day) Value: 21
  misc_feature: MA Experiment 20000264 PARAMETER Experiment Name: At_Open_Flower_P Parameter: Plant Line Value: WS
  misc_feature: MA Experiment 20000264 PARAMETER Experiment Name: At_Open_Flower_P Parameter: Tissue Value: Open Flower vs. Whole Plant
  misc_feature: MA Experiment ID: 20000265 Result: Up-regulated in Transcription
  misc_feature: MA Experiment 20000265 PARAMETER Experiment Name: At_Open_Flower_P Parameter: Age (day) Value: 21
  misc_feature: MA Experiment 20000265 PARAMETER Experiment Name: At_Open_Flower_P Parameter: Plant Line Value: WS
  misc_feature: MA Experiment 20000265 PARAMETER Experiment Name: At_Open_Flower_P Parameter: Tissue Value: Closed Flower vs. Whole Plant
  misc_feature: MA Experiment ID: 20000286 Result: Up-regulated in Transcription
  misc_feature: MA Experiment 20000286 PARAMETER Experiment Name: At_Open_Flower_P Parameter: Age (day) Value: 21
  misc_feature: MA Experiment 20000286 PARAMETER Experiment Name: At_Open_Flower_P Parameter: Plant Line Value: WS
  misc_feature: MA Experiment 20000286 PARAMETER Experiment Name: At_Open_Flower_P Parameter: Tissue Value: Half Open vs. Whole Plant
  misc_feature: MA Experiment ID: 20000495 Result: Up-regulated in Transcription
  misc_feature: MA Experiment 20000495 PARAMETER Experiment Name: At_Guard_Cells_P Parameter: Harvest Date Value: 8/2/2002
  misc_feature: MA Experiment 20000495 PARAMETER Experiment Name: At_Guard_Cells_P Parameter: Organism Value: A. thaliana
  misc_feature: MA Experiment 20000495 PARAMETER Experiment Name: At_Guard_Cells_P Parameter: Tissue Value: Guard Cells vs. Leaves
  misc_feature: MA Experiment ID: 20000794 Result: Up-regulated in Transcription
  misc_feature: MA Experiment 20000794 PARAMETER Experiment Name: At_Petals_P Parameter: Age (day) Value: 23-25 days
  misc_feature: MA Experiment 20000794 PARAMETER Experiment Name: At_Petals_P Parameter: Plant Line Value: WS
  misc_feature: MA Experiment 20000794 PARAMETER Experiment Name: At_Petals_P Parameter: Tissue Value: Petals vs. Whole plant
gtagttgcaaacaccgatcagtcacagacagtagcctctcaccatcaccaccacggcggccgtcaccgacgccgatacaccatgaaattacatttacaccctctctcacttgtcttcttctttttcttcttcttcttccgaccgacaatgtcgtcgaaccagcacgattactccgacgcactctcaaaatcaattctcttcttcgaaggccagcgctccggttacctcccaaacgaccagcgtatgacctggcgccgtaactccggtctgagcgacggttggacacacaacatcgatttaaccggcggttattacgacgccggagacaacgtcaaattcaatttcccgatggctttcaccaccacaatgctcgcctggagcgtaattgagttcggcgaattcatgccttcgtcggagctacgtaactctctcgtggctctccggtggagctctaattacctcctcaaatccgtttcacagctacctaaccggatcttcgtccaggtaggtgatccgatagcagatcataattgctgggaaagaccagaagacatggatacaccacggactgcttacgccgttaatgccccgaatccggcttctgaagttgccggagaaactacggcggccctctcagctgcttcgattgctttccgatcatcggatccaggatactctcaaacattgctccaaaatgctgtcaaaacttttcagttcgctgatatgtatcgcggtgcttatagcagcaatgacgatatcaaaaatgatgtgtgtcctttctactgcgatttcaacggatttcaggatgagttattgtggggagcagcttggctaagaaaagcgactggtgatgaaagctaccttaattacatagagagtaaccgtgaaccgtttggtgctaacgataacgtagacgaatttggctgggacaacaaagttggtggacttaatgttctcgtttcgaaggaagttattgaaggaaatatgtacaacttagaggcgtacaaggcatcagcagagagcttcatgtgtagtctggtcccggaatcttcgggaccgcatgttgagtatacttccgctggtctactttacaagcccggcggtagccagctccaacatgcgaccaccatatctttcctcctcctcgtatacgctcaatatctttcaagaagctctctctccctcaattgcggcacccttaccgtccctcctgattatctccgccgtcttgccaagaaacaggtggactatatattggggaataatccgatgggattatcgtacatggtcggatacggagagagatatccaaagaggatccatcaccgtggctcatcattgccatcgattgtggaccatccagaagccatcagatgcaaagacgggtcggtttatttcaattctaccgaaccgaacccgaacgttttgattggagcggtggtgggtgggcccggagaggacgatatgtacgatgatgatcggtccgatttccgcaagtccgagcccactacttacatcaatgctcctttcgttggcgttttggcgtactttgcagccaatcctggttctagctaagctgacgacatgggagtaaaattggaaaacattattcttaagttccaagagtatgggagttcttttttttcttacaagtctctcatcttcttgcccaagtaaagaaggaaaaagttcttacagttaaaatagtttttcttttacgcaaaattaatctgaataacttattcggattattcacctgttgatcatttgatacttctttttttatcaaatgtaattaatagtctattcatatatacatatatataagtggttgct

SEQ ID NO: 43421 - protein, 524 aa, Arabidopsis thaliana
  peptide (1)..(524): Ceres Seq. ID no. 13575768
  misc_feature (56)..(517): Pfam Name: Glycosyl hydrolase family 9 Pfam Description: Glycosyl hydrolase family 9
  misc_feature (55)..(520): Homolog of NCBI NO: 3892180 NR Description: cellulase [Fragaria x ananassa]
  misc_feature (38)..(520): Homolog of NCBI NO: 15223222 NR Description: glycosyl hydrolase family 9
  misc_feature (55)..(520): Homolog of NCBI NO: 3549291 NR Description: endo-1,4-beta-glucanase precursor [Fragaria x
  misc_feature (55)..(520): Homolog of NCBI NO: 4972234 NR Description: endo-beta-1,4-glucanase [Fragaria x ananassa]
  misc_feature (55)..(520): Homolog of NCBI NO: 4220423 NR Description: putative cellulase [Fragaria x ananassa]
  misc_feature (32)..(521): Homolog of NCBI NO: 7484851 NR Description: cellulase (EC 3.2.1.4) F19H22.90 - Arabidopsis
  misc_feature (28)..(524): Homolog of NCBI NO: 15234904 NR Description: glycosyl hydrolase family 9 [Arabidopsis
  misc_feature (32)..(521): Homolog of NCBI NO: 22329248 NR Description: glycosyl hydrolase family 9 [Arabidopsis thaliana]
  misc_feature (50)..(524): Homolog of NCBI NO: 7484850 NR Description: cellulase (EC 3.2.1.4) F19H22.110 - Arabidopsis
  misc_feature (28)..(524): Homolog of NCBI NO: 18420359 NR Description: glycosyl hydrolase family 9 [Arabidopsis
VVANTDQSQTVASHHHHHGGRHRRRYTMKLHLHPLSLVFFFFFFFFRPTMSSNQHDYSDALSKSILFFEGQRSGYLPNDQRMTWRRNSGLSDGWTHNIDLTGGYYDAGDNVKFNFPMAFTTTMLAWSVIEFGEFMPSSELRNSLVALRWSSNYLLKSVSQLPNRIFVQVGDPIADHNCWERPEDMDTPRTAYAVNAPNPASEVAGETTAALSAASIAFRSSDPGYSQTLLQNAVKTFQFADMYRGAYSSNDDIKNDVCPFYCDFNGFQDELLWGAAWLRKATGDESYLNYIESNREPFGANDNVDEFGWDNKVGGLNVLVSKEVIEGNMYNLEAYKASAESFMCSLVPESSGPHVEYTSAGLLYKPGGSQLQHATTISFLLLVYAQYLSRSSLSLNCGTLTVPPDYLRRLAKKQVDYILGNNPMGLSYMVGYGERYPKRIHHRGSSLPSIVDHPEAIRCKDGSVYFNSTEPNPNVLIGAVVGGPGEDDMYDDDRSDFRKSEPTTYINAPFVGVLAYFAANPGSS

SEQ ID NO: 43422 - protein, 497 aa, Arabidopsis thaliana
  peptide (1)..(497): Ceres Seq. ID no. 13575769
  misc_feature (29)..(490): Pfam Name: Glycosyl hydrolase family 9 Pfam Description: Glycosyl hydrolase family 9
  misc_feature (28)..(493): Homolog of NCBI NO: 3892180 NR Description: cellulase [Fragaria x ananassa]
  misc_feature (11)..(493): Homolog of NCBI NO: 15223222 NR Description: glycosyl hydrolase family 9
  misc_feature (28)..(493): Homolog of NCBI NO: 3549291 NR Description: endo-1,4-beta-glucanase precursor [Fragaria x
  misc_feature (28)..(493): Homolog of NCBI NO: 4972234 NR Description: endo-beta-1,4-glucanase [Fragaria x ananassa]
  misc_feature (28)..(493): Homolog of NCBI NO: 4220423 NR Description: putative cellulase [Fragaria x ananassa]
  misc_feature (5)..(494): Homolog of NCBI NO: 7484851 NR Description: cellulase (EC 3.2.1.4) F19H22.90 - Arabidopsis
  misc_feature (1)..(497): Homolog of NCBI NO: 15234904 NR Description: glycosyl hydrolase family 9 [Arabidopsis
  misc_feature (5)..(494): Homolog of NCBI NO: 22329248 NR Description: glycosyl hydrolase family 9 [Arabidopsis thaliana]
  misc_feature (23)..(497): Homolog of NCBI NO: 7484850 NR Description: cellulase (EC 3.2.1.4) F19H22.110 - Arabidopsis
  misc_feature (1)..(497): Homolog of NCBI NO: 18420359 NR Description: glycosyl hydrolase family 9 [Arabidopsis
MKLHLHPLSLVFFFFFFFFRPTMSSNQHDYSDALSKSILFFEGQRSGYLPNDQRMTWRRNSGLSDGWTHNIDLTGGYYDAGDNVKFNFPMAFTTTMLAWSVIEFGEFMPSSELRNSLVALRWSSNYLLKSVSQLPNRIFVQVGDPIADHNCWERPEDMDTPRTAYAVNAPNPASEVAGETTAALSAASIAFRSSDPGYSQTLLQNAVKTFQFADMYRGAYSSNDDIKNDVCPFYCDFNGFQDELLWGAAWLRKATGDESYLNYIESNREPFGANDNVDEFGWDNKVGGLNVLVSKEVIEGNMYNLEAYKASAESFMCSLVPESSGPHVEYTSAGLLYKPGGSQLQHATTISFLLLVYAQYLSRSSLSLNCGTLTVPPDYLRRLAKKQVDYILGNNPMGLSYMVGYGERYPKRIHHRGSSLPSIVDHPEAIRCKDGSVYFNSTEPNPNVLIGAVVGGPGEDDMYDDDRSDFRKSEPTTYINAPFVGVLAYFAANPGSS

SEQ ID NO: 43423 - protein, 475 aa, Arabidopsis thaliana
  peptide (1)..(475): Ceres Seq. ID no. 13575770
  misc_feature (7)..(468): Pfam Name: Glycosyl hydrolase family 9 Pfam Description: Glycosyl hydrolase family 9
  misc_feature (6)..(471): Homolog of NCBI NO: 3892180 NR Description: cellulase [Fragaria x ananassa]
  misc_feature (1)..(471): Homolog of NCBI NO: 15223222 NR Description: glycosyl hydrolase family 9
  misc_feature (6)..(471): Homolog of NCBI NO: 3549291 NR Description: endo-1,4-beta-glucanase precursor [Fragaria x
  misc_feature (6)..(471): Homolog of NCBI NO: 4972234 NR Description: endo-beta-1,4-glucanase [Fragaria x ananassa]
  misc_feature (6)..(471): Homolog of NCBI NO: 4220423 NR Description: putative cellulase [Fragaria x ananassa]
  misc_feature (1)..(472): Homolog of NCBI NO: 7484851 NR Description: cellulase (EC 3.2.1.4) F19H22.90 - Arabidopsis
  misc_feature (1)..(475): Homolog of NCBI NO: 15234904 NR Description: glycosyl hydrolase family 9 [Arabidopsis
  misc_feature (1)..(472): Homolog of NCBI NO: 22329248 NR Description: glycosyl hydrolase family 9 [Arabidopsis thaliana]
  misc_feature (1)..(475): Homolog of NCBI NO: 7484850 NR Description: cellulase (EC 3.2.1.4) F19H22.110 - Arabidopsis
  misc_feature (1)..(475): Homolog of NCBI NO: 18420359 NR Description: glycosyl hydrolase family 9 [Arabidopsis
MSSNQHDYSDALSKSILFFEGQRSGYLPNDQRMTWRRNSGLSDGWTHNIDLTGGYYDAGDNVKFNFPMAFTTTMLAWSVIEFGEFMPSSELRNSLVALRWSSNYLLKSVSQLPNRIFVQVGDPIADHNCWERPEDMDTPRTAYAVNAPNPASEVAGETTAALSAASIAFRSSDPGYSQTLLQNAVKTFQFADMYRGAYSSNDDIKNDVCPFYCDFNGFQDELLWGAAWLRKATGDESYLNYIESNREPFGANDNVDEFGWDNKVGGLNVLVSKEVIEGNMYNLEAYKASAESFMCSLVPESSGPHVEYTSAGLLYKPGGSQLQHATTISFLLLVYAQYLSRSSLSLNCGTLTVPPDYLRRLAKKQVDYILGNNPMGLSYMVGYGERYPKRIHHRGSSLPSIVDHPEAIRCKDGSVYFNSTEPNPNVLIGAVVGGPGEDDMYDDDRSDFRKSEPTTYINAPFVGVLAYFAANPGSS

SEQ ID NO: 43424 - DNA, 1850 bp, Arabidopsis thaliana
  misc_feature (1)..(1850): Ceres Seq. ID no. 13592577
  misc_feature: MA Experiment ID: 20000180 Result: Down-regulated in Transcription
  misc_feature: MA Experiment 20000180 PARAMETER Experiment Name: At_Germinating_Seeds_P Parameter: Age (hr) Value: 24 vs. 0
  misc_feature: MA Experiment 20000180 PARAMETER Experiment Name: At_Germinating_Seeds_P Parameter: Tissue Value: Germinating Seeds
  misc_feature: MA Experiment ID: 20000184 Result: Down-regulated in Transcription
  misc_feature: MA Experiment 20000184 PARAMETER Experiment Name: At_Shoots__P Parameter: Age (day) Value: 7
  misc_feature: MA Experiment 20000184 PARAMETER Experiment Name: At_Shoots__P Parameter: Tissue Value: Shoots vs. Whole Plant
  misc_feature: MA Experiment ID: 20001458 Result: Up-regulated in Transcription
  misc_feature: MA Experiment 20001458 PARAMETER Experiment Name: At_50mM_NH4NO3_L-to-H_P Parameter: Age (day) Value: Undefined
  misc_feature: MA Experiment 20001458 PARAMETER Experiment Name: At_50mM_NH4NO3_L-to-H_P Parameter: Organism Value: Undefined
  misc_feature: MA Experiment 20001458 PARAMETER Experiment Name: At_50mM_NH4NO3_L-to-H_P Parameter: Plant Line Value: Undefined
  misc_feature: MA Experiment 20001458 PARAMETER Experiment Name: At_50mM_NH4NO3_L-to-H_P Parameter: Timepoint (hr) Value: 2
  misc_feature: MA Experiment 20001458 PARAMETER Experiment Name: At_50mM_NH4NO3_L-to-H_P Parameter: Tissue Value: Siliques
  misc_feature: MA Experiment 20001458 PARAMETER Experiment Name: At_50mM_NH4NO3_L-to-H_P Parameter: Treatment Value: 50mM NH4NO3 vs. 100mM Manitol
  misc_feature: MA Experiment ID: 20001558 Result: Up-regulated in Transcription
  misc_feature: MA Experiment 20001558 PARAMETER Experiment Name: At_Drought_Soil_Dry_P Parameter: Age (day) Value: 27
  misc_feature: MA Experiment 20001558 PARAMETER Experiment Name: At_Drought_Soil_Dry_P Parameter: Organism Value: A. thaliana
  misc_feature: MA Experiment 20001558 PARAMETER Experiment Name: At_Drought_Soil_Dry_P Parameter: Plant Line Value: WS
  misc_feature: MA Experiment 20001558 PARAMETER Experiment Name: At_Drought_Soil_Dry_P Parameter: Post Timepoint (hr) Value: 6
  misc_feature: MA Experiment 20001558 PARAMETER Experiment Name: At_Drought_Soil_Dry_P Parameter: Post-Treatment Value: Re-Water vs. No Drought
  misc_feature: MA Experiment 20001558 PARAMETER Experiment Name: At_Drought_Soil_Dry_P Parameter: Timepoint (day) Value: 13
  misc_feature: MA Experiment 20001558 PARAMETER Experiment Name: At_Drought_Soil_Dry_P Parameter: Treatment Value: Drought vs. No Drought
  misc_feature: MA Experiment ID: 20001560 Result: Up-regulated in Transcription
  misc_feature: MA Experiment 20001560 PARAMETER Experiment Name: At_Drought_Soil_Dry_P Parameter: Age (day) Value: 28
  misc_feature: MA Experiment 20001560 PARAMETER Experiment Name: At_Drought_Soil_Dry_P Parameter: Organism Value: A. thaliana
  misc_feature: MA Experiment 20001560 PARAMETER Experiment Name: At_Drought_Soil_Dry_P Parameter: Plant Line Value: WS
  misc_feature: MA Experiment 20001560 PARAMETER Experiment Name: At_Drought_Soil_Dry_P Parameter: Post Timepoint (hr) Value: None
  misc_feature: MA Experiment 20001560 PARAMETER Experiment Name: At_Drought_Soil_Dry_P Parameter: Post-Treatment Value: None
  misc_feature: MA Experiment 20001560 PARAMETER Experiment Name: At_Drought_Soil_Dry_P Parameter: Timepoint (day) Value: 14
  misc_feature: MA Experiment 20001560 PARAMETER Experiment Name: At_Drought_Soil_Dry_P Parameter: Treatment Value: Drought vs. No Drought
ggactctcgttcggccgtttcatcaacaactctctcctgtaaacgaaacaaagaaatggctggacaaaagcaagagcttcccgtctccggcgaacctttagccgtcgagagtccgatgaccaacaagaagaagaagaaaagcaagaagaacaaacatacagaggaaaatcatgaagtcgaagaagtgcctcaagaggtcactaatggtgtagaggaagagttgagtaataaagagaagaagaagaaacgtaagagagaggagaaagagtctgagaagaataagaagaaggatgtcccggagaagaagcttgaagctgaggatttaggagaaggagagagtgaacaacagaaggttgttgtgactgggaaaggtgtggaagaagcaaagtacgcagctttgaagacttttgctgaatcgaatttgccggagaatgttttagattgttgtaagactttcgagaagccgtctccgattcagtcacatacgtggccgtttttgttagatgggcgtgatcttatcgggattgcgaaaactgggtcaggtaagacattggcttttgggattcctgcgattatgcatgtgttgaagaaaaataagaagattggtggaggatcaaagaaggttaatcctacttgtttagttctttctcctacacgagaattggctgttcagatttctgatgttttgcgtgaagctggagaaccgtgtggtttgaaatcgatttgtgtgtatggtggaagctctaaagggcctcaaataagtgcaattcgatctggagttgatattgtcattggtacgcctggtcgtttgagagacttgattgagtctaatgtgcttcgtctctcggatgtttcctttgtcgtattggatgaagcagatcgaatgcttgatatgggtttcgaggaacctgtccggtttatattgagtaacacaaataaagttcgtcaaatggttatgttcagtgcaacttggcctttggatgttcacaaattggcccaggaattcatggatccaaatccaatcaaggtgatcataggttctgtagacttagctgccaaccacgacgttatgcaaatcattgaggtcttggatgaacgtgcgcgtgatcagcgtctcattgcattactagaaaaataccataaatctcaaaagaacagggttttggtatttgctttatacaaggtggaagctgaacgtctcgagcgttttcttcagcaaagaggttggaaagctgtatctatacacggaaacaaagcacagagcgaacgtaccaggtctttatcattgttcaaagaaggatcctgcccgttactggtggctactgatgttgcagcaagagggcttgatatcccggacgtggaagttgtgataaactacactttccctttaacaacagaggattatgtacacagaatcgggaggacaggaagagcgggtaaaaagggcgttgcacacaccttcttcacgccactgaacaagggtcttgcaggagaacttgtgaatgttcttagggaagcaggacaagtagtgccagctgatcttttgaagtttggcactcatgtaaagaaaaaggaatcaaaattgtatggagctcatttcaaagaaatagctgctgatgctcctaaagctacgaagatcacattcgataattctgatgacgaagactagcttagtttattattttaatggtatcattattttattatatttacttggacaatgaaacctgcatttgattttcgtttgtggtctggggcttggcccgaataacaaaaacaaatatatttcagaattttcattatatttgtatgcaattttgtgttactagttattaaacttttatttgtcc

SEQ ID NO: 43425 - protein, 555 aa, Arabidopsis thaliana
  peptide (1)..(555): Ceres Seq. ID no. 13592578
  misc_feature (145)..(359): Pfam Name: DEAD/DEAH box helicase Pfam Description: DEAD/DEAH box helicase
  misc_feature (145)..(359): Pfam Name: DEAD/DEAH box helicase Pfam Description: DEAD/DEAH box helicase
  misc_feature (91)..(517): Homolog of NCBI NO: 40738604 NR Description: hypothetical protein AN5931.2 [Aspergillus
  misc_feature (91)..(518): Homolog of NCBI NO: 34903586 NR Description: putative ethylene-responsive RNA helicase
  misc_feature (91)..(518): Homolog of NCBI NO: 15221998 NR Description: ethylene-responsive DEAD box RNA helicase,
  misc_feature (72)..(549): Homolog of NCBI NO: 40742814 NR Description: hypothetical protein AN7424.2 [Aspergillus
  misc_feature (91)..(514): Homolog of NCBI NO: 10177293 NR Description: ATP-dependent RNA helicase-like protein
  misc_feature (91)..(517): Homolog of NCBI NO: 40738604 NR Description: hypothetical protein AN5931.2 [Aspergillus
  misc_feature (91)..(518): Homolog of NCBI NO: 15221998 NR Description: ethylene-responsive DEAD box RNA helicase,
  misc_feature (91)..(514): Homolog of NCBI NO: 10177293 NR Description: ATP-dependent RNA helicase-like protein
  misc_feature (19)..(555): Homolog of NCBI NO: 15222526 NR Description: DEAD/DEAH box helicase, putative [Arabidopsis
  misc_feature (145)..(555): Homolog of NCBI NO: 11358811 NR Description: RNA helicase RH5 [imported] - Arabidopsis
  misc_feature (71)..(554): Homolog of NCBI NO: 34394349 NR Description: putative RNA helicase [Oryza sativa (japonica
  misc_feature (17)..(549): Homolog of NCBI NO: 6321360 NR Description: ATP-dependent RNA helicase CA3 of the DEAD/DEAH
  misc_feature (44)..(549): Homolog of NCBI NO: 19113180 NR Description: putative atp-dependent rna helicase
  misc_feature (72)..(549): Homolog of NCBI NO: 40742814 NR Description: hypothetical protein AN7424.2 [Aspergillus
  misc_feature (91)..(518): Homolog of NCBI NO: 34903586 NR Description: putative ethylene-responsive RNA helicase
  misc_feature (44)..(549): Homolog of NCBI NO: 19113180 NR Description: putative atp-dependent rna helicase
  misc_feature (17)..(549): Homolog of NCBI NO: 6321360 NR Description: ATP-dependent RNA helicase CA3 of the DEAD/DEAH
  misc_feature (71)..(554): Homolog of NCBI NO: 34394349 NR Description: putative RNA helicase [Oryza sativa (japonica
  misc_feature (145)..(555): Homolog of NCBI NO: 11358811 NR Description: RNA helicase RH5 [imported] - Arabidopsis
  misc_feature (19)..(555): Homolog of NCBI NO: 15222526 NR Description: DEAD/DEAH box helicase, putative [Arabidopsis
DSRSAVSSTTLSCKRNKEMAGQKQELPVSGEPLAVESPMTNKKKKKSKKNKHTEENHEVEEVPQEVTNGVEEELSNKEKKKKRKREEKESEKNKKKDVPEKKLEAEDLGEGESEQQKVVVTGKGVEEAKYAALKTFAESNLPENVLDCCKTFEKPSPIQSHTWPFLLDGRDLIGIAKTGSGKTLAFGIPAIMHVLKKNKKIGGGSKKVNPTCLVLSPTRELAVQISDVLREAGEPCGLKSICVYGGSSKGPQISAIRSGVDIVIGTPGRLRDLIESNVLRLSDVSFVVLDEADRMLDMGFEEPVRFILSNTNKVRQMVMFSATWPLDVHKLAQEFMDPNPIKVIIGSVDLAANHDVMQIIEVLDERARDQRLIALLEKYHKSQKNRVLVFALYKVEAERLERFLQQRGWKAVSIHGNKAQSERTRSLSLFKEGSCPLLVATDVAARGLDIPDVEVVINYTFPLTTEDYVHRIGRTGRAGKKGVAHTFFTPLNKGLAGELVNVLREAGQVVPADLLKFGTHVKKKESKLYGAHFKEIAADAPKATKITFDNSDDED

SEQ ID NO: 43426 - protein, 537 aa, Arabidopsis thaliana
  peptide (1)..(537): Ceres Seq. ID no. 13592579
  misc_feature (127)..(341): Pfam Name: DEAD/DEAH box helicase Pfam Description: DEAD/DEAH box helicase
  misc_feature (127)..(341): Pfam Name: DEAD/DEAH box helicase Pfam Description: DEAD/DEAH box helicase
  misc_feature (73)..(499): Homolog of NCBI NO: 40738604 NR Description: hypothetical protein AN5931.2 [Aspergillus
  misc_feature (73)..(500): Homolog of NCBI NO: 34903586 NR Description: putative ethylene-responsive RNA helicase
  misc_feature (73)..(500): Homolog of NCBI NO: 15221998 NR Description: ethylene-responsive DEAD box RNA helicase,
  misc_feature (54)..(531): Homolog of NCBI NO: 40742814 NR Description: hypothetical protein AN7424.2 [Aspergillus
  misc_feature (73)..(496): Homolog of NCBI NO: 10177293 NR Description: ATP-dependent RNA helicase-like protein
  misc_feature (73)..(499): Homolog of NCBI NO: 40738604 NR Description: hypothetical protein AN5931.2 [Aspergillus
  misc_feature (73)..(500): Homolog of NCBI NO: 15221998 NR Description: ethylene-responsive DEAD box RNA helicase,
  misc_feature (73)..(496): Homolog of NCBI NO: 10177293 NR Description: ATP-dependent RNA helicase-like protein
  misc_feature (1)..(537): Homolog of NCBI NO: 15222526 NR Description: DEAD/DEAH box helicase, putative [Arabidopsis
  misc_feature (127)..(537): Homolog of NCBI NO: 11358811 NR Description: RNA helicase RH5 [imported] - Arabidopsis
  misc_feature (53)..(536): Homolog of NCBI NO: 34394349 NR Description: putative RNA helicase [Oryza sativa (japonica
  misc_feature (1)..(531): Homolog of NCBI NO: 6321360 NR Description: ATP-dependent RNA helicase CA3 of the DEAD/DEAH
  misc_feature (26)..(531): Homolog of NCBI NO: 19113180 NR Description: putative atp-dependent rna helicase
  misc_feature (54)..(531): Homolog of NCBI NO: 40742814 NR Description: hypothetical protein AN7424.2 [Aspergillus
  misc_feature (73)..(500): Homolog of NCBI NO: 34903586 NR Description: putative ethylene-responsive RNA helicase
  misc_feature (26)..(531): Homolog of NCBI NO: 19113180 NR Description: putative atp-dependent rna helicase
  misc_feature (1)..(531): Homolog of NCBI NO: 6321360 NR Description: ATP-dependent RNA helicase CA3 of the DEAD/DEAH
  misc_feature (53)..(536): Homolog of NCBI NO: 34394349 NR Description: putative RNA helicase [Oryza sativa (japonica
  misc_feature (127)..(537): Homolog of NCBI NO: 11358811 NR Description: RNA helicase RH5 [imported] - Arabidopsis
  misc_feature (1)..(537): Homolog of NCBI NO: 15222526 NR Description: DEAD/DEAH box helicase, putative [Arabidopsis
MAGQKQELPVSGEPLAVESPMTNKKKKKSKKNKHTEENHEVEEVPQEVTNGVEEELSNKEKKKKRKREEKESEKNKKKDVPEKKLEAEDLGEGESEQQKVVVTGKGVEEAKYAALKTFAESNLPENVLDCCKTFEKPSPIQSHTWPFLLDGRDLIGIAKTGSGKTLAFGIPAIMHVLKKNKKIGGGSKKVNPTCLVLSPTRELAVQISDVLREAGEPCGLKSICVYGGSSKGPQISAIRSGVDIVIGTPGRLRDLIESNVLRLSDVSFVVLDEADRMLDMGFEEPVRFILSNTNKVRQMVMFSATWPLDVHKLAQEFMDPNPIKVIIGSVDLAANHDVMQIIEVLDERARDQRLIALLEKYHKSQKNRVLVFALYKVEAERLERFLQQRGWKAVSIHGNKAQSERTRSLSLFKEGSCPLLVATDVAARGLDIPDVEVVINYTFPLTTEDYVHRIGRTGRAGKKGVAHTFFTPLNKGLAGELVNVLREAGQVVPADLLKFGTHVKKKESKLYGAHFKEIAADAPKATKITFDNSDDED

SEQ ID NO: 43427 - protein, 517 aa, Arabidopsis thaliana
  peptide (1)..(517): Ceres Seq. ID no. 13592580
  misc_feature (107)..(321): Pfam Name: DEAD/DEAH box helicase Pfam Description: DEAD/DEAH box helicase
  misc_feature (107)..(321): Pfam Name: DEAD/DEAH box helicase Pfam Description: DEAD/DEAH box helicase
  misc_feature (53)..(479): Homolog of NCBI NO: 40738604 NR Description: hypothetical protein AN5931.2 [Aspergillus
  misc_feature (53)..(480): Homolog of NCBI NO: 34903586 NR Description: putative ethylene-responsive RNA helicase
  misc_feature (53)..(480): Homolog of NCBI NO: 15221998 NR Description: ethylene-responsive DEAD box RNA helicase,
  misc_feature (34)..(511): Homolog of NCBI NO: 40742814 NR Description: hypothetical protein AN7424.2 [Aspergillus
  misc_feature (53)..(476): Homolog of NCBI NO: 10177293 NR Description: ATP-dependent RNA helicase-like protein
  misc_feature (53)..(479): Homolog of NCBI NO: 40738604 NR Description: hypothetical protein AN5931.2 [Aspergillus
  misc_feature (53)..(480): Homolog of NCBI NO: 15221998 NR Description: ethylene-responsive DEAD box RNA helicase,
  misc_feature (53)..(476): Homolog of NCBI NO: 10177293 NR Description: ATP-dependent RNA helicase-like protein
  misc_feature (1)..(517): Homolog of NCBI NO: 15222526 NR Description: DEAD/DEAH box helicase, putative [Arabidopsis
  misc_feature (107)..(517): Homolog of NCBI NO: 11358811 NR Description: RNA helicase RH5 [imported] - Arabidopsis
  misc_feature (33)..(516): Homolog of NCBI NO: 34394349 NR Description: putative RNA helicase [Oryza sativa (japonica
  misc_feature (1)..(511): Homolog of NCBI NO: 6321360 NR Description: ATP-dependent RNA helicase CA3 of the DEAD/DEAH
  misc_feature (6)..(511): Homolog of NCBI NO: 19113180 NR Description: putative atp-dependent rna helicase
  misc_feature (34)..(511): Homolog of NCBI NO: 40742814 NR Description: hypothetical protein AN7424.2 [Aspergillus
  misc_feature (53)..(480): Homolog of NCBI NO: 34903586 NR Description: putative ethylene-responsive RNA helicase
  misc_feature (6)..(511): Homolog of NCBI NO: 19113180 NR Description: putative atp-dependent rna helicase
  misc_feature (1)..(511): Homolog of NCBI NO: 6321360 NR Description: ATP-dependent RNA helicase CA3 of the DEAD/DEAH
  misc_feature (33)..(516): Homolog of NCBI NO: 34394349 NR Description: putative RNA helicase [Oryza sativa (japonica
  misc_feature (107)..(517): Homolog of NCBI NO: 11358811 NR Description: RNA helicase RH5 [imported] - Arabidopsis
  misc_feature (1)..(517): Homolog of NCBI NO: 15222526 NR Description: DEAD/DEAH box helicase, putative [Arabidopsis
MTNKKKKKSKKNKHTEENHEVEEVPQEVTNGVEEELSNKEKKKKRKREEKESEKNKKKDVPEKKLEAEDLGEGESEQQKVVVTGKGVEEAKYAALKTFAESNLPENVLDCCKTFEKPSPIQSHTWPFLLDGRDLIGIAKTGSGKTLAFGIPAIMHVLKKNKKIGGGSKKVNPTCLVLSPTRELAVQISDVLREAGEPCGLKSICVYGGSSKGPQISAIRSGVDIVIGTPGRLRDLIESNVLRLSDVSFVVLDEADRMLDMGFEEPVRFILSNTNKVRQMVMFSATWPLDVHKLAQEFMDPNPIKVIIGSVDLAANHDVMQIIEVLDERARDQRLIALLEKYHKSQKNRVLVFALYKVEAERLERFLQQRGWKAVSIHGNKAQSERTRSLSLFKEGSCPLLVATDVAARGLDIPDVEVVINYTFPLTTEDYVHRIGRTGRAGKKGVAHTFFTPLNKGLAGELVNVLREAGQVVPADLLKFGTHVKKKESKLYGAHFKEIAADAPKATKITFDNSDDED

SEQ ID NO: 43428 - DNA, 1647 bp, Arabidopsis thaliana
  misc_feature (1)..(1647): Ceres Seq. ID no. 12357594
  misc_feature: MA Experiment ID: 108434 Result: Up-regulated in Transcription
  misc_feature: MA Experiment 108434 PARAMETER Experiment Name: At_Root_Tips_cDNA_P Parameter: Tissue Value: Root Tips
  misc_feature: MA Experiment ID: 108573 Result: Up-regulated in Transcription
  misc_feature: MA Experiment 108573 PARAMETER Experiment Name: At_Drought_cDNA_P Parameter: Timepoint (hr) Value: 6
  misc_feature: MA Experiment 108573 PARAMETER Experiment Name: At_Drought_cDNA_P Parameter: Tissue Value: Aerial
  misc_feature: MA Experiment 108573 PARAMETER Experiment Name: At_Drought_cDNA_P Parameter: Treatment Value: Drought vs. No Drought
  misc_feature: MA Experiment ID: 108585 Result: Up-regulated in Transcription
  misc_feature: MA Experiment 108585 PARAMETER Experiment Name: At_5mM_NaNP_cDNA_P Parameter: Timepoint (hr) Value: 6
  misc_feature: MA Experiment 108585 PARAMETER Experiment Name: At_5mM_NaNP_cDNA_P Parameter: Tissue Value: Aerial
  misc_feature: MA Experiment 108585 PARAMETER Experiment Name: At_5mM_NaNP_cDNA_P Parameter: Treatment Value: null
cttcttcttcgtcttcttctcggtactctgagagagtgagagagaagcaacaatggaggttttctactacttggtgtttggagtcatggctgccgtagtggcagcgttggagcttagcaagacgaacaaggatcggatcaacacttcgtcttccttcaattcattcaagaacaattacctcctcgttttctctattatgatggctggggattggcttcagggtccttatgtgtattacctttacagcacttatggttttggaaaaggagatattggtcagctattcattgctggttttggttcgtcaatgttgtttggaactattgttggatctctggctgacaaacagggtcgaaagagggcatgtgttacatactgtatagtttacatactaagttgcatcaccaagcactctccacagtacaaagttttgatggttggccgtatcttgggtggtattgctacatctctcttgttttctgctttcgagtcctggctaattgcagagcacaataagaggaactttgagcaacagtggctgtcacttacattctctaaggctgtatttcttggaaacggtctggtggctatcctttcgggattgtttggcaatcttcttgttgacactttttcctttggtcctgttgctccctttgacgccgctgcgtgctttcttgcaattggaatggcgatcatattgggaacatggtctgagaattttggagatccatctgacagcaaagacttgctgactcagttcaaagttgctgccatagcaattgcttcagatgaaaagattgcattgctgggcgctattcagtctctattcgaagcctcgatgtacacctttgttttcctctggacaccagctcttagcccaaacgatgaagaaattccacatggcttcgtctttgcaaccttcatgttagcctcaatgttgggaagctcccttacagctcgtctcatgtctcgctcatctctcagagtcgaaaactacatgcaaattgtctttctagtctcggctgcttcacttcttcttcccattacaacaagtgtcttggttgacaccgtcaaaggtgaaagacgaaggattgtcgttaactagctccattcagctgcttggtttctgtgtttttgagtcttgtgtcggaatattttggccttcgataatgaagatgaggtcgcagtatatacctgaagaagcacgaagcaccataatgaatttcttccgtgttccactcaacatctttgtctgcatcgtcttgtacaacgtggacgcatttccgatcacaatcatgtttggtatgtgctcaatcttcctcttcgtagcctccatattacaacggcggcttatggtcatctccgaaaagccaaaggcagaagattggagtccgatgaaggagcgaaactcggaagttgatcctcttaccctctgattgtgtccactcctaagctcgtcaaattcctaatttcattttttggtgattttttttctttgagaaatagaaaaagaacaatcagaatgaagaaaggtaatgatttgctcttagctttttacatgtatggttagtgatgctgattgtttgatagggtatgtaactctatatttacctttacgcacaattaccaatcaagtcttattatttt

SEQ ID NO: 43429 - protein, 350 aa, Arabidopsis thaliana
  peptide (1)..(350): Ceres Seq. ID no. 12357595
  misc_feature (4)..(341): Pfam Name: Protein of unknown function (DUF791) Pfam Description: Protein of unknown function (DUF791)
  misc_feature (8)..(331): Homolog of NCBI NO: 25148676 NR Description: Transporter (48.1 kD) [Caenorhabditis elegans]
  misc_feature (1)..(337): Homolog of NCBI NO: 7487513 NR Description: hypothetical protein T29A15.210 - Arabidopsis
  misc_feature (1)..(342): Homolog of NCBI NO: 37536124 NR Description: putative transporter [Oryza sativa (japonica
  misc_feature (1)..(342): Homolog of NCBI NO: 34902182 NR Description: Putative transporter [Oryza sativa (japonica
  misc_feature (1)..(342): Homolog of NCBI NO: 6633826 NR Description: F1N19.22 [Arabidopsis thaliana]
  misc_feature (1)..(342): Homolog of NCBI NO: 15217708 NR Description: unknown protein; protein id: At1g64650.1
  misc_feature (1)..(342): Homolog of NCBI NO: 18417054 NR Description: putative protein
  misc_feature (1)..(155): Homolog of NCBI NO: 11292198 NR Description: hypothetical protein F2K15.170 - Arabidopsis
  misc_feature (144)..(341): Homolog of NCBI NO: 11292198 NR Description: hypothetical protein F2K15.170 - Arabidopsis
  misc_feature (1)..(341): Homolog of NCBI NO: 30693172 NR Description: expressed protein [Arabidopsis thaliana]
MEVFYYLVFGVMAAVVAALELSKTNKDRINTSSSFNSFKNNYLLVFSIMMAGDWLQGPYVYYLYSTYGFGKGDIGQLFIAGFGSSMLFGTIVGSLADKQGRKRACVTYCIVYILSCITKHSPQYKVLMVGRILGGIATSLLFSAFESWLIAEHNKRNFEQQWLSLTFSKAVFLGNGLVAILSGLFGNLLVDTFSFGPVAPFDAAACFLAIGMAIILGTWSENFGDPSDSKDLLTQFKVAAIAIASDEKIALLGAIQSLFEASMYTFVFLWTPALSPNDEEIPHGFVFATFMLASMLGSSLTARLMSRSSLRVENYMQIVFLVSAASLLLPITTSVLVDTVKGERRRIVVN

SEQ ID NO: 43430 - protein, 339 aa, Arabidopsis thaliana
  peptide (1)..(339): Ceres Seq. ID no. 12357596
  misc_feature (1)..(330): Pfam Name: Protein of unknown function (DUF791) Pfam Description: Protein of unknown function (DUF791)
  misc_feature (1)..(320): Homolog of NCBI NO: 25148676 NR Description: Transporter (48.1 kD) [Caenorhabditis elegans]
  misc_feature (1)..(326): Homolog of NCBI NO: 7487513 NR Description: hypothetical protein T29A15.210 - Arabidopsis
  misc_feature (1)..(331): Homolog of NCBI NO: 37536124 NR Description: putative transporter [Oryza sativa (japonica
  misc_feature (1)..(331): Homolog of NCBI NO: 34902182 NR Description: Putative transporter [Oryza sativa (japonica
  misc_feature (1)..(331): Homolog of NCBI NO: 6633826 NR Description: F1N19.22 [Arabidopsis thaliana]
  misc_feature (1)..(331): Homolog of NCBI NO: 15217708 NR Description: unknown protein; protein id: At1g64650.1
  misc_feature (1)..(331): Homolog of NCBI NO: 18417054 NR Description: putative protein
  misc_feature (1)..(144): Homolog of NCBI NO: 11292198 NR Description: hypothetical protein F2K15.170 - Arabidopsis
  misc_feature (133)..(330): Homolog of NCBI NO: 11292198 NR Description: hypothetical protein F2K15.170 - Arabidopsis
  misc_feature (1)..(330): Homolog of NCBI NO: 30693172 NR Description: expressed protein [Arabidopsis thaliana]
MAAVVAALELSKTNKDRINTSSSFNSFKNNYLLVFSIMMAGDWLQGPYVYYLYSTYGFGKGDIGQLFIAGFGSSMLFGTIVGSLADKQGRKRACVTYCIVYILSCITKHSPQYKVLMVGRILGGIATSLLFSAFESWLIAEHNKRNFEQQWLSLTFSKAVFLGNGLVAILSGLFGNLLVDTFSFGPVAPFDAAACFLAIGMAIILGTWSENFGDPSDSKDLLTQFKVAAIAIASDEKIALLGAIQSLFEASMYTFVFLWTPALSPNDEEIPHGFVFATFMLASMLGSSLTARLMSRSSLRVENYMQIVFLVSAASLLLPITTSVLVDTVKGERRRIVVN

SEQ ID NO: 43431 - protein, 302 aa, Arabidopsis thaliana
  peptide (1)..(302): Ceres Seq. ID no. 12357597
  misc_feature (1)..(293): Pfam Name: Protein of unknown function (DUF791) Pfam Description: Protein of unknown function (DUF791)
  misc_feature (1)..(283): Homolog of NCBI NO: 25148676 NR Description: Transporter (48.1 kD) [Caenorhabditis elegans]
  misc_feature (1)..(289): Homolog of NCBI NO: 7487513 NR Description: hypothetical protein T29A15.210 - Arabidopsis
  misc_feature (1)..(294): Homolog of NCBI NO: 37536124 NR Description: putative transporter [Oryza sativa (japonica
  misc_feature (1)..(294): Homolog of NCBI NO: 34902182 NR Description: Putative transporter [Oryza sativa (japonica
  misc_feature (1)..(294): Homolog of NCBI NO: 6633826 NR Description: F1N19.22 [Arabidopsis thaliana]
  misc_feature (1)..(294): Homolog of NCBI NO: 15217708 NR Description: unknown protein; protein id: At1g64650.1
  misc_feature (1)..(294): Homolog of NCBI NO: 18417054 NR Description: putative protein
  misc_feature (1)..(107): Homolog of NCBI NO: 11292198 NR Description: hypothetical protein F2K15.170 - Arabidopsis
  misc_feature (96)..(293): Homolog of NCBI NO: 11292198 NR Description: hypothetical protein F2K15.170 - Arabidopsis
  misc_feature (1)..(293): Homolog of NCBI NO: 30693172 NR Description: expressed protein [Arabidopsis thaliana]
MMAGDWLQGPYVYYLYSTYGFGKGDIGQLFIAGFGSSMLFGTIVGSLADKQGRKRACVTYCIVYILSCITKHSPQYKVLMVGRILGGIATSLLFSAFESWLIAEHNKRNFEQQWLSLTFSKAVFLGNGLVAILSGLFGNLLVDTFSFGPVAPFDAAACFLAIGMAIILGTWSENFGDPSDSKDLLTQFKVAAIAIASDEKIALLGAIQSLFEASMYTFVFLWTPALSPNDEEIPHGFVFATFMLASMLGSSLTARLMSRSSLRVENYMQIVFLVSAASLLLPITTSVLVDTVKGERRRIVVN

SEQ ID NO: 43432 - DNA, 779 bp, Arabidopsis thaliana; identical to SEQ ID NO: 36727
  misc_feature (1)..(779): Ceres Seq. ID no. 12580269
  misc_feature: MA Experiment ID: 108434 Result: Up-regulated in Transcription
  misc_feature: MA Experiment 108434 PARAMETER Experiment Name: At_Root_Tips_cDNA_P Parameter: Tissue Value: Root Tips
  misc_feature: MA Experiment ID: 108462 Result: Down-regulated in Transcription
  misc_feature: MA Experiment 108462 PARAMETER Experiment Name: At_Germinating_Seeds_cDNA_P Parameter: Age (day) Value: 2 vs. 0
  misc_feature: MA Experiment 108462 PARAMETER Experiment Name: At_Germinating_Seeds_cDNA_P Parameter: Tissue Value: Germinating Seeds
  misc_feature: MA Experiment ID: 108463 Result: Down-regulated in Transcription
  misc_feature: MA Experiment 108463 PARAMETER Experiment Name: At_Germinating_Seeds_cDNA_P Parameter: Age (day) Value: 3 vs. 0
  misc_feature: MA Experiment 108463 PARAMETER Experiment Name: At_Germinating_Seeds_cDNA_P Parameter: Tissue Value: Germinating Seeds
  misc_feature: MA Experiment ID: 108464 Result: Down-regulated in Transcription
  misc_feature: MA Experiment 108464 PARAMETER Experiment Name: At_Germinating_Seeds_cDNA_P Parameter: Age (day) Value: 4 vs. 0
  misc_feature: MA Experiment 108464 PARAMETER Experiment Name: At_Germinating_Seeds_cDNA_P Parameter: Tissue Value: Germinating Seeds
  misc_feature: MA Experiment ID: 108561 Result: Down-regulated in Transcription
  misc_feature: MA Experiment 108561 PARAMETER Experiment Name: At_100uM_ABA_cDNA_P Parameter: Timepoint (hr) Value: 6
  misc_feature: MA Experiment 108561 PARAMETER Experiment Name: At_100uM_ABA_cDNA_P Parameter: Tissue Value: Aerial
  misc_feature: MA Experiment 108561 PARAMETER Experiment Name: At_100uM_ABA_cDNA_P Parameter: Treatment Value: 100uM ABA vs. No Treatment
  misc_feature: MA Experiment ID: 108573 Result: Down-regulated in Transcription
  misc_feature: MA Experiment 108573 PARAMETER Experiment Name: At_Drought_cDNA_P Parameter: Timepoint (hr) Value: 6
  misc_feature: MA Experiment 108573 PARAMETER Experiment Name: At_Drought_cDNA_P Parameter: Tissue Value: Aerial
  misc_feature: MA Experiment 108573 PARAMETER Experiment Name: At_Drought_cDNA_P Parameter: Treatment Value: Drought vs. No Drought
  misc_feature: MA Experiment ID: 108585 Result: Down-regulated in Transcription
  misc_feature: MA Experiment 108585 PARAMETER Experiment Name: At_5mM_NaNP_cDNA_P Parameter: Timepoint (hr) Value: 6
  misc_feature: MA Experiment 108585 PARAMETER Experiment Name: At_5mM_NaNP_cDNA_P Parameter: Tissue Value: Aerial
  misc_feature: MA Experiment 108585 PARAMETER Experiment Name: At_5mM_NaNP_cDNA_P Parameter: Treatment Value: null
  misc_feature: MA Experiment ID: 108595 Result: Down-regulated in Transcription
  misc_feature: MA Experiment 108595 PARAMETER Experiment Name: At_Ler-pi_Ovule_cDNA_P Parameter: Plant Line Value: null
  misc_feature: MA Experiment ID: 108607 Result: Down-regulated in Transcription
  misc_feature: MA Experiment 108607 PARAMETER Experiment Name: At_100uM_ABA_cDNA_P Parameter: Timepoint (hr) Value: 4
  misc_feature: MA Experiment 108607 PARAMETER Experiment Name: At_100uM_ABA_cDNA_P Parameter: Tissue Value: Aerial
  misc_feature: MA Experiment 108607 PARAMETER Experiment Name: At_100uM_ABA_cDNA_P Parameter: Treatment Value: 100uM ABA vs. No Treatment
  misc_feature: MA Experiment ID: 108609 Result: Down-regulated in Transcription
  misc_feature: MA Experiment 108609 PARAMETER Experiment Name: At_100uM_ABA_cDNA_P Parameter: Timepoint (hr) Value: 24
  misc_feature: MA Experiment 108609 PARAMETER Experiment Name: At_100uM_ABA_cDNA_P Parameter: Tissue Value: Aerial
  misc_feature: MA Experiment 108609 PARAMETER Experiment Name: At_100uM_ABA_cDNA_P Parameter: Treatment Value: 100uM ABA vs. No Treatment
  misc_feature: MA Experiment ID: 108668 Result: Down-regulated in Transcription
  misc_feature: MA Experiment 108668 PARAMETER Experiment Name: At_2mM_SA_cDNA_P Parameter: Plant Line Value: WS
  misc_feature: MA Experiment 108668 PARAMETER Experiment Name: At_2mM_SA_cDNA_P Parameter: Timepoint (hr) Value: 6
  misc_feature: MA Experiment 108668 PARAMETER Experiment Name: At_2mM_SA_cDNA_P Parameter: Treatment Value: 2mM SA vs. No Treatment
  misc_feature: MA Experiment ID: 20000307 Result: Up-regulated in Transcription
  misc_feature: MA Experiment 20000307 PARAMETER Experiment Name: At_Germinating_Seeds_Sub_P Parameter: Age (hr) Value: 24 vs. 0
  misc_feature: MA Experiment 20000307 PARAMETER Experiment Name: At_Germinating_Seeds_Sub_P Parameter: Organism Value: A. thaliana
  misc_feature: MA Experiment 20000307 PARAMETER Experiment Name: At_Germinating_Seeds_Sub_P Parameter: Plant Line Value: WS
  misc_feature: MA Experiment 20000307 PARAMETER Experiment Name: At_Germinating_Seeds_Sub_P Parameter: Tissue Value: Germinating Seeds
  misc_feature: MA Experiment ID: 20000314 Result: Down-regulated in Transcription
  misc_feature: MA Experiment 20000314 PARAMETER Experiment Name: At_14day_Shoots-Roots_Sub_P Parameter: Age (day) Value: 14
  misc_feature: MA Experiment 20000314 PARAMETER Experiment Name: At_14day_Shoots-Roots_Sub_P Parameter: Organism Value: A. thaliana
  misc_feature: MA Experiment 20000314 PARAMETER Experiment Name: At_14day_Shoots-Roots_Sub_P Parameter: Plant Line Value: WS
  misc_feature: MA Experiment 20000314 PARAMETER Experiment Name: At_14day_Shoots-Roots_Sub_P Parameter: Tissue Value: Roots vs. Whole Plant
  misc_feature: MA Experiment ID: 20000315 Result: Up-regulated in Transcription
  misc_feature: MA Experiment 20000315 PARAMETER Experiment Name: At_14day_Shoots-Roots_Sub_P Parameter: Age (day) Value: 14
  misc_feature: MA Experiment 20000315 PARAMETER Experiment Name: At_14day_Shoots-Roots_Sub_P Parameter: Organism Value: A. thaliana
  misc_feature: MA Experiment 20000315 PARAMETER Experiment Name: At_14day_Shoots-Roots_Sub_P Parameter: Plant Line Value: WS
  misc_feature: MA Experiment 20000315 PARAMETER Experiment Name: At_14day_Shoots-Roots_Sub_P Parameter: Tissue Value: Shoots vs. Whole Plant
  misc_feature: MA Experiment ID: 20000347 Result: Down-regulated in Transcription
  misc_feature: MA Experiment 20000347 PARAMETER Experiment Name: At_2mM_SA_Sub_P Parameter: Age (day) Value: 14
  misc_feature: MA Experiment 20000347 PARAMETER Experiment Name: At_2mM_SA_Sub_P Parameter: Organism Value: A. thaliana
  misc_feature: MA Experiment 20000347 PARAMETER Experiment Name: At_2mM_SA_Sub_P Parameter: Plant Line Value: WS
  misc_feature: MA Experiment 20000347 PARAMETER Experiment Name: At_2mM_SA_Sub_P Parameter: Timepoint (hr) Value: 6
  misc_feature: MA Experiment 20000347 PARAMETER Experiment Name: At_2mM_SA_Sub_P Parameter: Tissue Value: Aerial
  misc_feature: MA Experiment 20000347 PARAMETER Experiment Name: At_2mM_SA_Sub_P Parameter: Treatment Value: 2mM SA vs. No Treatment
  misc_feature: MA Experiment ID: 20000349 Result: Down-regulated in Transcription
  misc_feature: MA Experiment 20000349 PARAMETER Experiment Name: At_100uM_ABA_Sub_P Parameter: Age (day) Value: 14
  misc_feature: MA Experiment 20000349 PARAMETER Experiment Name: At_100uM_ABA_Sub_P Parameter: Organism Value: A. thaliana
  misc_feature: MA Experiment 20000349 PARAMETER Experiment Name: At_100uM_ABA_Sub_P Parameter: Plant Line Value: WS
  misc_feature: MA Experiment 20000349 PARAMETER Experiment Name: At_100uM_ABA_Sub_P Parameter: Timepoint (hr) Value: 6
  misc_feature: MA Experiment 20000349 PARAMETER Experiment Name: At_100uM_ABA_Sub_P Parameter: Tissue Value: Aerial
  misc_feature: MA Experiment 20000349 PARAMETER Experiment Name: At_100uM_ABA_Sub_P Parameter: Treatment Value: 100uM ABA vs. No Treatment
  misc_feature: MA Experiment ID: 20000352 Result: Down-regulated in Transcription
  misc_feature: MA Experiment 20000352 PARAMETER Experiment Name: At_Drought_Sub_P Parameter: Age (day) Value: 7
  misc_feature: MA Experiment 20000352 PARAMETER Experiment Name: At_Drought_Sub_P Parameter: Organism Value: A. thaliana
  misc_feature: MA Experiment 20000352 PARAMETER Experiment Name: At_Drought_Sub_P Parameter: Plant Line Value: WS
  misc_feature: MA Experiment 20000352 PARAMETER Experiment Name: At_Drought_Sub_P Parameter: Timepoint (hr) Value: 6
  misc_feature: MA Experiment 20000352 PARAMETER Experiment Name: At_Drought_Sub_P Parameter: Tissue Value: Whole Plant
  misc_feature: MA Experiment 20000352 PARAMETER Experiment Name: At_Drought_Sub_P Parameter: Treatment Value: Drought vs. No Drought
  misc_feature: MA Experiment ID: 20000355 Result: Up-regulated in Transcription
  misc_feature: MA Experiment 20000355 PARAMETER Experiment Name: At_Siliques_Sub_P Parameter: Age (day) Value: 21
  misc_feature: MA Experiment 20000355 PARAMETER Experiment Name: At_Siliques_Sub_P Parameter: Organism Value: A. thaliana
  misc_feature: MA Experiment 20000355 PARAMETER Experiment Name: At_Siliques_Sub_P Parameter: Plant Line Value: WS
  misc_feature: MA Experiment 20000355 PARAMETER Experiment Name: At_Siliques_Sub_P Parameter: Tissue Value: Less Than 5mm Siliques vs. Whole Plant

SEQ ID NO: 43433 - protein, 122 aa, Arabidopsis thaliana; identical to SEQ ID NO: 36728
  peptide (1)..(122): Ceres Seq. ID no. 12580270
  misc_feature (54)..(117): Pfam Name: Protein of unknown function (DUF861) Pfam Description: Protein of unknown function (DUF861)
  misc_feature (54)..(117): Pfam Name: Protein of unknown function (DUF861) Pfam Description: Protein of unknown function (DUF861)
  misc_feature (54)..(117): Pfam Name: Protein of unknown function (DUF861) Pfam Description: Protein of unknown function (DUF861)
  misc_feature (46)..(114): Homolog of NCBI NO: 17229206 NR Description: hypothetical protein [Nostoc sp. PCC 7120]
  misc_feature (20)..(114): Homolog of NCBI NO: 15234988 NR Description: putative protein
  misc_feature (42)..(114): Homolog of NCBI NO: 15235021 NR Description: putative protein
  misc_feature (46)..(114): Homolog of NCBI NO: 23127631 NR Description: hypothetical protein [Nostoc punctiforme]
  misc_feature (24)..(114): Homolog of NCBI NO: 21553516 NR Description: unknown [Arabidopsis thaliana]
  misc_feature (46)..(114): Homolog of NCBI NO: 17229206 NR Description: hypothetical protein [Nostoc sp. PCC 7120]
  misc_feature (42)..(114): Homolog of NCBI NO: 15235021 NR Description: putative protein
  misc_feature (24)..(114): Homolog of NCBI NO: 21553516 NR Description: unknown [Arabidopsis thaliana]
  misc_feature (46)..(114): Homolog of NCBI NO: 23127631 NR Description: hypothetical protein [Nostoc punctiforme]
  misc_feature (42)..(114): Homolog of NCBI NO: 15235021 NR Description: putative protein
  misc_feature (20)..(114): Homolog of NCBI NO: 15234988 NR Description: putative protein
  misc_feature (46)..(114): Homolog of NCBI NO: 17229206 NR Description: hypothetical protein [Nostoc sp. PCC 7120]
  misc_feature (1)..(117): Homolog of NCBI NO: 21592432 NR Description: unknown [Arabidopsis thaliana]
  misc_feature (1)..(117): Homolog of NCBI NO: 15225202 NR Description: hypothetical protein; protein id: At2g32180.1
  misc_feature (1)..(117): Homolog of NCBI NO: 18403036 NR Description: expressed protein
  misc_feature (6)..(57): Homolog of NCBI NO: 26451964 NR Description: unknown protein [Arabidopsis thaliana]
  misc_feature (23)..(114): Homolog of NCBI NO: 38344542 NR Description: OSJNBa0027P08.10 [Oryza sativa (japonica
  misc_feature (1)..(117): Homolog of NCBI NO: 21592432 NR Description: unknown [Arabidopsis thaliana]
  misc_feature (1)..(117): Homolog of NCBI NO: 15225202 NR Description: hypothetical protein; protein id: At2g32180.1
  misc_feature (1)..(117): Homolog of NCBI NO: 18403036 NR Description: expressed protein
  misc_feature (6)..(57): Homolog of NCBI NO: 26451964 NR Description: unknown protein [Arabidopsis thaliana]
  misc_feature (23)..(114): Homolog of NCBI NO: 38344542 NR Description: OSJNBa0027P08.10 [Oryza sativa (japonica
  misc_feature (24)..(114): Homolog of NCBI NO: 21553516 NR Description: unknown [Arabidopsis thaliana]
  misc_feature (46)..(114): Homolog of NCBI NO: 23127631 NR Description: hypothetical protein [Nostoc punctiforme]
  misc_feature (20)..(114): Homolog of NCBI NO: 15234988 NR Description: putative protein
  misc_feature (23)..(114): Homolog of NCBI NO: 38344542 NR Description: OSJNBa0027P08.10 [Oryza sativa (japonica
  misc_feature (6)..(57): Homolog of NCBI NO: 26451964 NR Description: unknown protein [Arabidopsis thaliana]
  misc_feature (1)..(117): Homolog of NCBI NO: 18403036 NR Description: expressed protein
  misc_feature (1)..(117): Homolog of NCBI NO: 15225202 NR Description: hypothetical protein; protein id: At2g32180.1
  misc_feature (1)..(117): Homolog of NCBI NO: 21592432 NR Description: unknown [Arabidopsis thaliana]

SEQ ID NO: 43434 - protein, 117 aa, Arabidopsis thaliana; identical to SEQ ID NO: 36729
  peptide (1)..(117): Ceres Seq. ID no. 12580271
  misc_feature (49)..(112): Pfam Name: Protein of unknown function (DUF861) Pfam Description: Protein of unknown function (DUF861)
  misc_feature (49)..(112): Pfam Name: Protein of unknown function (DUF861) Pfam Description: Protein of unknown function (DUF861)
  misc_feature (49)..(112): Pfam Name: Protein of unknown function (DUF861) Pfam Description: Protein of unknown function (DUF861)
  misc_feature (41)..(109): Homolog of NCBI NO: 17229206 NR Description: hypothetical protein [Nostoc sp. PCC 7120]
  misc_feature (15)..(109): Homolog of NCBI NO: 15234988 NR Description: putative protein
  misc_feature (37)..(109): Homolog of NCBI NO: 15235021 NR Description: putative protein
  misc_feature (41)..(109): Homolog of NCBI NO: 23127631 NR Description: hypothetical protein [Nostoc punctiforme]
  misc_feature (19)..(109): Homolog of NCBI NO: 21553516 NR Description: unknown [Arabidopsis thaliana]
  misc_feature (41)..(109): Homolog of NCBI NO: 17229206 NR Description: hypothetical protein [Nostoc sp. PCC 7120]
  misc_feature (37)..(109): Homolog of NCBI NO: 15235021 NR Description: putative protein
  misc_feature (19)..(109): Homolog of NCBI NO: 21553516 NR Description: unknown [Arabidopsis thaliana]
  misc_feature (41)..(109): Homolog of NCBI NO: 23127631 NR Description: hypothetical protein [Nostoc punctiforme]
  misc_feature (37)..(109): Homolog of NCBI NO: 15235021 NR Description: putative protein
  misc_feature (15)..(109): Homolog of NCBI NO: 15234988 NR Description: putative protein
  misc_feature (41)..(109): Homolog of NCBI NO: 17229206 NR Description: hypothetical protein [Nostoc sp. PCC 7120]
  misc_feature (1)..(112): Homolog of NCBI NO: 21592432 NR Description: unknown [Arabidopsis thaliana]
  misc_feature (1)..(112): Homolog of NCBI NO: 15225202 NR Description: hypothetical protein; protein id: At2g32180.1
  misc_feature (1)..(112): Homolog of NCBI NO: 18403036 NR Description: expressed protein
  misc_feature (1)..(52): Homolog of NCBI NO: 26451964 NR Description: unknown protein [Arabidopsis thaliana]
  misc_feature (18)..(109): Homolog of NCBI NO: 38344542 NR Description: OSJNBa0027P08.10 [Oryza sativa (japonica
  misc_feature (1)..(112): Homolog of NCBI NO: 21592432 NR Description: unknown [Arabidopsis thaliana]
  misc_feature (1)..(112): Homolog of NCBI NO: 15225202 NR Description: hypothetical protein; protein id: At2g32180.1
  misc_feature (1)..(112): Homolog of NCBI NO: 18403036 NR Description: expressed protein
  misc_feature (1)..(52): Homolog of NCBI NO: 26451964 NR Description: unknown protein [Arabidopsis thaliana]
  misc_feature (18)..(109): Homolog of NCBI NO: 38344542 NR Description: OSJNBa0027P08.10 [Oryza sativa (japonica
  misc_feature (19)..(109): Homolog of NCBI NO: 21553516 NR Description: unknown [Arabidopsis thaliana]
  misc_feature (41)..(109): Homolog of NCBI NO: 23127631 NR Description: hypothetical protein [Nostoc punctiforme]
  misc_feature (15)..(109): Homolog of NCBI NO: 15234988 NR Description: putative protein
  misc_feature (18)..(109): Homolog of NCBI NO: 38344542 NR Description: OSJNBa0027P08.10 [Oryza sativa (japonica
  misc_feature (1)..(52): Homolog of NCBI NO: 26451964 NR Description: unknown protein [Arabidopsis thaliana]
  misc_feature (1)..(112): Homolog of NCBI NO: 18403036 NR Description: expressed protein
  misc_feature (1)..(112): Homolog of NCBI NO: 15225202 NR Description: hypothetical protein; protein id: At2g32180.1
  misc_feature (1)..(112): Homolog of NCBI NO: 21592432 NR Description: unknown [Arabidopsis thaliana]

SEQ ID NO: 43435 - protein, 89 aa, Arabidopsis thaliana; identical to SEQ ID NO: 36730
  peptide (1)..(89): Ceres Seq. ID no. 12580272
  misc_feature (21)..(84): Pfam Name: Protein of unknown function (DUF861) Pfam Description: Protein of unknown function (DUF861)
  misc_feature (21)..(84): Pfam Name: Protein of unknown function (DUF861) Pfam Description: Protein of unknown function (DUF861)
  misc_feature (21)..(84): Pfam Name: Protein of unknown function (DUF861) Pfam Description: Protein of unknown function (DUF861)
  misc_feature (13)..(81): Homolog of NCBI NO: 17229206 NR Description: hypothetical protein [Nostoc sp. PCC 7120]
  misc_feature (1)..(81): Homolog of NCBI NO: 15234988 NR Description: putative protein
  misc_feature (9)..(81): Homolog of NCBI NO: 15235021 NR Description: putative protein
  misc_feature (13)..(81): Homolog of NCBI NO: 23127631 NR Description: hypothetical protein [Nostoc punctiforme]
  misc_feature (1)..(81): Homolog of NCBI NO: 21553516 NR Description: unknown [Arabidopsis thaliana]
  misc_feature (13)..(81): Homolog of NCBI NO: 17229206 NR Description: hypothetical protein [Nostoc sp. PCC 7120]
  misc_feature (9)..(81): Homolog of NCBI NO: 15235021 NR Description: putative protein
  misc_feature (1)..(81): Homolog of NCBI NO: 21553516 NR Description: unknown [Arabidopsis thaliana]
  misc_feature (13)..(81): Homolog of NCBI NO: 23127631 NR Description: hypothetical protein [Nostoc punctiforme]
  misc_feature (9)..(81): Homolog of NCBI NO: 15235021 NR Description: putative protein
  misc_feature (1)..(81): Homolog of NCBI NO: 15234988 NR Description: putative protein
  misc_feature (13)..(81): Homolog of NCBI NO: 17229206 NR Description: hypothetical protein [Nostoc sp. PCC 7120]
  misc_feature (1)..(84): Homolog of NCBI NO: 21592432 NR Description: unknown [Arabidopsis thaliana]
  misc_feature (1)..(84): Homolog of NCBI NO: 15225202 NR Description: hypothetical protein; protein id: At2g32180.1
  misc_feature (1)..(84): Homolog of NCBI NO: 18403036 NR Description: expressed protein
  misc_feature (1)..(24): Homolog of NCBI NO: 26451964 NR Description: unknown protein [Arabidopsis thaliana]
  misc_feature (1)..(81): Homolog of NCBI NO: 38344542 NR Description: OSJNBa0027P08.10 [Oryza sativa (japonica
  misc_feature (1)..(84): Homolog of NCBI NO: 21592432 NR Description: unknown [Arabidopsis thaliana]
  misc_feature (1)..(84): Homolog of NCBI NO: 15225202 NR Description: hypothetical protein; protein id: At2g32180.1
  misc_feature (1)..(84): Homolog of NCBI NO: 18403036 NR Description: expressed protein
  misc_feature (1)..(24): Homolog of NCBI NO: 26451964 NR Description: unknown protein [Arabidopsis thaliana]
  misc_feature (1)..(81): Homolog of NCBI NO: 38344542 NR Description: OSJNBa0027P08.10 [Oryza sativa (japonica
  misc_feature (1)..(81): Homolog of NCBI NO: 21553516 NR Description: unknown [Arabidopsis thaliana]
  misc_feature (13)..(81): Homolog of NCBI NO: 23127631 NR Description: hypothetical protein [Nostoc punctiforme]
  misc_feature (1)..(81): Homolog of NCBI NO: 15234988 NR Description: putative protein
  misc_feature (1)..(81): Homolog of NCBI NO: 38344542 NR Description: OSJNBa0027P08.10 [Oryza sativa (japonica
  misc_feature (1)..(24): Homolog of NCBI NO: 26451964 NR Description: unknown protein [Arabidopsis thaliana]
  misc_feature (1)..(84): Homolog of NCBI NO: 18403036 NR Description: expressed protein
  misc_feature (1)..(84): Homolog of NCBI NO: 15225202 NR Description: hypothetical protein; protein id: At2g32180.1
  misc_feature (1)..(84): Homolog of NCBI NO: 21592432 NR Description: unknown [Arabidopsis thaliana]

SEQ ID NO: 43436 - DNA, 1146 bp, Arabidopsis thaliana; identical to SEQ ID NO: 25459
  misc_feature (1)..(1146): Ceres Seq. ID no. 12336445
  misc_feature: MA Experiment ID: 20000185 Result: Down-regulated in Transcription
  misc_feature: MA Experiment 20000185 PARAMETER Experiment Name: At_Roots__P Parameter: Age (day) Value: 7 vs. 21
  misc_feature: MA Experiment 20000185 PARAMETER Experiment Name: At_Roots__P Parameter: Organism Value: A. thaliana
  misc_feature: MA Experiment 20000185 PARAMETER Experiment Name: At_Roots__P Parameter: Tissue Value: Roots vs. Whole Plant
  misc_feature: MA Experiment ID: 20000227 Result: Down-regulated in Transcription
  misc_feature: MA Experiment 20000227 PARAMETER Experiment Name: At_Root-Tips-vs-Tops_P Parameter: Tissue Value: Root Tips vs. Root Tops
  misc_feature: MA Experiment ID: 20000264 Result: Down-regulated in Transcription
  misc_feature: MA Experiment 20000264 PARAMETER Experiment Name: At_Open_Flower_P Parameter: Age (day) Value: 21
  misc_feature: MA Experiment 20000264 PARAMETER Experiment Name: At_Open_Flower_P Parameter: Plant Line Value: WS
  misc_feature: MA Experiment 20000264 PARAMETER Experiment Name: At_Open_Flower_P Parameter: Tissue Value: Open Flower vs. Whole Plant
  misc_feature: MA Experiment ID: 20000269 Result: Down-regulated in Transcription
  misc_feature: MA Experiment 20000269 PARAMETER Experiment Name: At_1mM_KNO3_L-vs-H_Roots_P Parameter: Age (day) Value: 7,10,12
  misc_feature: MA Experiment 20000269 PARAMETER Experiment Name: At_1mM_KNO3_L-vs-H_Roots_P Parameter: Organism Value: A. thaliana
  misc_feature: MA Experiment 20000269 PARAMETER Experiment Name: At_1mM_KNO3_L-vs-H_Roots_P Parameter: Plant Line Value: WS
  misc_feature: MA Experiment 20000269 PARAMETER Experiment Name: At_1mM_KNO3_L-vs-H_Roots_P Parameter: Timepoint (day) Value: 7,10,12
  misc_feature: MA Experiment 20000269 PARAMETER Experiment Name: At_1mM_KNO3_L-vs-H_Roots_P Parameter: Tissue Value: Roots
  misc_feature: MA Experiment 20000269 PARAMETER Experiment Name: At_1mM_KNO3_L-vs-H_Roots_P Parameter: Treatment Value: 1mM KNO3 vs. 50mM KNO3
  misc_feature: MA Experiment ID: 20000439 Result: Down-regulated in Transcription
  misc_feature: MA Experiment 20000439 PARAMETER Experiment Name: At_Roots__P Parameter: Age (day) Value: 14 vs. 21
  misc_feature: MA Experiment 20000439 PARAMETER Experiment Name: At_Roots__P Parameter: Organism Value: A. thaliana
  misc_feature: MA Experiment 20000439 PARAMETER Experiment Name: At_Roots__P Parameter: Tissue Value: Roots vs. Whole Plant
  misc_feature: MA Experiment ID: 20000794 Result: Down-regulated in Transcription
  misc_feature: MA Experiment 20000794 PARAMETER Experiment Name: At_Petals_P Parameter: Age (day) Value: 23-25 days
  misc_feature: MA Experiment 20000794 PARAMETER Experiment Name: At_Petals_P Parameter: Plant Line Value: WS
  misc_feature: MA Experiment 20000794 PARAMETER Experiment Name: At_Petals_P Parameter: Tissue Value: Petals vs. Whole plant
  misc_feature: MA Experiment ID: 20001904 Result: Down-regulated in Transcription
  misc_feature: MA Experiment 20001904 PARAMETER Experiment Name: At_Drought_Reproduction_P Parameter: Age (day) Value: 37
  misc_feature: MA Experiment 20001904 PARAMETER Experiment Name: At_Drought_Reproduction_P Parameter: Organism Value: A. thaliana
  misc_feature: MA Experiment 20001904 PARAMETER Experiment Name: At_Drought_Reproduction_P Parameter: Plant Line Value: WS
  misc_feature: MA Experiment 20001904 PARAMETER Experiment Name: At_Drought_Reproduction_P Parameter: Timepoint (day) Value: 7
  misc_feature: MA Experiment 20001904 PARAMETER Experiment Name: At_Drought_Reproduction_P Parameter: Tissue Value: Rosettes
  misc_feature: MA Experiment 20001904 PARAMETER Experiment Name: At_Drought_Reproduction_P Parameter: Treatment Value: Drought vs. No Drought
  misc_feature: MA Experiment ID: 20001905 Result: Down-regulated in Transcription
  misc_feature: MA Experiment 20001905 PARAMETER Experiment Name: At_Drought_Reproduction_P Parameter: Age (day) Value: 40
  misc_feature: MA Experiment 20001905 PARAMETER Experiment Name: At_Drought_Reproduction_P Parameter: Organism Value: A. thaliana
  misc_feature: MA Experiment 20001905 PARAMETER Experiment Name: At_Drought_Reproduction_P Parameter: Plant Line Value: WS
  misc_feature: MA Experiment 20001905 PARAMETER Experiment Name: At_Drought_Reproduction_P Parameter: Timepoint (day) Value: 10
  misc_feature: MA Experiment 20001905 PARAMETER Experiment Name: At_Drought_Reproduction_P Parameter: Tissue Value: Rosettes
  misc_feature: MA Experiment 20001905 PARAMETER Experiment Name: At_Drought_Reproduction_P Parameter: Treatment Value: Drought vs. No Drought
  misc_feature: Phenotype: WHOLE PLANT Color-Yellow-Green Viable 1
  misc_feature: Phenotype: WHOLE PLANT Color-Yellow-Green Viable 1
  misc_feature: Phenotype: WHOLE PLANT Size-Small
  misc_feature: Phenotype: WHOLE PLANT Color-Yellow-Green Viable 1
  misc_feature: Phenotype: WHOLE PLANT Color-Yellow-Green Viable 1
  misc_feature: Phenotype: WHOLE PLANT Size-Small
  misc_feature: Phenotype: WHOLE PLANT Color-Yellow-Green Viable 1
  misc_feature: Phenotype: WHOLE PLANT Color-Yellow-Green Viable 1
  misc_feature: Phenotype: WHOLE PLANT Size-Small
  misc_feature: Phenotype: WHOLE PLANT Color-Yellow-Green Viable 1
  misc_feature: Phenotype: WHOLE PLANT Color-Yellow-Green Viable 1
  misc_feature: Phenotype: WHOLE PLANT Size-Small
  misc_feature: Phenotype: WHOLE PLANT Color-Yellow-Green Viable 1
  misc_feature: Phenotype: WHOLE PLANT Color-Yellow-Green Viable 1
  misc_feature: Phenotype: WHOLE PLANT Size-Small
  misc_feature: Phenotype: WHOLE PLANT Color-Yellow-Green Viable 1
  misc_feature: Phenotype: WHOLE PLANT Color-Yellow-Green Viable 1
  misc_feature: Phenotype: WHOLE PLANT Size-Small
  misc_feature: Phenotype: WHOLE PLANT Color-Yellow-Green Viable 1
  misc_feature: Phenotype: WHOLE PLANT Color-Yellow-Green Viable 1
  misc_feature: Phenotype: WHOLE PLANT Size-Small
  misc_feature: Phenotype: WHOLE PLANT Color-Yellow-Green Viable 1
  misc_feature: Phenotype: WHOLE PLANT Color-Yellow-Green Viable 1
  misc_feature: Phenotype: WHOLE PLANT Color-Yellow-Green Viable 1
  misc_feature: Phenotype: WHOLE PLANT Color-Yellow-Green Viable 1
  misc_feature: Phenotype: WHOLE PLANT Color-Yellow-Green Viable 1

SEQ ID NO: 43437 - protein, 115 aa, Arabidopsis thaliana; identical to SEQ ID NO: 25460
  peptide (1)..(115): Ceres Seq. ID no. 12336446
  misc_feature (51)..(102): Homolog of NCBI NO: 7485188 NR Description: hypothetical protein - Arabidopsis thaliana
  misc_feature (51)..(102): Homolog of NCBI NO: 21555799 NR Description: Lil3 protein [Arabidopsis thaliana]
  misc_feature (51)..(102): Homolog of NCBI NO: 18414927 NR Description: Lil3 protein
  misc_feature (51)..(104): Homolog of NCBI NO: 8978078 NR Description: Lil3 protein [Arabidopsis thaliana]
  misc_feature (47)..(104): Homolog of NCBI NO: 30695110 NR Description: Lil3 protein [Arabidopsis thaliana]
  misc_feature (51)..(102): Homolog of NCBI NO: 7485188 NR Description: hypothetical protein - Arabidopsis thaliana
  misc_feature (51)..(102): Homolog of NCBI NO: 21555799 NR Description: Lil3 protein [Arabidopsis thaliana]
  misc_feature (51)..(102): Homolog of NCBI NO: 18414927 NR Description: Lil3 protein
  misc_feature (51)..(104): Homolog of NCBI NO: 8978078 NR Description: Lil3 protein [Arabidopsis thaliana]
  misc_feature (47)..(104): Homolog of NCBI NO: 30695110 NR Description: Lil3 protein [Arabidopsis thaliana]
  misc_feature (51)..(102): Homolog of NCBI NO: 7485188 NR Description: hypothetical protein - Arabidopsis thaliana
  misc_feature (51)..(102): Homolog of NCBI NO: 21555799 NR Description: Lil3 protein [Arabidopsis thaliana]
  misc_feature (51)..(102): Homolog of NCBI NO: 18414927 NR Description: Lil3 protein
  misc_feature (51)..(104): Homolog of NCBI NO: 8978078 NR Description: Lil3 protein [Arabidopsis thaliana]
  misc_feature (47)..(104): Homolog of NCBI NO: 30695110 NR Description: Lil3 protein [Arabidopsis thaliana]
  misc_feature (51)..(102): Homolog of NCBI NO: 7485188 NR Description: hypothetical protein - Arabidopsis thaliana
  misc_feature (51)..(102): Homolog of NCBI NO: 21555799 NR Description: Lil3 protein [Arabidopsis thaliana]
  misc_feature (51)..(102): Homolog of NCBI NO: 18414927 NR Description: Lil3 protein
  misc_feature (51)..(104): Homolog of NCBI NO: 8978078 NR Description: Lil3 protein [Arabidopsis thaliana]
  misc_feature (47)..(104): Homolog of NCBI NO: 30695110 NR Description: Lil3 protein [Arabidopsis thaliana]

SEQ ID NO: 43438 - protein, 97 aa, Arabidopsis thaliana; identical to SEQ ID NO: 25461
  peptide (1)..(97): Ceres Seq. ID no. 12336447
  misc_feature (1)..(97): Homolog of NCBI NO: 18414927 NR Description: Lil3 protein
  misc_feature (1)..(97): Homolog of NCBI NO: 7485188 NR Description: hypothetical protein - Arabidopsis thaliana
  misc_feature (1)..(97): Homolog of NCBI NO: 21555799 NR Description: Lil3 protein [Arabidopsis thaliana]
  misc_feature (1)..(97): Homolog of NCBI NO: 30695110 NR Description: Lil3 protein [Arabidopsis thaliana]
  misc_feature (1)..(97): Homolog of NCBI NO: 8978078 NR Description: Lil3 protein [Arabidopsis thaliana]
  misc_feature (1)..(97): Homolog of NCBI NO: 18414927 NR Description: Lil3 protein
  misc_feature (1)..(97): Homolog of NCBI NO: 7485188 NR Description: hypothetical protein - Arabidopsis thaliana
  misc_feature (1)..(97): Homolog of NCBI NO: 21555799 NR Description: Lil3 protein [Arabidopsis thaliana]
  misc_feature (1)..(97): Homolog of NCBI NO: 30695110 NR Description: Lil3 protein [Arabidopsis thaliana]
  misc_feature (1)..(97): Homolog of NCBI NO: 8978078 NR Description: Lil3 protein [Arabidopsis thaliana]
  misc_feature (1)..(97): Homolog of NCBI NO: 18414927 NR Description: Lil3 protein
  misc_feature (1)..(97): Homolog of NCBI NO: 7485188 NR Description: hypothetical protein - Arabidopsis thaliana
  misc_feature (1)..(97): Homolog of NCBI NO: 21555799 NR Description: Lil3 protein [Arabidopsis thaliana]
  misc_feature (1)..(97): Homolog of NCBI NO: 30695110 NR Description: Lil3 protein [Arabidopsis thaliana]
  misc_feature (1)..(97): Homolog of NCBI NO: 8978078 NR Description: Lil3 protein [Arabidopsis thaliana]
  misc_feature (1)..(97): Homolog of NCBI NO: 18414927 NR Description: Lil3 protein
  misc_feature (1)..(97): Homolog of NCBI NO: 7485188 NR Description: hypothetical protein - Arabidopsis thaliana
  misc_feature (1)..(97): Homolog of NCBI NO: 21555799 NR Description: Lil3 protein [Arabidopsis thaliana]
  misc_feature (1)..(97): Homolog of NCBI NO: 30695110 NR Description: Lil3 protein [Arabidopsis thaliana]
  misc_feature (1)..(97): Homolog of NCBI NO: 8978078 NR Description: Lil3 protein [Arabidopsis thaliana]

SEQ ID NO: 43439 - protein, 80 aa, Arabidopsis thaliana; identical to SEQ ID NO: 25462
  peptide (1)..(80): Ceres Seq. ID no. 12336448
  misc_feature (1)..(80): Homolog of NCBI NO: 18414927 NR Description: Lil3 protein
  misc_feature (1)..(80): Homolog of NCBI NO: 7485188 NR Description: hypothetical protein - Arabidopsis thaliana
  misc_feature (1)..(80): Homolog of NCBI NO: 21555799 NR Description: Lil3 protein [Arabidopsis thaliana]
  misc_feature (1)..(80): Homolog of NCBI NO: 30695110 NR Description: Lil3 protein [Arabidopsis thaliana]
  misc_feature (1)..(80): Homolog of NCBI NO: 8978078 NR Description: Lil3 protein [Arabidopsis thaliana]
  misc_feature (1)..(80): Homolog of NCBI NO: 18414927 NR Description: Lil3 protein
  misc_feature (1)..(80): Homolog of NCBI NO: 7485188 NR Description: hypothetical protein - Arabidopsis thaliana
  misc_feature (1)..(80): Homolog of NCBI NO: 21555799 NR Description: Lil3 protein [Arabidopsis thaliana]
  misc_feature (1)..(80): Homolog of NCBI NO: 30695110 NR Description: Lil3 protein [Arabidopsis thaliana]
  misc_feature (1)..(80): Homolog of NCBI NO: 8978078 NR Description: Lil3 protein [Arabidopsis thaliana]
  misc_feature (1)..(80): Homolog of NCBI NO: 18414927 NR Description: Lil3 protein
  misc_feature (1)..(80): Homolog of NCBI NO: 7485188 NR Description: hypothetical protein - Arabidopsis thaliana
  misc_feature (1)..(80): Homolog of NCBI NO: 21555799 NR Description: Lil3 protein [Arabidopsis thaliana]
  misc_feature (1)..(80): Homolog of NCBI NO: 30695110 NR Description: Lil3 protein [Arabidopsis thaliana]
  misc_feature (1)..(80): Homolog of NCBI NO: 8978078 NR Description: Lil3 protein [Arabidopsis thaliana]
  misc_feature (1)..(80): Homolog of NCBI NO: 18414927 NR Description: Lil3 protein
  misc_feature (1)..(80): Homolog of NCBI NO: 7485188 NR Description: hypothetical protein - Arabidopsis thaliana
  misc_feature (1)..(80): Homolog of NCBI NO: 21555799 NR Description: Lil3 protein [Arabidopsis thaliana]
  misc_feature (1)..(80): Homolog of NCBI NO: 30695110 NR Description: Lil3 protein [Arabidopsis thaliana]
  misc_feature (1)..(80): Homolog of NCBI NO: 8978078 NR Description: Lil3 protein [Arabidopsis thaliana]

SEQ ID NO: 43440 - protein, 69 aa, Arabidopsis thaliana; identical to SEQ ID NO: 25463
  peptide (1)..(69): Ceres Seq. ID no. 12336449
  misc_feature (5)..(56): Homolog of NCBI NO: 7485188 NR Description: hypothetical protein - Arabidopsis thaliana
  misc_feature (5)..(56): Homolog of NCBI NO: 21555799 NR Description: Lil3 protein [Arabidopsis thaliana]
  misc_feature (5)..(56): Homolog of NCBI NO: 18414927 NR Description: Lil3 protein
  misc_feature (5)..(58): Homolog of NCBI NO: 8978078 NR Description: Lil3 protein [Arabidopsis thaliana]
  misc_feature (1)..(58): Homolog of NCBI NO: 30695110 NR Description: Lil3 protein [Arabidopsis thaliana]
  misc_feature (5)..(56): Homolog of NCBI NO: 7485188 NR Description: hypothetical protein - Arabidopsis thaliana
  misc_feature (5)..(56): Homolog of NCBI NO: 21555799 NR Description: Lil3 protein [Arabidopsis thaliana]
  misc_feature (5)..(56): Homolog of NCBI NO: 18414927 NR Description: Lil3 protein
  misc_feature (5)..(58): Homolog of NCBI NO: 8978078 NR Description: Lil3 protein [Arabidopsis thaliana]
  misc_feature (1)..(58): Homolog of NCBI NO: 30695110 NR Description: Lil3 protein [Arabidopsis thaliana]
  misc_feature (5)..(56): Homolog of NCBI NO: 7485188 NR Description: hypothetical protein - Arabidopsis thaliana
  misc_feature (5)..(56): Homolog of NCBI NO: 21555799 NR Description: Lil3 protein [Arabidopsis thaliana]
  misc_feature (5)..(56): Homolog of NCBI NO: 18414927 NR Description: Lil3 protein
  misc_feature (5)..(58): Homolog of NCBI NO: 8978078 NR Description: Lil3 protein [Arabidopsis thaliana]
  misc_feature (1)..(58): Homolog of NCBI NO: 30695110 NR Description: Lil3 protein [Arabidopsis thaliana]
  misc_feature (5)..(56): Homolog of NCBI NO: 7485188 NR Description: hypothetical protein - Arabidopsis thaliana
  misc_feature (5)..(56): Homolog of NCBI NO: 21555799 NR Description: Lil3 protein [Arabidopsis thaliana]
  misc_feature (5)..(56): Homolog of NCBI NO: 18414927 NR Description: Lil3 protein
  misc_feature (5)..(58): Homolog of NCBI NO: 8978078 NR Description: Lil3 protein [Arabidopsis thaliana]
  misc_feature (1)..(58): Homolog of NCBI NO: 30695110 NR Description: Lil3 protein [Arabidopsis thaliana]

SEQ ID NO: 43441 - DNA, 1256 bp, Arabidopsis thaliana
  misc_feature (1)..(1256): Ceres Seq. ID no. 13489544
  misc_feature: MA Experiment ID: 108434 Result: Up-regulated in Transcription
  misc_feature: MA Experiment 108434 PARAMETER Experiment Name: At_Root_Tips_cDNA_P Parameter: Tissue Value: Root Tips
  misc_feature: MA Experiment ID: 108435 Result: Down-regulated in Transcription
  misc_feature: MA Experiment 108435 PARAMETER Experiment Name: At_stm_Mutants_cDNA_P Parameter: Plant Line Value: wt Landsburg vs stm
  misc_feature: MA Experiment 108435 PARAMETER Experiment Name: At_stm_Mutants_cDNA_P Parameter: Tissue Value: Shoot Apical Meristem Region
  misc_feature: MA Experiment ID: 108461 Result: Up-regulated in Transcription
  misc_feature: MA Experiment 108461 PARAMETER Experiment Name: At_Germinating_Seeds_cDNA_P Parameter: Age (day) Value: 1 vs. 0
  misc_feature: MA Experiment 108461 PARAMETER Experiment Name: At_Germinating_Seeds_cDNA_P Parameter: Tissue Value: Germinating Seeds
  misc_feature: MA Experiment ID: 108501 Result: Down-regulated in Transcription
  misc_feature: MA Experiment 108501 PARAMETER Experiment Name: At_ap2_floral_buds_cDNA_P Parameter: Plant Line Value: ap2 (Ler.)
  misc_feature: MA Experiment 108501 PARAMETER Experiment Name: At_ap2_floral_buds_cDNA_P Parameter: Tissue Value: Closed Flower
  misc_feature: MA Experiment ID: 108574 Result: Down-regulated in Transcription
  misc_feature: MA Experiment 108574 PARAMETER Experiment Name: At_Wounding__cDNA_P Parameter: Timepoint (hr) Value: 1
  misc_feature: MA Experiment 108574 PARAMETER Experiment Name: At_Wounding__cDNA_P Parameter: Tissue Value: Aerial
  misc_feature: MA Experiment 108574 PARAMETER Experiment Name: At_Wounding__cDNA_P Parameter: Treatment Value: Wounding vs. No Wounding
  misc_feature: MA Experiment ID: 108579 Result: Down-regulated in Transcription
  misc_feature: MA Experiment 108579 PARAMETER Experiment Name: At_4deg_Cold_cDNA_P Parameter: Temperature (deg C) Value: 4 vs. 22
  misc_feature: MA Experiment 108579 PARAMETER Experiment Name: At_4deg_Cold_cDNA_P Parameter: Timepoint (hr) Value: 6
  misc_feature: MA Experiment 108579 PARAMETER Experiment Name: At_4deg_Cold_cDNA_P Parameter: Tissue Value: Aerial
  misc_feature: MA Experiment ID: 108585 Result: Down-regulated in Transcription
  misc_feature: MA Experiment 108585 PARAMETER Experiment Name: At_5mM_NaNP_cDNA_P Parameter: Timepoint (hr) Value: 6
  misc_feature: MA Experiment 108585 PARAMETER Experiment Name: At_5mM_NaNP_cDNA_P Parameter: Tissue Value: Aerial
  misc_feature: MA Experiment 108585 PARAMETER Experiment Name: At_5mM_NaNP_cDNA_P Parameter: Treatment Value: null
  misc_feature: MA Experiment ID: 108594 Result: Up-regulated in Transcription
  misc_feature: MA Experiment 108594 PARAMETER Experiment Name: At_Ler-rhl_Root_cDNA_P Parameter: Plant Line Value: null
  misc_feature: MA Experiment ID: 108595 Result: Down-regulated in Transcription
  misc_feature: MA Experiment 108595 PARAMETER Experiment Name: At_Ler-pi_Ovule_cDNA_P Parameter: Plant Line Value: null
  misc_feature: MA Experiment ID: 108608 Result: Down-regulated in Transcription
  misc_feature: MA Experiment 108608 PARAMETER Experiment Name: At_100uM_ABA_cDNA_P Parameter: Timepoint (hr) Value: 1
  misc_feature: MA Experiment 108608 PARAMETER Experiment Name: At_100uM_ABA_cDNA_P Parameter: Tissue Value: Aerial
  misc_feature: MA Experiment 108608 PARAMETER Experiment Name: At_100uM_ABA_cDNA_P Parameter: Treatment Value: 100uM ABA vs. No Treatment
  misc_feature: MA Experiment ID: 108667 Result: Down-regulated in Transcription
  misc_feature: MA Experiment 108667 PARAMETER Experiment Name: At_2mM_SA_cDNA_P Parameter: Plant Line Value: WS
  misc_feature: MA Experiment 108667 PARAMETER Experiment Name: At_2mM_SA_cDNA_P Parameter: Timepoint (hr) Value: 1
  misc_feature: MA Experiment 108667 PARAMETER Experiment Name: At_2mM_SA_cDNA_P Parameter: Treatment Value: 2mM SA vs. No Treatment
  misc_feature: MA Experiment ID: 20000069 Result: Down-regulated in Transcription
  misc_feature: MA Experiment 20000069 PARAMETER Experiment Name: At_100uM_ABA_Mutants_cDNA_P Parameter: Plant Line Value: CS23
  misc_feature: MA Experiment 20000069 PARAMETER Experiment Name: At_100uM_ABA_Mutants_cDNA_P Parameter: Timepoint (hr) Value: 6
  misc_feature: MA Experiment 20000069 PARAMETER Experiment Name: At_100uM_ABA_Mutants_cDNA_P Parameter: Tissue Value: Aerial
  misc_feature: MA Experiment 20000069 PARAMETER Experiment Name: At_100uM_ABA_Mutants_cDNA_P Parameter: Treatment Value: 100uM ABA vs. No Treatment
  misc_feature: MA Experiment ID: 20000070 Result: Down-regulated in Transcription
  misc_feature: MA Experiment 20000070 PARAMETER Experiment Name: At_100uM_ABA_Mutants_cDNA_P Parameter: Plant Line Value: CS24
  misc_feature: MA Experiment 20000070 PARAMETER Experiment Name: At_100uM_ABA_Mutants_cDNA_P Parameter: Timepoint (hr) Value: 6
  misc_feature: MA Experiment 20000070 PARAMETER Experiment Name: At_100uM_ABA_Mutants_cDNA_P Parameter: Tissue Value: Aerial
  misc_feature: MA Experiment 20000070 PARAMETER Experiment Name: At_100uM_ABA_Mutants_cDNA_P Parameter: Treatment Value: 100uM ABA vs. No Treatment
  misc_feature: MA Experiment ID: 20000071 Result: Down-regulated in Transcription
  misc_feature: MA Experiment 20000071 PARAMETER Experiment Name: At_100uM_ABA_Mutants_cDNA_P Parameter: Plant Line Value: CS8104
  misc_feature: MA Experiment 20000071 PARAMETER Experiment Name: At_100uM_ABA_Mutants_cDNA_P Parameter: Timepoint (hr) Value: 6
  misc_feature: MA Experiment 20000071 PARAMETER Experiment Name: At_100uM_ABA_Mutants_cDNA_P Parameter: Tissue Value: Aerial
  misc_feature: MA Experiment 20000071 PARAMETER Experiment Name: At_100uM_ABA_Mutants_cDNA_P Parameter: Treatment Value: 100uM ABA vs. No Treatment
  misc_feature: MA Experiment ID: 20000072 Result: Down-regulated in Transcription
  misc_feature: MA Experiment 20000072 PARAMETER Experiment Name: At_100uM_ABA_Mutants_cDNA_P Parameter: Plant Line Value: CS8105
  misc_feature: MA Experiment 20000072 PARAMETER Experiment Name: At_100uM_ABA_Mutants_cDNA_P Parameter: Timepoint (hr) Value: 6
  misc_feature: MA Experiment 20000072 PARAMETER Experiment Name: At_100uM_ABA_Mutants_cDNA_P Parameter: Tissue Value: Aerial
  misc_feature: MA Experiment 20000072 PARAMETER Experiment Name: At_100uM_ABA_Mutants_cDNA_P Parameter: Treatment Value: 100uM ABA vs. No Treatment
  misc_feature: MA Experiment ID: 20000086 Result: Down-regulated in Transcription
  misc_feature: MA Experiment 20000086 PARAMETER Experiment Name: At_100uM_ABA_Mutants_cDNA_P Parameter: Plant Line Value: CS22
  misc_feature: MA Experiment 20000086 PARAMETER Experiment Name: At_100uM_ABA_Mutants_cDNA_P Parameter: Timepoint (hr) Value: 6
  misc_feature: MA Experiment 20000086 PARAMETER Experiment Name: At_100uM_ABA_Mutants_cDNA_P Parameter: Tissue Value: Aerial
  misc_feature: MA Experiment 20000086 PARAMETER Experiment Name: At_100uM_ABA_Mutants_cDNA_P Parameter: Treatment Value: 100uM ABA vs. No Treatment
  misc_feature: MA Experiment ID: 20000087 Result: Down-regulated in Transcription
  misc_feature: MA Experiment 20000087 PARAMETER Experiment Name: At_100uM_ABA_Mutants_cDNA_P Parameter: Plant Line Value: WS
  misc_feature: MA Experiment 20000087 PARAMETER Experiment Name: At_100uM_ABA_Mutants_cDNA_P Parameter: Timepoint (hr) Value: 6
  misc_feature: MA Experiment 20000087 PARAMETER Experiment Name: At_100uM_ABA_Mutants_cDNA_P Parameter: Tissue Value: Aerial
  misc_feature: MA Experiment 20000087 PARAMETER Experiment Name: At_100uM_ABA_Mutants_cDNA_P Parameter: Treatment Value: 100uM ABA vs. No Treatment
  misc_feature: MA Experiment ID: 20000088 Result: Down-regulated in Transcription
  misc_feature: MA Experiment 20000088 PARAMETER Experiment Name: At_100uM_ABA_Mutants_cDNA_P Parameter: Plant Line Value: Landsberg
  misc_feature: MA Experiment 20000088 PARAMETER Experiment Name: At_100uM_ABA_Mutants_cDNA_P Parameter: Timepoint (hr) Value: 6
  misc_feature: MA Experiment 20000088 PARAMETER Experiment Name: At_100uM_ABA_Mutants_cDNA_P Parameter: Tissue Value: Aerial
  misc_feature: MA Experiment 20000088 PARAMETER Experiment Name: At_100uM_ABA_Mutants_cDNA_P Parameter: Treatment Value: 100uM ABA vs. No Treatment
  misc_feature: MA Experiment ID: 20000089 Result: Down-regulated in Transcription
  misc_feature: MA Experiment ID: 20000111 Result: Down-regulated in Transcription
  misc_feature: MA Experiment 20000111 PARAMETER Experiment Name: At_42deg_Heat_cDNA_P Parameter: Temperature (deg C) Value: 42 vs. 22
  misc_feature: MA Experiment 20000111 PARAMETER Experiment Name: At_42deg_Heat_cDNA_P Parameter: Timepoint (hr) Value: 6
  misc_feature: MA Experiment 20000111 PARAMETER Experiment Name: At_42deg_Heat_cDNA_P Parameter: Tissue Value: Aerial
  misc_feature: MA Experiment ID: 20000117 Result: Down-regulated in Transcription
  misc_feature: MA Experiment 20000117 PARAMETER Experiment Name: At_100uM_ABA_Mutants_cDNA_P Parameter: Plant Line Value: Columbia
  misc_feature: MA Experiment 20000117 PARAMETER Experiment Name: At_100uM_ABA_Mutants_cDNA_P Parameter: Timepoint (hr) Value: 6
  misc_feature: MA Experiment 20000117 PARAMETER Experiment Name: At_100uM_ABA_Mutants_cDNA_P Parameter: Tissue Value: Aerial
  misc_feature: MA Experiment 20000117 PARAMETER Experiment Name: At_100uM_ABA_Mutants_cDNA_P Parameter: Treatment Value: 100uM ABA vs. No Treatment
  misc_feature: MA Experiment ID: 20000166 Result: Down-regulated in Transcription
  misc_feature: MA Experiment 20000166 PARAMETER Experiment Name: At_100uM_ABA_P Parameter: Age (day) Value: 14
  misc_feature: MA Experiment 20000166 PARAMETER Experiment Name: At_100uM_ABA_P Parameter: Organism Value: A. thaliana
  misc_feature: MA Experiment 20000166 PARAMETER Experiment Name: At_100uM_ABA_P Parameter: Plant Line Value: WS
  misc_feature: MA Experiment 20000166 PARAMETER Experiment Name: At_100uM_ABA_P Parameter: Timepoint (hr) Value: 1
  misc_feature: MA Experiment 20000166 PARAMETER Experiment Name: At_100uM_ABA_P Parameter: Tissue Value: Aerial
  misc_feature: MA Experiment 20000166 PARAMETER Experiment Name: At_100uM_ABA_P Parameter: Treatment Value: 100uM ABA vs. No Treatment
  misc_feature: MA Experiment ID: 20000179 Result: Up-regulated in Transcription
  misc_feature: MA Experiment 20000179 PARAMETER Experiment Name: At_Germinating_Seeds_P Parameter: Age (hr) Value: 6 vs. 0
  misc_feature: MA Experiment 20000179 PARAMETER Experiment Name: At_Germinating_Seeds_P Parameter: Tissue Value: Germinating Seeds
  misc_feature: MA Experiment ID: 20000180 Result: Up-regulated in Transcription
  misc_feature: MA Experiment 20000180 PARAMETER Experiment Name: At_Germinating_Seeds_P Parameter: Age (hr) Value: 24 vs. 0
  misc_feature: MA Experiment 20000180 PARAMETER Experiment Name: At_Germinating_Seeds_P Parameter: Tissue Value: Germinating Seeds
  misc_feature: MA Experiment ID: 20000184 Result: Up-regulated in Transcription
  misc_feature: MA Experiment 20000184 PARAMETER Experiment Name: At_Shoots__P Parameter: Age (day) Value: 7
  misc_feature: MA Experiment 20000184 PARAMETER Experiment Name: At_Shoots__P Parameter: Tissue Value: Shoots vs. Whole Plant
  misc_feature: MA Experiment ID: 20000213 Result: Down-regulated in Transcription
  misc_feature: MA Experiment 20000213 PARAMETER Experiment Name: At_4deg_Cold_P Parameter: Timepoint (hr) Value: 2
  misc_feature: MA Experiment ID: 20000224 Result: Down-regulated in Transcription
  misc_feature: MA Experiment ID: 20000227 Result: Down-regulated in Transcription
  misc_feature: MA Experiment 20000227 PARAMETER Experiment Name: At_Root-Tips-vs-Tops_P Parameter: Tissue Value: Root Tips vs. Root Tops
  misc_feature: MA Experiment ID: 20000234 Result: Down-regulated in Transcription
  misc_feature: MA Experiment 20000234 PARAMETER Experiment Name: At_Siliques_P Parameter: Age (day) Value: 21
  misc_feature: MA Experiment 20000234 PARAMETER Experiment Name: At_Siliques_P Parameter: Organism Value: A. thaliana
  misc_feature: MA Experiment 20000234 PARAMETER Experiment Name: At_Siliques_P Parameter: Plant Line Value: WS
  misc_feature: MA Experiment 20000234 PARAMETER Experiment Name: At_Siliques_P Parameter: Tissue Value: Less Than 5mm Siliques vs. Whole Plant
  misc_feature: MA Experiment ID: 20000235 Result: Down-regulated in Transcription
  misc_feature: MA Experiment 20000235 PARAMETER Experiment Name: At_Siliques_P Parameter: Age (day) Value: 21
  misc_feature: MA Experiment 20000235 PARAMETER Experiment Name: At_Siliques_P Parameter: Organism Value: A. thaliana
  misc_feature: MA Experiment 20000235 PARAMETER Experiment Name: At_Siliques_P Parameter: Plant Line Value: WS
  misc_feature: MA Experiment 20000235 PARAMETER Experiment Name: At_Siliques_P Parameter: Tissue Value: 5-10mm Siliques vs. Whole Plant
  misc_feature: MA Experiment ID: 20000264 Result: Down-regulated in Transcription
  misc_feature: MA Experiment 20000264 PARAMETER Experiment Name: At_Open_Flower_P Parameter: Age (day) Value: 21
  misc_feature: MA Experiment 20000264 PARAMETER Experiment Name: At_Open_Flower_P Parameter: Plant Line Value: WS
  misc_feature: MA Experiment 20000264 PARAMETER Experiment Name: At_Open_Flower_P Parameter: Tissue Value: Open Flower vs. Whole Plant
  misc_feature: MA Experiment ID: 20000436 Result: Down-regulated in Transcription
  misc_feature: MA Experiment 20000436 PARAMETER Experiment Name: At_Drought_P Parameter: Age (day) Value: 7
  misc_feature: MA Experiment 20000436 PARAMETER Experiment Name: At_Drought_P Parameter: Organism Value: A. thaliana
  misc_feature: MA Experiment 20000436 PARAMETER Experiment Name: At_Drought_P Parameter: Plant Line Value: WS
  misc_feature: MA Experiment 20000436 PARAMETER Experiment Name: At_Drought_P Parameter: Timepoint (hr) Value: 12
  misc_feature: MA Experiment 20000436 PARAMETER Experiment Name: At_Drought_P Parameter: Tissue Value: Whole Plant
  misc_feature: MA Experiment 20000436 PARAMETER Experiment Name: At_Drought_P Parameter: Treatment Value: Drought vs. No Drought
  misc_feature: MA Experiment ID: 20000437 Result: Down-regulated in Transcription
  misc_feature: MA Experiment 20000437 PARAMETER Experiment Name: At_Drought_P Parameter: Age (day) Value: 8
  misc_feature: MA Experiment 20000437 PARAMETER Experiment Name: At_Drought_P Parameter: Organism Value: A. thaliana
  misc_feature: MA Experiment 20000437 PARAMETER Experiment Name: At_Drought_P Parameter: Plant Line Value: WS
  misc_feature: MA Experiment 20000437 PARAMETER Experiment Name: At_Drought_P Parameter: Timepoint (hr) Value: 24
  misc_feature: MA Experiment 20000437 PARAMETER Experiment Name: At_Drought_P Parameter: Tissue Value: Whole Plant
  misc_feature: MA Experiment 20000437 PARAMETER Experiment Name: At_Drought_P Parameter: Treatment Value: Drought vs. No Drought
  misc_feature: MA Experiment ID: 20000438 Result: Up-regulated in Transcription
  misc_feature: MA Experiment 20000438 PARAMETER Experiment Name: At_Shoots__P Parameter: Age (day) Value: 14
  misc_feature: MA Experiment 20000438 PARAMETER Experiment Name: At_Shoots__P Parameter: Tissue Value: Shoots vs. Whole Plant
  misc_feature: MA Experiment ID: 20000441 Result: Up-regulated in Transcription
  misc_feature: MA Experiment 20000441 PARAMETER Experiment Name: At_1uM_BR-BRZ__P Parameter: Tissue Value: Shoot Apices
  misc_feature: MA Experiment 20000441 PARAMETER Experiment Name: At_1uM_BR-BRZ__P Parameter: Treatment Value: 1uM BR vs. No Treatment
  misc_feature: MA Experiment ID: 20000443 Result: Up-regulated in Transcription
  misc_feature: MA Experiment 20000443 PARAMETER Experiment Name: At_1uM_BR-BRZ__P Parameter: Tissue Value: Shoot Apices
  misc_feature: MA Experiment 20000443 PARAMETER Experiment Name: At_1uM_BR-BRZ__P Parameter: Treatment Value: 1uM BRZ vs. No Treatment
  misc_feature: MA Experiment ID: 20000451 Result: Down-regulated in Transcription
  misc_feature: MA Experiment 20000451 PARAMETER Experiment Name: At_CS6879_Shoots-Roots_P Parameter: Age (day) Value: 14
  misc_feature: MA Experiment 20000451 PARAMETER Experiment Name: At_CS6879_Shoots-Roots_P Parameter: Organism Value: A. thaliana
  misc_feature: MA Experiment 20000451 PARAMETER Experiment Name: At_CS6879_Shoots-Roots_P Parameter: Plant Line Value: CS6879 vs. WS
  misc_feature: MA Experiment 20000451 PARAMETER Experiment Name: At_CS6879_Shoots-Roots_P Parameter: Tissue Value: Roots
  misc_feature: MA Experiment ID: 20000452 Result: Down-regulated in Transcription
  misc_feature: MA Experiment 20000452 PARAMETER Experiment Name: At_CS6879_Shoots-Roots_P Parameter: Age (day) Value: 14
  misc_feature: MA Experiment 20000452 PARAMETER Experiment Name: At_CS6879_Shoots-Roots_P Parameter: Organism Value: A. thaliana
  misc_feature: MA Experiment 20000452 PARAMETER Experiment Name: At_CS6879_Shoots-Roots_P Parameter: Plant Line Value: CS6879 vs. WS
  misc_feature: MA Experiment 20000452 PARAMETER Experiment Name: At_CS6879_Shoots-Roots_P Parameter: Tissue Value: Shoots
  misc_feature: MA Experiment ID: 20000575 Result: Down-regulated in Transcription
  misc_feature: MA Experiment 20000575 PARAMETER Experiment Name: At_100uM_ABA_Mutants__P Parameter: Organism Value: A. thaliana
  misc_feature: MA Experiment 20000575 PARAMETER Experiment Name: At_100uM_ABA_Mutants__P Parameter: Plant Line Value: CS22
  misc_feature: MA Experiment 20000575 PARAMETER Experiment Name: At_100uM_ABA_Mutants__P Parameter: Timepoint (hr) Value: 6
  misc_feature: MA Experiment 20000575 PARAMETER Experiment Name: At_100uM_ABA_Mutants__P Parameter: Tissue Value: Whole Plant
  misc_feature: MA Experiment 20000575 PARAMETER Experiment Name: At_100uM_ABA_Mutants__P Parameter: Treatment Value: 1uM ABA vs. No Treatment
  misc_feature: MA Experiment ID: 20000794 Result: Down-regulated in Transcription
  misc_feature: MA Experiment 20000794 PARAMETER Experiment Name: At_Petals_P Parameter: Age (day) Value: 23-25 days
  misc_feature: MA Experiment 20000794 PARAMETER Experiment Name: At_Petals_P Parameter: Plant Line Value: WS
  misc_feature: MA Experiment 20000794 PARAMETER Experiment Name: At_Petals_P Parameter: Tissue Value: Petals vs. Whole plant
  misc_feature: MA Experiment ID: 20001247 Result: Up-regulated in Transcription
  misc_feature: MA Experiment 20001247 PARAMETER Experiment Name: At_Far-red-induction_P Parameter: Age (day) Value: 7
  misc_feature: MA Experiment 20001247 PARAMETER Experiment Name: At_Far-red-induction_P Parameter: Light Value: Far-red vs. White
  misc_feature: MA Experiment 20001247 PARAMETER Experiment Name: At_Far-red-induction_P Parameter: Organism Value: A. thaliana
  misc_feature: MA Experiment 20001247 PARAMETER Experiment Name: At_Far-red-induction_P Parameter: Plant Line Value: Columbia
  misc_feature: MA Experiment 20001247 PARAMETER Experiment Name: At_Far-red-induction_P Parameter: Timepoint (hr) Value: 1
  misc_feature: MA Experiment 20001247 PARAMETER Experiment Name: At_Far-red-induction_P Parameter: Tissue Value: Whole Plant
  misc_feature: MA Experiment ID: 20001248 Result: Up-regulated in Transcription
  misc_feature: MA Experiment 20001248 PARAMETER Experiment Name: At_Far-red-induction_P Parameter: Age (day) Value: 7
  misc_feature: MA Experiment 20001248 PARAMETER Experiment Name: At_Far-red-induction_P Parameter: Light Value: Far-red vs. White
  misc_feature: MA Experiment 20001248 PARAMETER Experiment Name: At_Far-red-induction_P Parameter: Organism Value: A. thaliana
  misc_feature: MA Experiment 20001248 PARAMETER Experiment Name: At_Far-red-induction_P Parameter: Plant Line Value: Columbia
  misc_feature: MA Experiment 20001248 PARAMETER Experiment Name: At_Far-red-induction_P Parameter: Timepoint (hr) Value: 4
  misc_feature: MA Experiment 20001248 PARAMETER Experiment Name: At_Far-red-induction_P Parameter: Tissue Value: Whole Plant
  misc_feature: MA Experiment ID: 20001450 Result: Up-regulated in Transcription
  misc_feature: MA Experiment 20001450 PARAMETER Experiment Name: At_Far-red-induction_P Parameter: Age (day) Value: 7
  misc_feature: MA Experiment 20001450 PARAMETER Experiment Name: At_Far-red-induction_P Parameter: Light Value: Far-red vs. White
  misc_feature: MA Experiment 20001450 PARAMETER Experiment Name: At_Far-red-induction_P Parameter: Organism Value: A. thaliana
  misc_feature: MA Experiment 20001450 PARAMETER Experiment Name: At_Far-red-induction_P Parameter: Plant Line Value: Columbia
  misc_feature: MA Experiment 20001450 PARAMETER Experiment Name: At_Far-red-induction_P Parameter: Timepoint (hr) Value: 8
  misc_feature: MA Experiment 20001450 PARAMETER Experiment Name: At_Far-red-induction_P Parameter: Tissue Value: Whole Plant
  misc_feature: MA Experiment ID: 20001451 Result: Up-regulated in Transcription
  misc_feature: MA Experiment 20001451 PARAMETER Experiment Name: At_Far-red-induction_P Parameter: Age (day) Value: 7
  misc_feature: MA Experiment 20001451 PARAMETER Experiment Name: At_Far-red-induction_P Parameter: Light Value: Far-red vs. White
  misc_feature: MA Experiment 20001451 PARAMETER Experiment Name: At_Far-red-induction_P Parameter: Organism Value: A. thaliana
  misc_feature: MA Experiment 20001451 PARAMETER Experiment Name: At_Far-red-induction_P Parameter: Plant Line Value: Columbia
  misc_feature: MA Experiment 20001451 PARAMETER Experiment Name: At_Far-red-induction_P Parameter: Timepoint (hr) Value: 24
  misc_feature: MA Experiment 20001451 PARAMETER Experiment Name: At_Far-red-induction_P Parameter: Tissue Value: Whole Plant
  misc_feature: MA Experiment ID: 20001555 Result: Down-regulated in Transcription
  misc_feature: MA Experiment 20001555 PARAMETER Experiment Name: At_Drought_Soil_Dry_P Parameter: Age (day) Value: 24
  misc_feature: MA Experiment 20001555 PARAMETER Experiment Name: At_Drought_Soil_Dry_P Parameter: Organism Value: A. thaliana
  misc_feature: MA Experiment 20001555 PARAMETER Experiment Name: At_Drought_Soil_Dry_P Parameter: Plant Line Value: WS
  misc_feature: MA Experiment 20001555 PARAMETER Experiment Name: At_Drought_Soil_Dry_P Parameter: Post Timepoint (hr) Value: None
  misc_feature: MA Experiment 20001555 PARAMETER Experiment Name: At_Drought_Soil_Dry_P Parameter: Post-Treatment Value: None
  misc_feature: MA Experiment 20001555 PARAMETER Experiment Name: At_Drought_Soil_Dry_P Parameter: Timepoint (day) Value: 10
  misc_feature: MA Experiment 20001555 PARAMETER Experiment Name: At_Drought_Soil_Dry_P Parameter: Treatment Value: Drought vs. No Drought
  misc_feature: MA Experiment ID: 20001560 Result: Down-regulated in Transcription
  misc_feature: MA Experiment 20001560 PARAMETER Experiment Name: At_Drought_Soil_Dry_P Parameter: Age (day) Value: 28
  misc_feature: MA Experiment 20001560 PARAMETER Experiment Name: At_Drought_Soil_Dry_P Parameter: Organism Value: A. thaliana
  misc_feature: MA Experiment 20001560 PARAMETER Experiment Name: At_Drought_Soil_Dry_P Parameter: Plant Line Value: WS
  misc_feature: MA Experiment 20001560 PARAMETER Experiment Name: At_Drought_Soil_Dry_P Parameter: Post Timepoint (hr) Value: None
  misc_feature: MA Experiment 20001560 PARAMETER Experiment Name: At_Drought_Soil_Dry_P Parameter: Post-Treatment Value: None
  misc_feature: MA Experiment 20001560 PARAMETER Experiment Name: At_Drought_Soil_Dry_P Parameter: Timepoint (day) Value: 14
  misc_feature: MA Experiment 20001560 PARAMETER Experiment Name: At_Drought_Soil_Dry_P Parameter: Treatment Value: Drought vs. No Drought
  misc_feature: MA Experiment ID: 20001904 Result: Down-regulated in Transcription
  misc_feature: MA Experiment 20001904 PARAMETER Experiment Name: At_Drought_Reproduction_P Parameter: Age (day) Value: 37
  misc_feature: MA Experiment 20001904 PARAMETER Experiment Name: At_Drought_Reproduction_P Parameter: Organism Value: A. thaliana
  misc_feature: MA Experiment 20001904 PARAMETER Experiment Name: At_Drought_Reproduction_P Parameter: Plant Line Value: WS
  misc_feature: MA Experiment 20001904 PARAMETER Experiment Name: At_Drought_Reproduction_P Parameter: Timepoint (day) Value: 7
  misc_feature: MA Experiment 20001904 PARAMETER Experiment Name: At_Drought_Reproduction_P Parameter: Tissue Value: Rosettes
  misc_feature: MA Experiment 20001904 PARAMETER Experiment Name: At_Drought_Reproduction_P Parameter: Treatment Value: Drought vs. No Drought
  misc_feature: MA Experiment ID: 20001905 Result: Down-regulated in Transcription
  misc_feature: MA Experiment 20001905 PARAMETER Experiment Name: At_Drought_Reproduction_P Parameter: Age (day) Value: 40
  misc_feature: MA Experiment 20001905 PARAMETER Experiment Name: At_Drought_Reproduction_P Parameter: Organism Value: A. thaliana
  misc_feature: MA Experiment 20001905 PARAMETER Experiment Name: At_Drought_Reproduction_P Parameter: Plant Line Value: WS
  misc_feature: MA Experiment 20001905 PARAMETER Experiment Name: At_Drought_Reproduction_P Parameter: Timepoint (day) Value: 10
  misc_feature: MA Experiment 20001905 PARAMETER Experiment Name: At_Drought_Reproduction_P Parameter: Tissue Value: Rosettes
  misc_feature: MA Experiment 20001905 PARAMETER Experiment Name: At_Drought_Reproduction_P Parameter: Treatment Value: Drought vs. No Drought
actattggttcctctgctctggctcatggatgaaactaccagagagatgttctcacctcataatcttcctcttgaaatgatggaagagattctcttaagactacccgtaaagtcattgacgcgattcaaatgcgtttgcagctcctggagatctttgatctcagagactctgtttgctctgaaacacgctttgatcttggagacatcgaaggcaactacttccacgaagagtccttacggagtcataacaacgtctcggtaccatctcaagtcatgctgcatccattctctctacaacgcgtcaacggtctacgtctcagaacatgatggtgagcttttaggaagagattactatcaagtcgtggggacgtgccatggattggtttgtttccacgtagattacgacaaaagtctctacctgtggaatccaaccatcaagcttcaacaaagattgtctagttcggatcttgaaacgagcgatgatgagtgtgttgtaacgtatgggtttggttatgatgaatctgaagatgactataaagtggttgcgttgttgcaacaaagacaccaagtgaagatagagacaaagatctactcaacgagacaaaagctatggagaagcaacacaagtttcccatctggagttgttgttgctgacaaatcaagatccggaatctacatcaacgggacactaaactgggcagccacttcctcatcatcgtcatggacgatcatatcgtatgatatgtcacgcgatgagttcaaggagcttccagggccagtttgttgtggcagaggatgttttacaatgacgcttggagatttaagaggatgtctttcgatggtgtgttattgcaaaggagctaatgcagatgtttgggtgatgaaggagtttggagaagtatattcttggtctaaactcttgagcattcctggtttgaccgactttgttcgaccgctttggatctcagacggtttagtggttttattggagtttagatccggtttagctctctataactgttccaatggaaggtttcattacccagtttcaaacagcataagtggttgtcgtgacgccaaagtttatctcaagacaatggtttctccaaatgatctttgagatataaaaaattgttcctaatgtttctatccaagattttatttaaaaaattagctcgattcgatttaactaagattggtatcaattggtagaaaagaaacagtacttatatggatctttaaattcaagaattaat

SEQ ID NO: 43442 - protein, 372 aa, Arabidopsis thaliana
  peptide (1)..(372): Ceres Seq. ID no. 13489545
  misc_feature (21)..(296): Homolog of NCBI NO: 15223197 NR Description: F-box protein family [Arabidopsis thaliana]
  misc_feature (25)..(340): Homolog of NCBI NO: 28866895 NR Description: S haplotype-specific F-box protein b [Prunus
  misc_feature (25)..(296): Homolog of NCBI NO: 29420801 NR Description: F-box [Prunus mume]
  misc_feature (25)..(341): Homolog of NCBI NO: 13161528 NR Description: S locus F-box (SLF)-S2-like protein [Antirrhinum
  misc_feature (25)..(341): Homolog of NCBI NO: 13161526 NR Description: S locus F-box (SLF)-S2 protein [Antirrhinum
  misc_feature (15)..(97): Homolog of NCBI NO: 6862928 NR Description: hypothetical protein [Arabidopsis thaliana]
  misc_feature (115)..(370): Homolog of NCBI NO: 6862928 NR Description: hypothetical protein [Arabidopsis thaliana]
  misc_feature (3)..(97): Homolog of NCBI NO: 30679777 NR Description: F-box protein family [Arabidopsis thaliana]
  misc_feature (115)..(370): Homolog of NCBI NO: 30679777 NR Description: F-box protein family [Arabidopsis thaliana]
  misc_feature (9)..(372): Homolog of NCBI NO: 15229536 NR Description: F-box protein family [Arabidopsis thaliana]
LLVPLLWLMDETTREMFSPHNLPLEMMEEILLRLPVKSLTRFKCVCSSWRSLISETLFALKHALILETSKATTSTKSPYGVITTSRYHLKSCCIHSLYNASTVYVSEHDGELLGRDYYQVVGTCHGLVCFHVDYDKSLYLWNPTIKLQQRLSSSDLETSDDECVVTYGFGYDESEDDYKVVALLQQRHQVKIETKIYSTRQKLWRSNTSFPSGVVVADKSRSGIYINGTLNWAATSSSSSWTIISYDMSRDEFKELPGPVCCGRGCFTMTLGDLRGCLSMVCYCKGANADVWVMKEFGEVYSWSKLLSIPGLTDFVRPLWISDGLVVLLEFRSGLALYNCSNGRFHYPVSNSISGCRDAKVYLKTMVSPNDL

SEQ ID NO: 43443 - protein, 364 aa, Arabidopsis thaliana
  peptide (1)..(364): Ceres Seq. ID no. 13489546
  misc_feature (13)..(288): Homolog of NCBI NO: 15223197 NR Description: F-box protein family [Arabidopsis thaliana]
  misc_feature (17)..(332): Homolog of NCBI NO: 28866895 NR Description: S haplotype-specific F-box protein b [Prunus
  misc_feature (17)..(288): Homolog of NCBI NO: 29420801 NR Description: F-box [Prunus mume]
  misc_feature (17)..(333): Homolog of NCBI NO: 13161528 NR Description: S locus F-box (SLF)-S2-like protein [Antirrhinum
  misc_feature (17)..(333): Homolog of NCBI NO: 13161526 NR Description: S locus F-box (SLF)-S2 protein [Antirrhinum
  misc_feature (7)..(89): Homolog of NCBI NO: 6862928 NR Description: hypothetical protein [Arabidopsis thaliana]
  misc_feature (107)..(362): Homolog of NCBI NO: 6862928 NR Description: hypothetical protein [Arabidopsis thaliana]
  misc_feature (1)..(89): Homolog of NCBI NO: 30679777 NR Description: F-box protein family [Arabidopsis thaliana]
  misc_feature (107)..(362): Homolog of NCBI NO: 30679777 NR Description: F-box protein family [Arabidopsis thaliana]
  misc_feature (1)..(364): Homolog of NCBI NO: 15229536 NR Description: F-box protein family [Arabidopsis thaliana]
MDETTREMFSPHNLPLEMMEEILLRLPVKSLTRFKCVCSSWRSLISETLFALKHALILETSKATTSTKSPYGVITTSRYHLKSCCIHSLYNASTVYVSEHDGELLGRDYYQVVGTCHGLVCFHVDYDKSLYLWNPTIKLQQRLSSSDLETSDDECVVTYGFGYDESEDDYKVVALLQQRHQVKIETKIYSTRQKLWRSNTSFPSGVVVADKSRSGIYINGTLNWAATSSSSSWTIISYDMSRDEFKELPGPVCCGRGCFTMTLGDLRGCLSMVCYCKGANADVWVMKEFGEVYSWSKLLSIPGLTDFVRPLWISDGLVVLLEFRSGLALYNCSNGRFHYPVSNSISGCRDAKVYLKTMVSPNDL

SEQ ID NO: 43444 - protein, 357 aa, Arabidopsis thaliana
  peptide (1)..(357): Ceres Seq. ID no. 13489547
  misc_feature (6)..(281): Homolog of NCBI NO: 15223197 NR Description: F-box protein family [Arabidopsis thaliana]
  misc_feature (10)..(325): Homolog of NCBI NO: 28866895 NR Description: S haplotype-specific F-box protein b [Prunus
  misc_feature (10)..(281): Homolog of NCBI NO: 29420801 NR Description: F-box [Prunus mume]
  misc_feature (10)..(326): Homolog of NCBI NO: 13161528 NR Description: S locus F-box (SLF)-S2-like protein [Antirrhinum
  misc_feature (10)..(326): Homolog of NCBI NO: 13161526 NR Description: S locus F-box (SLF)-S2 protein [Antirrhinum
  misc_feature (1)..(82): Homolog of NCBI NO: 6862928 NR Description: hypothetical protein [Arabidopsis thaliana]
  misc_feature (100)..(355): Homolog of NCBI NO: 6862928 NR Description: hypothetical protein [Arabidopsis thaliana]
  misc_feature (1)..(82): Homolog of NCBI NO: 30679777 NR Description: F-box protein family [Arabidopsis thaliana]
  misc_feature (100)..(355): Homolog of NCBI NO: 30679777 NR Description: F-box protein family [Arabidopsis thaliana]
  misc_feature (1)..(357): Homolog of NCBI NO: 15229536 NR Description: F-box protein family [Arabidopsis thaliana]
MFSPHNLPLEMMEEILLRLPVKSLTRFKCVCSSWRSLISETLFALKHALILETSKATTSTKSPYGVITTSRYHLKSCCIHSLYNASTVYVSEHDGELLGRDYYQVVGTCHGLVCFHVDYDKSLYLWNPTIKLQQRLSSSDLETSDDECVVTYGFGYDESEDDYKVVALLQQRHQVKIETKIYSTRQKLWRSNTSFPSGVVVADKSRSGIYINGTLNWAATSSSSSWTIISYDMSRDEFKELPGPVCCGRGCFTMTLGDLRGCLSMVCYCKGANADVWVMKEFGEVYSWSKLLSIPGLTDFVRPLWISDGLVVLLEFRSGLALYNCSNGRFHYPVSNSISGCRDAKVYLKTMVSPNDL

SEQ ID NO: 43445 - DNA, 1484 bp, Arabidopsis thaliana
  misc_feature (1)..(1484): Ceres Seq. ID no. 12350415
  misc_feature: MA Experiment ID: 108595 Result: Down-regulated in Transcription
  misc_feature: MA Experiment 108595 PARAMETER Experiment Name: At_Ler-pi_Ovule_cDNA_P Parameter: Plant Line Value: null
  misc_feature: MA Experiment ID: 20000113 Result: Down-regulated in Transcription
  misc_feature: MA Experiment 20000113 PARAMETER Experiment Name: At_42deg_Heat_cDNA_P Parameter: Temperature (deg C) Value: 42 vs. 22
  misc_feature: MA Experiment 20000113 PARAMETER Experiment Name: At_42deg_Heat_cDNA_P Parameter: Timepoint (hr) Value: 8
  misc_feature: MA Experiment 20000113 PARAMETER Experiment Name: At_42deg_Heat_cDNA_P Parameter: Tissue Value: Aerial
aaccaacaagttctcctttctacccatttcgtctccttcattttgacgttttctttagatctgttaataatccatccatggcttggtctagtcactagtggtgttatctctctgtgtggaagaaaaagcaaggttttttgatcacttggattgttttaagatatggcaactttgaacccttttgatttgttggatgatgatgctgaggatccaagccagctcgctgtttccatcgagaagattgataagtccaagaaatctggaccggtttcgagcttgcctgctaagtcagctcctaagcttccctctaagccacttcctcctgctcaagccgtgagagaggccaggagtgatgccccacgtggtggtggaggccgtggaggatttaatcgtggtcgtcgtggttacaaccgtgatgatggtaacaatggatatttagggggatacactaagccctcagatgaaggagatgtttcaaagtcttcttacgagaggcgtggcggtggtggtggcggtggtgctcctcgtggttccttccgtggtgaaggtggtggacctggtggtagtcgtcgtggtggattcagcaatgagggtggtgaaggggagcgtcctcgaagggcctttgagcgtcgtagtggaactggcagagggagtgacttcaagcgtgacggatctggtcgtgggaattggggaactccaggggaagagatagctgctgagactgaagcagtagctggtgttgagactgagaaggatgttggagagaagccagctgttgatgatgtagctgctgatgctaacaaggagaatactgttgttgaggagaaagagcctgaggataaggaaatgactcttgatgagtatgagaaaatacttgaggagaagaaaaaggcacttcaatcattaaccacctctgagaggaaagttgatacgaaagtgtttgaatcaatgcaacaactgtcaaacaagaagtctaatgatgaaatcttcatcaagctgggttctgataaggacaaacgcaaagatgacaaagaagagaaggctaagaaggctgtgagcatcaatgagtttctgaagccagcagagggtgggaactactaccgaggaggccgtggtggccgtggacgtggtggtcgtggccgtggaggtgtttctagtggcgaatctggtggttaccgtaatgaagctgcaccagctattggagatgctgctcagttcccatctcttgggggcaagtaagatacatccatgataacgtccatactcgtgcatcctcctttaggattttgtgcgaggatttactgtttactggtctctcgttgtcagatgtaaataattaggtgtcgtcgtcagtttttagattttatgctaaactttacacttgttggtgttctttacttttgaaacactacactcttcttagttttaccattttactcgttttgtgtttgttgttttcttattgggatatgaaacatgttttg

SEQ ID NO: 43446 - protein, 358 aa, Arabidopsis thaliana
  peptide (1)..(358): Ceres Seq. ID no. 12350416
  misc_feature (136)..(301): Pfam Name: Hyaluronan / mRNA binding family Pfam Description: Hyaluronan / mRNA binding family
  misc_feature (1)..(356): Homolog of NCBI NO: 15236552 NR Description: nuclear RNA binding protein A-like protein
  misc_feature (1)..(356): Homolog of NCBI NO: 21593013 NR Description: nuclear RNA binding protein A-like protein
  misc_feature (1)..(358): Homolog of NCBI NO: 39725276 NR Description: salt tolerance protein 1 [Beta vulgaris]
  misc_feature (1)..(356): Homolog of NCBI NO: 21553991 NR Description: nuclear RNA binding protein A-like protein
  misc_feature (1)..(356): Homolog of NCBI NO: 15238039 NR Description: putative protein
  misc_feature (1)..(356): Homolog of NCBI NO: 39725278 NR Description: salt tolerance protein 2 [Beta vulgaris]
  misc_feature (1)..(358): Homolog of NCBI NO: 7488863 NR Description: probable transcription factor - fava bean
  misc_feature (1)..(358): Homolog of NCBI NO: 6492266 NR Description: nuclear RNA binding protein A [Spinacia oleracea]
  misc_feature (1)..(358): Homolog of NCBI NO: 21537052 NR Description: nuclear antigen homolog [Arabidopsis thaliana]
  misc_feature (1)..(358): Homolog of NCBI NO: 15235894 NR Description: nuclear antigen homolog
MATLNPFDLLDDDAEDPSQLAVSIEKIDKSKKSGPVSSLPAKSAPKLPSKPLPPAQAVREARSDAPRGGGGRGGFNRGRRGYNRDDGNNGYLGGYTKPSDEGDVSKSSYERRGGGGGGGAPRGSFRGEGGGPGGSRRGGFSNEGGEGERPRRAFERRSGTGRGSDFKRDGSGRGNWGTPGEEIAAETEAVAGVETEKDVGEKPAVDDVAADANKENTVVEEKEPEDKEMTLDEYEKILEEKKKALQSLTTSERKVDTKVFESMQQLSNKKSNDEIFIKLGSDKDKRKDDKEEKAKKAVSINEFLKPAEGGNYYRGGRGGRGRGGRGRGGVSSGESGGYRNEAAPAIGDAAQFPSLGGK

SEQ ID NO: 43447 - DNA, 1786 bp, Arabidopsis thaliana
  misc_feature (1)..(1786): Ceres Seq. ID no. 12336194
  misc_feature: MA Experiment ID: 108434 Result: Up-regulated in Transcription
  misc_feature: MA Experiment 108434 PARAMETER Experiment Name: At_Root_Tips_cDNA_P Parameter: Tissue Value: Root Tips
  misc_feature: MA Experiment ID: 108577 Result: Down-regulated in Transcription
  misc_feature: MA Experiment 108577 PARAMETER Experiment Name: At_42deg_Heat_cDNA_P Parameter: Temperature (deg C) Value: 42 vs. 22
  misc_feature: MA Experiment 108577 PARAMETER Experiment Name: At_42deg_Heat_cDNA_P Parameter: Timepoint (hr) Value: 6
  misc_feature: MA Experiment 108577 PARAMETER Experiment Name: At_42deg_Heat_cDNA_P Parameter: Tissue Value: Aerial
  misc_feature: MA Experiment ID: 108585 Result: Down-regulated in Transcription
  misc_feature: MA Experiment 108585 PARAMETER Experiment Name: At_5mM_NaNP_cDNA_P Parameter: Timepoint (hr) Value: 6
  misc_feature: MA Experiment 108585 PARAMETER Experiment Name: At_5mM_NaNP_cDNA_P Parameter: Tissue Value: Aerial
  misc_feature: MA Experiment 108585 PARAMETER Experiment Name: At_5mM_NaNP_cDNA_P Parameter: Treatment Value: null
  misc_feature: MA Experiment ID: 20000069 Result: Up-regulated in Transcription
  misc_feature: MA Experiment 20000069 PARAMETER Experiment Name: At_100uM_ABA_Mutants_cDNA_P Parameter: Plant Line Value: CS23
  misc_feature: MA Experiment 20000069 PARAMETER Experiment Name: At_100uM_ABA_Mutants_cDNA_P Parameter: Timepoint (hr) Value: 6
  misc_feature: MA Experiment 20000069 PARAMETER Experiment Name: At_100uM_ABA_Mutants_cDNA_P Parameter: Tissue Value: Aerial
  misc_feature: MA Experiment 20000069 PARAMETER Experiment Name: At_100uM_ABA_Mutants_cDNA_P Parameter: Treatment Value: 100uM ABA vs. No Treatment
  misc_feature: MA Experiment ID: 20000070 Result: Up-regulated in Transcription
  misc_feature: MA Experiment 20000070 PARAMETER Experiment Name: At_100uM_ABA_Mutants_cDNA_P Parameter: Plant Line Value: CS24
  misc_feature: MA Experiment 20000070 PARAMETER Experiment Name: At_100uM_ABA_Mutants_cDNA_P Parameter: Timepoint (hr) Value: 6
  misc_feature: MA Experiment 20000070 PARAMETER Experiment Name: At_100uM_ABA_Mutants_cDNA_P Parameter: Tissue Value: Aerial
  misc_feature: MA Experiment 20000070 PARAMETER Experiment Name: At_100uM_ABA_Mutants_cDNA_P Parameter: Treatment Value: 100uM ABA vs. No Treatment
  misc_feature: MA Experiment ID: 20000086 Result: Up-regulated in Transcription
  misc_feature: MA Experiment 20000086 PARAMETER Experiment Name: At_100uM_ABA_Mutants_cDNA_P Parameter: Plant Line Value: CS22
  misc_feature: MA Experiment 20000086 PARAMETER Experiment Name: At_100uM_ABA_Mutants_cDNA_P Parameter: Timepoint (hr) Value: 6
  misc_feature: MA Experiment 20000086 PARAMETER Experiment Name: At_100uM_ABA_Mutants_cDNA_P Parameter: Tissue Value: Aerial
  misc_feature: MA Experiment 20000086 PARAMETER Experiment Name: At_100uM_ABA_Mutants_cDNA_P Parameter: Treatment Value: 100uM ABA vs. No Treatment
  misc_feature: MA Experiment ID: 20000089 Result: Up-regulated in Transcription
  misc_feature: MA Experiment ID: 20000111 Result: Down-regulated in Transcription
  misc_feature: MA Experiment 20000111 PARAMETER Experiment Name: At_42deg_Heat_cDNA_P Parameter: Temperature (deg C) Value: 42 vs. 22
  misc_feature: MA Experiment 20000111 PARAMETER Experiment Name: At_42deg_Heat_cDNA_P Parameter: Timepoint (hr) Value: 6
  misc_feature: MA Experiment 20000111 PARAMETER Experiment Name: At_42deg_Heat_cDNA_P Parameter: Tissue Value: Aerial
  misc_feature: MA Experiment ID: 20000113 Result: Down-regulated in Transcription
  misc_feature: MA Experiment 20000113 PARAMETER Experiment Name: At_42deg_Heat_cDNA_P Parameter: Temperature (deg C) Value: 42 vs. 22
  misc_feature: MA Experiment 20000113 PARAMETER Experiment Name: At_42deg_Heat_cDNA_P Parameter: Timepoint (hr) Value: 8
  misc_feature: MA Experiment 20000113 PARAMETER Experiment Name: At_42deg_Heat_cDNA_P Parameter: Tissue Value: Aerial
  misc_feature: MA Experiment ID: 20000171 Result: Down-regulated in Transcription
  misc_feature: MA Experiment 20000171 PARAMETER Experiment Name: At_42deg_Heat_P Parameter: Age (day) Value: 14
  misc_feature: MA Experiment 20000171 PARAMETER Experiment Name: At_42deg_Heat_P Parameter: Organism Value: A. thaliana
  misc_feature: MA Experiment 20000171 PARAMETER Experiment Name: At_42deg_Heat_P Parameter: Plant Line Value: WS
  misc_feature: MA Experiment 20000171 PARAMETER Experiment Name: At_42deg_Heat_P Parameter: Temperature (deg C) Value: 42 vs. 22
  misc_feature: MA Experiment 20000171 PARAMETER Experiment Name: At_42deg_Heat_P Parameter: Timepoint (hr) Value: 1
  misc_feature: MA Experiment 20000171 PARAMETER Experiment Name: At_42deg_Heat_P Parameter: Tissue Value: Aerial
  misc_feature: MA Experiment ID: 20000173 Result: Down-regulated in Transcription
  misc_feature: MA Experiment 20000173 PARAMETER Experiment Name: At_42deg_Heat_P Parameter: Age (day) Value: 14
  misc_feature: MA Experiment 20000173 PARAMETER Experiment Name: At_42deg_Heat_P Parameter: Organism Value: A. thaliana
  misc_feature: MA Experiment 20000173 PARAMETER Experiment Name: At_42deg_Heat_P Parameter: Plant Line Value: WS
  misc_feature: MA Experiment 20000173 PARAMETER Experiment Name: At_42deg_Heat_P Parameter: Temperature (deg C) Value: 42 vs. 22
  misc_feature: MA Experiment 20000173 PARAMETER Experiment Name: At_42deg_Heat_P Parameter: Timepoint (hr) Value: 6
  misc_feature: MA Experiment 20000173 PARAMETER Experiment Name: At_42deg_Heat_P Parameter: Tissue Value: Aerial
  misc_feature: MA Experiment ID: 20000184 Result: Down-regulated in Transcription
  misc_feature: MA Experiment 20000184 PARAMETER Experiment Name: At_Shoots__P Parameter: Age (day) Value: 7
  misc_feature: MA Experiment 20000184 PARAMETER Experiment Name: At_Shoots__P Parameter: Tissue Value: Shoots vs. Whole Plant
  misc_feature: MA Experiment ID: 20000185 Result: Up-regulated in Transcription
  misc_feature: MA Experiment 20000185 PARAMETER Experiment Name: At_Roots__P Parameter: Age (day) Value: 7 vs. 21
  misc_feature: MA Experiment 20000185 PARAMETER Experiment Name: At_Roots__P Parameter: Organism Value: A. thaliana
  misc_feature: MA Experiment 20000185 PARAMETER Experiment Name: At_Roots__P Parameter: Tissue Value: Roots vs. Whole Plant
  misc_feature: MA Experiment ID: 20000234 Result: Up-regulated in Transcription
  misc_feature: MA Experiment 20000234 PARAMETER Experiment Name: At_Siliques_P Parameter: Age (day) Value: 21
  misc_feature: MA Experiment 20000234 PARAMETER Experiment Name: At_Siliques_P Parameter: Organism Value: A. thaliana
  misc_feature: MA Experiment 20000234 PARAMETER Experiment Name: At_Siliques_P Parameter: Plant Line Value: WS
  misc_feature: MA Experiment 20000234 PARAMETER Experiment Name: At_Siliques_P Parameter: Tissue Value: Less Than 5mm Siliques vs. Whole Plant
  misc_feature: MA Experiment ID: 20000264 Result: Up-regulated in Transcription
  misc_feature: MA Experiment 20000264 PARAMETER Experiment Name: At_Open_Flower_P Parameter: Age (day) Value: 21
  misc_feature: MA Experiment 20000264 PARAMETER Experiment Name: At_Open_Flower_P Parameter: Plant Line Value: WS
  misc_feature: MA Experiment 20000264 PARAMETER Experiment Name: At_Open_Flower_P Parameter: Tissue Value: Open Flower vs. Whole Plant
  misc_feature: MA Experiment ID: 20000265 Result: Up-regulated in Transcription
  misc_feature: MA Experiment 20000265 PARAMETER Experiment Name: At_Open_Flower_P Parameter: Age (day) Value: 21
  misc_feature: MA Experiment 20000265 PARAMETER Experiment Name: At_Open_Flower_P Parameter: Plant Line Value: WS
  misc_feature: MA Experiment 20000265 PARAMETER Experiment Name: At_Open_Flower_P Parameter: Tissue Value: Closed Flower vs. Whole Plant
  misc_feature: MA Experiment ID: 20000439 Result: Up-regulated in Transcription
  misc_feature: MA Experiment 20000439 PARAMETER Experiment Name: At_Roots__P Parameter: Age (day) Value: 14 vs. 21
  misc_feature: MA Experiment 20000439 PARAMETER Experiment Name: At_Roots__P Parameter: Organism Value: A. thaliana
  misc_feature: MA Experiment 20000439 PARAMETER Experiment Name: At_Roots__P Parameter: Tissue Value: Roots vs. Whole Plant
  misc_feature: MA Experiment ID: 20000495 Result: Up-regulated in Transcription
  misc_feature: MA Experiment 20000495 PARAMETER Experiment Name: At_Guard_Cells_P Parameter: Harvest Date Value: 8/2/2002
  misc_feature: MA Experiment 20000495 PARAMETER Experiment Name: At_Guard_Cells_P Parameter: Organism Value: A. thaliana
  misc_feature: MA Experiment 20000495 PARAMETER Experiment Name: At_Guard_Cells_P Parameter: Tissue Value: Guard Cells vs. Leaves
agattcagcagatgacacgaatcactccaccaaagcttcttctctcttttttgttttcttctgattctgcgttagaacatttgttgttgggtttggtttcgattgattcttgaaattggttttggtaaaaaatctcaccttttaagtataaacactttactttctctctctaaacgtatcttcttagctccatttaccatctgggttttgcttcatttactgtgattcctacaatctatcaagcttcagatgtcttctctttaagatttttcgaaaagatacattcttgcatgtgcgtagatcagccttgtatagaactgagattttggtgaagctttggattggtttctttgttctctctgttcttgtgaagggaacaacacaaagacggtggctttgctcggtaaatagattatggaacatggtttaccgtctattaaatcatggaagtcacttgtcaagagaagaaacaatgctcaagaagggggtaaatcgtcatggaaaatgaaaccagttgtggtgctaatgtgtacagtacttttgatcttttggtataagactacaaatattcagtatgaacagacagagatagaagaaacagattatccatttgagatggcaaaggaatctgaaccggtcagtgaaaagttgaaaggtttgccttttggtatcatgcaacctagatcagatttggagttaaagccactttggtcaagtagtagtttgaggtcaaagagcggcgaattgaccaaccgaaacttgttggcaatgccggtaggacttaagcaaaaggataatgttgatgctgttgtaaagaagtttcttcctgcgaatttcactgtcattctatttcattatgatggaaacatggatcaatggtgggatctagagtggagctctaaagccatacacattgttgcacataaccaaacaaaatggtggttcgcgaaacgttttctccatcctgatattgtctccatttacgattatgtttttctttgggatgaagatcttggagtggagaatttcaaccctcaaaagtacctgaggatagttaaaacagcgggactggagatatctcaaccggccttgcacccaaactcaactgaagttcaccatagaattacagtccggtctagaacgaaaatatttcataggcgagtttacgatagtagaggcaatatgaagtgttcaaatgctagtgaagggcccccatgcacaggttttgttgaaggaatggctccagttttctcaagatctgcgtggttttgcacttggaatctaatacaaaatgatctggttcatggttggggaatggatatgaaacttggatactgtgctcagggtgaccgaagcaagaaagtaggcattgtcgacagtgaatatatcttccatcaaggcattcaaactctaggtggaagcggttatcccgataagaagaactcagctcgcagcggagtaaataggagacgcggttctgcgacttttgattcaagaacagagatacggagacaatcaacgtgggagctgcaagcttttaaagaacggtggaaccaagcggttgcagaagacaaatactgggtggagcggtcttcaccgagccggaaccgaataggcaataaccggagattaaaaagaagtagtatgattccaagtttattgcagaggaaagctgaagagactacaacataaacagatacagttttaatcagattaaatatagagaaatgtttttttggttggtctcattgttatatataagttaatagttaatcatttacctccc

SEQ ID NO: 43448 - protein, 425 aa, Arabidopsis thaliana
  peptide (1)..(425): Ceres Seq. ID no. 12336195
  misc_feature (67)..(393): Pfam Name: Protein of unknown function (DUF707) Pfam Description: Protein of unknown function (DUF707)
  misc_feature (113)..(391): Homolog of NCBI NO: 34903420 NR Description: hypothetical protein~similar to Oryza sativa
  misc_feature (46)..(376): Homolog of NCBI NO: 22331371 NR Description: unknown protein
  misc_feature (82)..(391): Homolog of NCBI NO: 19386727 NR Description: P0678F11.16 [Oryza sativa (japonica
  misc_feature (176)..(425): Homolog of NCBI NO: 25402652 NR Description: hypothetical protein [imported] - Arabidopsis
  misc_feature (271)..(405): Homolog of NCBI NO: 34899756 NR Description: OJ1773_H01.1 [Oryza sativa (japonica
  misc_feature (93)..(250): Homolog of NCBI NO: 34899756 NR Description: OJ1773_H01.1 [Oryza sativa (japonica
  misc_feature (35)..(405): Homolog of NCBI NO: 33146749 NR Description: putative lysine ketoglutarate reductase
  misc_feature (1)..(425): Homolog of NCBI NO: 22329488 NR Description: hypothetical protein
  misc_feature (68)..(425): Homolog of NCBI NO: 24636978 NR Description: lysine ketoglutarate reductase trans-splicing
  misc_feature (1)..(425): Homolog of NCBI NO: 15219892 NR Description: hypothetical protein; protein id: At1g61240.1
MEHGLPSIKSWKSLVKRRNNAQEGGKSSWKMKPVVVLMCTVLLIFWYKTTNIQYEQTEIEETDYPFEMAKESEPVSEKLKGLPFGIMQPRSDLELKPLWSSSSLRSKSGELTNRNLLAMPVGLKQKDNVDAVVKKFLPANFTVILFHYDGNMDQWWDLEWSSKAIHIVAHNQTKWWFAKRFLHPDIVSIYDYVFLWDEDLGVENFNPQKYLRIVKTAGLEISQPALHPNSTEVHHRITVRSRTKIFHRRVYDSRGNMKCSNASEGPPCTGFVEGMAPVFSRSAWFCTWNLIQNDLVHGWGMDMKLGYCAQGDRSKKVGIVDSEYIFHQGIQTLGGSGYPDKKNSARSGVNRRRGSATFDSRTEIRRQSTWELQAFKERWNQAVAEDKYWVERSSPSRNRIGNNRRLKRSSMIPSLLQRKAEETTT

SEQ ID NO: 43449 - protein, 395 aa, Arabidopsis thaliana
  peptide (1)..(395): Ceres Seq. ID no. 12336196
  misc_feature (37)..(363): Pfam Name: Protein of unknown function (DUF707) Pfam Description: Protein of unknown function (DUF707)
  misc_feature (83)..(361): Homolog of NCBI NO: 34903420 NR Description: hypothetical protein~similar to Oryza sativa
  misc_feature (16)..(346): Homolog of NCBI NO: 22331371 NR Description: unknown protein
  misc_feature (52)..(361): Homolog of NCBI NO: 19386727 NR Description: P0678F11.16 [Oryza sativa (japonica
  misc_feature (146)..(395): Homolog of NCBI NO: 25402652 NR Description: hypothetical protein [imported] - Arabidopsis
  misc_feature (241)..(375): Homolog of NCBI NO: 34899756 NR Description: OJ1773_H01.1 [Oryza sativa (japonica
  misc_feature (63)..(220): Homolog of NCBI NO: 34899756 NR Description: OJ1773_H01.1 [Oryza sativa (japonica
  misc_feature (5)..(375): Homolog of NCBI NO: 33146749 NR Description: putative lysine ketoglutarate reductase
  misc_feature (1)..(395): Homolog of NCBI NO: 22329488 NR Description: hypothetical protein
  misc_feature (38)..(395): Homolog of NCBI NO: 24636978 NR Description: lysine ketoglutarate reductase trans-splicing
  misc_feature (1)..(395): Homolog of NCBI NO: 15219892 NR Description: hypothetical protein; protein id: At1g61240.1
MKPVVVLMCTVLLIFWYKTTNIQYEQTEIEETDYPFEMAKESEPVSEKLKGLPFGIMQPRSDLELKPLWSSSSLRSKSGELTNRNLLAMPVGLKQKDNVDAVVKKFLPANFTVILFHYDGNMDQWWDLEWSSKAIHIVAHNQTKWWFAKRFLHPDIVSIYDYVFLWDEDLGVENFNPQKYLRIVKTAGLEISQPALHPNSTEVHHRITVRSRTKIFHRRVYDSRGNMKCSNASEGPPCTGFVEGMAPVFSRSAWFCTWNLIQNDLVHGWGMDMKLGYCAQGDRSKKVGIVDSEYIFHQGIQTLGGSGYPDKKNSARSGVNRRRGSATFDSRTEIRRQSTWELQAFKERWNQAVAEDKYWVERSSPSRNRIGNNRRLKRSSMIPSLLQRKAEETTT

SEQ ID NO: 43450 - protein, 388 aa, Arabidopsis thaliana
  peptide (1)..(388): Ceres Seq. ID no. 12336197
  misc_feature (30)..(356): Pfam Name: Protein of unknown function (DUF707) Pfam Description: Protein of unknown function (DUF707)
  misc_feature (76)..(354): Homolog of NCBI NO: 34903420 NR Description: hypothetical protein~similar to Oryza sativa
  misc_feature (9)..(339): Homolog of NCBI NO: 22331371 NR Description: unknown protein
  misc_feature (45)..(354): Homolog of NCBI NO: 19386727 NR Description: P0678F11.16 [Oryza sativa (japonica
  misc_feature (139)..(388): Homolog of NCBI NO: 25402652 NR Description: hypothetical protein [imported] - Arabidopsis
  misc_feature (234)..(368): Homolog of NCBI NO: 34899756 NR Description: OJ1773_H01.1 [Oryza sativa (japonica
  misc_feature (56)..(213): Homolog of NCBI NO: 34899756 NR Description: OJ1773_H01.1 [Oryza sativa (japonica
  misc_feature (1)..(368): Homolog of NCBI NO: 33146749 NR Description: putative lysine ketoglutarate reductase
  misc_feature (1)..(388): Homolog of NCBI NO: 22329488 NR Description: hypothetical protein
  misc_feature (31)..(388): Homolog of NCBI NO: 24636978 NR Description: lysine ketoglutarate reductase trans-splicing
  misc_feature (1)..(388): Homolog of NCBI NO: 15219892 NR Description: hypothetical protein; protein id: At1g61240.1
MCTVLLIFWYKTTNIQYEQTEIEETDYPFEMAKESEPVSEKLKGLPFGIMQPRSDLELKPLWSSSSLRSKSGELTNRNLLAMPVGLKQKDNVDAVVKKFLPANFTVILFHYDGNMDQWWDLEWSSKAIHIVAHNQTKWWFAKRFLHPDIVSIYDYVFLWDEDLGVENFNPQKYLRIVKTAGLEISQPALHPNSTEVHHRITVRSRTKIFHRRVYDSRGNMKCSNASEGPPCTGFVEGMAPVFSRSAWFCTWNLIQNDLVHGWGMDMKLGYCAQGDRSKKVGIVDSEYIFHQGIQTLGGSGYPDKKNSARSGVNRRRGSATFDSRTEIRRQSTWELQAFKERWNQAVAEDKYWVERSSPSRNRIGNNRRLKRSSMIPSLLQRKAEETTT

SEQ ID NO: 43451 - DNA, 1146 bp, Arabidopsis thaliana; identical to SEQ ID NO: 39458
  misc_feature (1)..(1146): Ceres Seq. ID no. 12489106
  misc_feature: MA Experiment ID: 108461 Result: Down-regulated in Transcription
  misc_feature: MA Experiment 108461 PARAMETER Experiment Name: At_Germinating_Seeds_cDNA_P Parameter: Age (day) Value: 1 vs. 0
  misc_feature: MA Experiment 108461 PARAMETER Experiment Name: At_Germinating_Seeds_cDNA_P Parameter: Tissue Value: Germinating Seeds
  misc_feature: MA Experiment ID: 108462 Result: Down-regulated in Transcription
  misc_feature: MA Experiment 108462 PARAMETER Experiment Name: At_Germinating_Seeds_cDNA_P Parameter: Age (day) Value: 2 vs. 0
  misc_feature: MA Experiment 108462 PARAMETER Experiment Name: At_Germinating_Seeds_cDNA_P Parameter: Tissue Value: Germinating Seeds
  misc_feature: MA Experiment ID: 108464 Result: Down-regulated in Transcription
  misc_feature: MA Experiment 108464 PARAMETER Experiment Name: At_Germinating_Seeds_cDNA_P Parameter: Age (day) Value: 4 vs. 0
  misc_feature: MA Experiment 108464 PARAMETER Experiment Name: At_Germinating_Seeds_cDNA_P Parameter: Tissue Value: Germinating Seeds
  misc_feature: MA Experiment ID: 20000180 Result: Down-regulated in Transcription
  misc_feature: MA Experiment 20000180 PARAMETER Experiment Name: At_Germinating_Seeds_P Parameter: Age (hr) Value: 24 vs. 0
  misc_feature: MA Experiment 20000180 PARAMETER Experiment Name: At_Germinating_Seeds_P Parameter: Tissue Value: Germinating Seeds

SEQ ID NO: 43452 - protein, 336 aa, Arabidopsis thaliana; identical to SEQ ID NO: 39459
  peptide (1)..(336): Ceres Seq. ID no. 12489107
  misc_feature (18)..(336): Homolog of NCBI NO: 37537134 NR Description: unknown protein [Oryza sativa (japonica
  misc_feature (18)..(276): Homolog of NCBI NO: 25373168 NR Description: hypothetical protein F16G16.1 [imported] -
  misc_feature (18)..(336): Homolog of NCBI NO: 15220924 NR Description: hypothetical protein; protein id: At1g65020.1
  misc_feature (18)..(336): Homolog of NCBI NO: 37537134 NR Description: unknown protein [Oryza sativa (japonica
  misc_feature (18)..(276): Homolog of NCBI NO: 25373168 NR Description: hypothetical protein F16G16.1 [imported] -
  misc_feature (18)..(336): Homolog of NCBI NO: 15220924 NR Description: hypothetical protein; protein id: At1g65020.1
  misc_feature (18)..(336): Homolog of NCBI NO: 37537134 NR Description: unknown protein [Oryza sativa (japonica
  misc_feature (18)..(276): Homolog of NCBI NO: 25373168 NR Description: hypothetical protein F16G16.1 [imported] -
  misc_feature (18)..(336): Homolog of NCBI NO: 15220924 NR Description: hypothetical protein; protein id: At1g65020.1

SEQ ID NO: 43453 - protein, 319 aa, Arabidopsis thaliana; identical to SEQ ID NO: 39460
  peptide (1)..(319): Ceres Seq. ID no. 12489108
  misc_feature (1)..(319): Homolog of NCBI NO: 37537134 NR Description: unknown protein [Oryza sativa (japonica
  misc_feature (1)..(259): Homolog of NCBI NO: 25373168 NR Description: hypothetical protein F16G16.1 [imported] -
  misc_feature (1)..(319): Homolog of NCBI NO: 15220924 NR Description: hypothetical protein; protein id: At1g65020.1
  misc_feature (1)..(319): Homolog of NCBI NO: 37537134 NR Description: unknown protein [Oryza sativa (japonica
  misc_feature (1)..(259): Homolog of NCBI NO: 25373168 NR Description: hypothetical protein F16G16.1 [imported] -
  misc_feature (1)..(319): Homolog of NCBI NO: 15220924 NR Description: hypothetical protein; protein id: At1g65020.1
  misc_feature (1)..(319): Homolog of NCBI NO: 37537134 NR Description: unknown protein [Oryza sativa (japonica
  misc_feature (1)..(259): Homolog of NCBI NO: 25373168 NR Description: hypothetical protein F16G16.1 [imported] -
  misc_feature (1)..(319): Homolog of NCBI NO: 15220924 NR Description: hypothetical protein; protein id: At1g65020.1

SEQ ID NO: 43454 - DNA, 2148 bp, Arabidopsis thaliana
  misc_feature (1)..(2148): Ceres Seq. ID no. 12606243
  misc_feature: MA Experiment ID: 20000227 Result: Down-regulated in Transcription
  misc_feature: MA Experiment 20000227 PARAMETER Experiment Name: At_Root-Tips-vs-Tops_P Parameter: Tissue Value: Root Tips vs. Root Tops
  misc_feature: MA Experiment ID: 20000265 Result: Up-regulated in Transcription
  misc_feature: MA Experiment 20000265 PARAMETER Experiment Name: At_Open_Flower_P Parameter: Age (day) Value: 21
  misc_feature: MA Experiment 20000265 PARAMETER Experiment Name: At_Open_Flower_P Parameter: Plant Line Value: WS
  misc_feature: MA Experiment 20000265 PARAMETER Experiment Name: At_Open_Flower_P Parameter: Tissue Value: Closed Flower vs. Whole Plant
  misc_feature: MA Experiment ID: 20000437 Result: Down-regulated in Transcription
  misc_feature: MA Experiment 20000437 PARAMETER Experiment Name: At_Drought_P Parameter: Age (day) Value: 8
  misc_feature: MA Experiment 20000437 PARAMETER Experiment Name: At_Drought_P Parameter: Organism Value: A. thaliana
  misc_feature: MA Experiment 20000437 PARAMETER Experiment Name: At_Drought_P Parameter: Plant Line Value: WS
  misc_feature: MA Experiment 20000437 PARAMETER Experiment Name: At_Drought_P Parameter: Timepoint (hr) Value: 24
  misc_feature: MA Experiment 20000437 PARAMETER Experiment Name: At_Drought_P Parameter: Tissue Value: Whole Plant
  misc_feature: MA Experiment 20000437 PARAMETER Experiment Name: At_Drought_P Parameter: Treatment Value: Drought vs. No Drought
  misc_feature: MA Experiment ID: 20000495 Result: Up-regulated in Transcription
  misc_feature: MA Experiment 20000495 PARAMETER Experiment Name: At_Guard_Cells_P Parameter: Harvest Date Value: 8/2/2002
  misc_feature: MA Experiment 20000495 PARAMETER Experiment Name: At_Guard_Cells_P Parameter: Organism Value: A. thaliana
  misc_feature: MA Experiment 20000495 PARAMETER Experiment Name: At_Guard_Cells_P Parameter: Tissue Value: Guard Cells vs. Leaves
  misc_feature: MA Experiment ID: 20000496 Result: Up-regulated in Transcription
  misc_feature: MA Experiment 20000496 PARAMETER Experiment Name: At_Guard_Cells_P Parameter: Harvest Date Value: 7/19/2002
  misc_feature: MA Experiment 20000496 PARAMETER Experiment Name: At_Guard_Cells_P Parameter: Organism Value: Canola
  misc_feature: MA Experiment 20000496 PARAMETER Experiment Name: At_Guard_Cells_P Parameter: Tissue Value: Guard Cells vs. Leaves
  misc_feature: MA Experiment ID: 20000794 Result: Down-regulated in Transcription
  misc_feature: MA Experiment 20000794 PARAMETER Experiment Name: At_Petals_P Parameter: Age (day) Value: 23-25 days
  misc_feature: MA Experiment 20000794 PARAMETER Experiment Name: At_Petals_P Parameter: Plant Line Value: WS
  misc_feature: MA Experiment 20000794 PARAMETER Experiment Name: At_Petals_P Parameter: Tissue Value: Petals vs. Whole plant
  misc_feature: MA Experiment ID: 20001248 Result: Down-regulated in Transcription
  misc_feature: MA Experiment 20001248 PARAMETER Experiment Name: At_Far-red-induction_P Parameter: Age (day) Value: 7
  misc_feature: MA Experiment 20001248 PARAMETER Experiment Name: At_Far-red-induction_P Parameter: Light Value: Far-red vs. White
  misc_feature: MA Experiment 20001248 PARAMETER Experiment Name: At_Far-red-induction_P Parameter: Organism Value: A. thaliana
  misc_feature: MA Experiment 20001248 PARAMETER Experiment Name: At_Far-red-induction_P Parameter: Plant Line Value: Columbia
  misc_feature: MA Experiment 20001248 PARAMETER Experiment Name: At_Far-red-induction_P Parameter: Timepoint (hr) Value: 4
  misc_feature: MA Experiment 20001248 PARAMETER Experiment Name: At_Far-red-induction_P Parameter: Tissue Value: Whole Plant
  misc_feature: MA Experiment ID: 20001450 Result: Down-regulated in Transcription
  misc_feature: MA Experiment 20001450 PARAMETER Experiment Name: At_Far-red-induction_P Parameter: Age (day) Value: 7
  misc_feature: MA Experiment 20001450 PARAMETER Experiment Name: At_Far-red-induction_P Parameter: Light Value: Far-red vs. White
  misc_feature: MA Experiment 20001450 PARAMETER Experiment Name: At_Far-red-induction_P Parameter: Organism Value: A. thaliana
  misc_feature: MA Experiment 20001450 PARAMETER Experiment Name: At_Far-red-induction_P Parameter: Plant Line Value: Columbia
  misc_feature: MA Experiment 20001450 PARAMETER Experiment Name: At_Far-red-induction_P Parameter: Timepoint (hr) Value: 8
  misc_feature: MA Experiment 20001450 PARAMETER Experiment Name: At_Far-red-induction_P Parameter: Tissue Value: Whole Plant
  misc_feature: MA Experiment ID: 20001451 Result: Down-regulated in Transcription
  misc_feature: MA Experiment 20001451 PARAMETER Experiment Name: At_Far-red-induction_P Parameter: Age (day) Value: 7
  misc_feature: MA Experiment 20001451 PARAMETER Experiment Name: At_Far-red-induction_P Parameter: Light Value: Far-red vs. White
  misc_feature: MA Experiment 20001451 PARAMETER Experiment Name: At_Far-red-induction_P Parameter: Organism Value: A. thaliana
  misc_feature: MA Experiment 20001451 PARAMETER Experiment Name: At_Far-red-induction_P Parameter: Plant Line Value: Columbia
  misc_feature: MA Experiment 20001451 PARAMETER Experiment Name: At_Far-red-induction_P Parameter: Timepoint (hr) Value: 24
  misc_feature: MA Experiment 20001451 PARAMETER Experiment Name: At_Far-red-induction_P Parameter: Tissue Value: Whole Plant
  misc_feature: MA Experiment ID: 20001557 Result: Up-regulated in Transcription
  misc_feature: MA Experiment 20001557 PARAMETER Experiment Name: At_Drought_Soil_Dry_P Parameter: Age (day) Value: 27
  misc_feature: MA Experiment 20001557 PARAMETER Experiment Name: At_Drought_Soil_Dry_P Parameter: Organism Value: A. thaliana
  misc_feature: MA Experiment 20001557 PARAMETER Experiment Name: At_Drought_Soil_Dry_P Parameter: Plant Line Value: WS
  misc_feature: MA Experiment 20001557 PARAMETER Experiment Name: At_Drought_Soil_Dry_P Parameter: Post Timepoint (hr) Value: 3
  misc_feature: MA Experiment 20001557 PARAMETER Experiment Name: At_Drought_Soil_Dry_P Parameter: Post-Treatment Value: Re-Water vs. No Drought
  misc_feature: MA Experiment 20001557 PARAMETER Experiment Name: At_Drought_Soil_Dry_P Parameter: Timepoint (day) Value: 13
  misc_feature: MA Experiment 20001557 PARAMETER Experiment Name: At_Drought_Soil_Dry_P Parameter: Treatment Value: Drought vs. No Drought
  misc_feature: MA Experiment ID: 20001757 Result: Up-regulated in Transcription
  misc_feature: MA Experiment 20001757 PARAMETER Experiment Name: At_50mM_NH4NO3_L-to-H_P Parameter: Timepoint (hr) Value: 6
  misc_feature: MA Experiment 20001757 PARAMETER Experiment Name: At_50mM_NH4NO3_L-to-H_P Parameter: Tissue Value: Leaf
  misc_feature: MA Experiment 20001757 PARAMETER Experiment Name: At_50mM_NH4NO3_L-to-H_P Parameter: Treatment Value: 50mM NH4NO3 vs 100mM Mannitol
  misc_feature: MA Experiment ID: 20001911 Result: Down-regulated in Transcription
  misc_feature: MA Experiment 20001911 PARAMETER Experiment Name: At_Drought_Reproduction_P Parameter: Age (day) Value: 40
  misc_feature: MA Experiment 20001911 PARAMETER Experiment Name: At_Drought_Reproduction_P Parameter: Organism Value: A. thaliana
  misc_feature: MA Experiment 20001911 PARAMETER Experiment Name: At_Drought_Reproduction_P Parameter: Plant Line Value: WS
  misc_feature: MA Experiment 20001911 PARAMETER Experiment Name: At_Drought_Reproduction_P Parameter: Timepoint (day) Value: 10
  misc_feature: MA Experiment 20001911 PARAMETER Experiment Name: At_Drought_Reproduction_P Parameter: Tissue Value: Flowers
  misc_feature: MA Experiment 20001911 PARAMETER Experiment Name: At_Drought_Reproduction_P Parameter: Treatment Value: Drought vs. No Drought
agatcccaacggattcaaacagcaaatttgtgctttgctcttctctcttattataatatcctctcaaaaaccctctcctatatcctcctaaagccccccttccttgtttctctaccgcaacaaagaaaaaacaaaagtttgagaaaaatggtgtgttcgttgtgtaaccaatgattgggttttagcttactacttcgagagattataagaaagaaagagtgaagatacattatagaaagaagagaagcagaaaccaaaaaaagaaaccatgaagtctttttgtgataatgatgataataatcatagcaacacgactaatttgttagggttctcattgtcttcaaatatgatgaaaatgggaggtagaggaggtagagaagctatttactcatcttcaacttcttcagctgcaacttcttcttcttctgttccacctcaacttgttgttggtgacaacactagcaactttggtgtttgctatggatctaacccaaatggaggaatctattctcacatgtctgtgatgccactcagatctgatggttctctttgcttaatggaagctctcaacagatcttctcactcgaatcaccatcaagattcatctccaaaggtggaggatttctttgggacccatcacaacaacacaagtcacaaagaagccatggatcttagcttagatagtttattctacaacaccactcatgagcccaacacgactacaaactttcaagagttctttagcttccctcaaaccagaaaccatgaggaagaaactagaaattacgggaatgaccctagtttgacacatggagggtcttttaatgtaggggtatatggggaatttcaacagtcactgagcttatccatgagccctgggtcacaatctagctgcatcactggctctcaccaccaccaacaaaaccaaaaccaaaaccaccaaagccaaaaccaccagcagatctctgaagctcttgtggagacaagcgttgggtttgagacgacgacaatggcggctgcgaagaagaagaggggacaagaggatgttgtagttgttggtcagaaacagattgttcatagaaaatctatcgatacttttggacaacgaacttctcaataccgaggcgttacaagacatagatggactggtagatatgaagctcatctatgggacaatagtttcaagaaggaaggtcacagtagaaaaggaagacaagtttatctgggaggttatgatatggaggagaaagctgctcgagcatatgatcttgctgcactcaagtactggggtccctctactcacaccaatttctctgcggagaattatcagaaagagattgaagacatgaagaacatgactagacaagaatatgttgcacatttgagaaggaagagcagtggtttctctaggggtgcttccatctatagaggagtcacaagacatcaccagcatggaaggtggcaagcacggattggtagagtcgctggaaacaaagatctctaccttggaacttttggaacccaagaagaagctgcagaagcttacgatgtagcagcaattaagttccgtggcacaaatgctgtgactaactttgatatcacgaggtacgatgttgatcgtatcatgtctagtaacacactcttgtctggagagttagcgcgaaggaacaacaacagcattgtcgtcaggaatactgaagaccaaaccgctctaaatgctgttgtggaaggtggttccaacaaagaagtcagtactcccgagagactcttgagttttccggcgattttcgcgttgcctcaagttaatcaaaagatgttcggatcaaatatgggcggaaatatgagtccttggacatcaaaccctaatgctgagcttaagaccgtcgctcttactttgcctcagatgccggttttcgctgcttgggctgattcttgatcaacttcaatgactaactctggttttcttggtttagttgctaagtgttttggtttatctccggttttatccggtttgaactacaattcggtttagtttcgtcggtataaatagtatttgcttaggagcggtatatgtttcttttgagtagtattcatgtgaaacagaatgaatctctctataacatattattttaatgaatctcctttgct

SEQ ID NO: 43455 - protein, 555 aa, Arabidopsis thaliana
  peptide (1)..(555): Ceres Seq. ID no. 12606244
  misc_feature (281)..(354): Pfam Name: AP2 domain Pfam Description: AP2 domain
  misc_feature (223)..(526): Homolog of NCBI NO: 21069057 NR Description: BABY BOOM [Arabidopsis thaliana]
  misc_feature (107)..(470): Homolog of NCBI NO: 15218529 NR Description: ovule development protein, putative; protein id:
  misc_feature (41)..(466): Homolog of NCBI NO: 20330778 NR Description: Putative ovule development protein antitegumenta
  misc_feature (179)..(251): Homolog of NCBI NO: 28201307 NR Description: putative ovule development protein antitegumenta
  misc_feature (78)..(142): Homolog of NCBI NO: 28201307 NR Description: putative ovule development protein antitegumenta
  misc_feature (480)..(555): Homolog of NCBI NO: 28201307 NR Description: putative ovule development protein antitegumenta
  misc_feature (226)..(500): Homolog of NCBI NO: 28201307 NR Description: putative ovule development protein antitegumenta
  misc_feature (6)..(491): Homolog of NCBI NO: 38492172 NR Description: ANT-like protein [Nicotiana tabacum]
  misc_feature (1)..(555): Homolog of NCBI NO: 1171429 NR Description: CKC
  misc_feature (1)..(555): Homolog of NCBI NO: 15235690 NR Description: ovule development protein aintegumenta (ANT)
MKSFCDNDDNNHSNTTNLLGFSLSSNMMKMGGRGGREAIYSSSTSSAATSSSSVPPQLVVGDNTSNFGVCYGSNPNGGIYSHMSVMPLRSDGSLCLMEALNRSSHSNHHQDSSPKVEDFFGTHHNNTSHKEAMDLSLDSLFYNTTHEPNTTTNFQEFFSFPQTRNHEEETRNYGNDPSLTHGGSFNVGVYGEFQQSLSLSMSPGSQSSCITGSHHHQQNQNQNHQSQNHQQISEALVETSVGFETTTMAAAKKKRGQEDVVVVGQKQIVHRKSIDTFGQRTSQYRGVTRHRWTGRYEAHLWDNSFKKEGHSRKGRQVYLGGYDMEEKAARAYDLAALKYWGPSTHTNFSAENYQKEIEDMKNMTRQEYVAHLRRKSSGFSRGASIYRGVTRHHQHGRWQARIGRVAGNKDLYLGTFGTQEEAAEAYDVAAIKFRGTNAVTNFDITRYDVDRIMSSNTLLSGELARRNNNSIVVRNTEDQTALNAVVEGGSNKEVSTPERLLSFPAIFALPQVNQKMFGSNMGGNMSPWTSNPNAELKTVALTLPQMPVFAAWADS

SEQ ID NO: 43456 - protein, 529 aa, Arabidopsis thaliana
  peptide (1)..(529): Ceres Seq. ID no. 12606245
  misc_feature (255)..(328): Pfam Name: AP2 domain Pfam Description: AP2 domain
  misc_feature (197)..(500): Homolog of NCBI NO: 21069057 NR Description: BABY BOOM [Arabidopsis thaliana]
  misc_feature (81)..(444): Homolog of NCBI NO: 15218529 NR Description: ovule development protein, putative; protein id:
  misc_feature (15)..(440): Homolog of NCBI NO: 20330778 NR Description: Putative ovule development protein antitegumenta
  misc_feature (153)..(225): Homolog of NCBI NO: 28201307 NR Description: putative ovule development protein antitegumenta
  misc_feature (52)..(116): Homolog of NCBI NO: 28201307 NR Description: putative ovule development protein antitegumenta
  misc_feature (454)..(529): Homolog of NCBI NO: 28201307 NR Description: putative ovule development protein antitegumenta
  misc_feature (200)..(474): Homolog of NCBI NO: 28201307 NR Description: putative ovule development protein antitegumenta
  misc_feature (1)..(465): Homolog of NCBI NO: 38492172 NR Description: ANT-like protein [Nicotiana tabacum]
  misc_feature (1)..(529): Homolog of NCBI NO: 1171429 NR Description: CKC
  misc_feature (1)..(529): Homolog of NCBI NO: 15235690 NR Description: ovule development protein aintegumenta (ANT)
MMKMGGRGGREAIYSSSTSSAATSSSSVPPQLVVGDNTSNFGVCYGSNPNGGIYSHMSVMPLRSDGSLCLMEALNRSSHSNHHQDSSPKVEDFFGTHHNNTSHKEAMDLSLDSLFYNTTHEPNTTTNFQEFFSFPQTRNHEEETRNYGNDPSLTHGGSFNVGVYGEFQQSLSLSMSPGSQSSCITGSHHHQQNQNQNHQSQNHQQISEALVETSVGFETTTMAAAKKKRGQEDVVVVGQKQIVHRKSIDTFGQRTSQYRGVTRHRWTGRYEAHLWDNSFKKEGHSRKGRQVYLGGYDMEEKAARAYDLAALKYWGPSTHTNFSAENYQKEIEDMKNMTRQEYVAHLRRKSSGFSRGASIYRGVTRHHQHGRWQARIGRVAGNKDLYLGTFGTQEEAAEAYDVAAIKFRGTNAVTNFDITRYDVDRIMSSNTLLSGELARRNNNSIVVRNTEDQTALNAVVEGGSNKEVSTPERLLSFPAIFALPQVNQKMFGSNMGGNMSPWTSNPNAELKTVALTLPQMPVFAAWADS

SEQ ID NO: 43457 - protein, 528 aa, Arabidopsis thaliana
  peptide (1)..(528): Ceres Seq. ID no. 12606246
  misc_feature (254)..(327): Pfam Name: AP2 domain Pfam Description: AP2 domain
  misc_feature (196)..(499): Homolog of NCBI NO: 21069057 NR Description: BABY BOOM [Arabidopsis thaliana]
  misc_feature (80)..(443): Homolog of NCBI NO: 15218529 NR Description: ovule development protein, putative; protein id:
  misc_feature (14)..(439): Homolog of NCBI NO: 20330778 NR Description: Putative ovule development protein antitegumenta
  misc_feature (152)..(224): Homolog of NCBI NO: 28201307 NR Description: putative ovule development protein antitegumenta
  misc_feature (51)..(115): Homolog of NCBI NO: 28201307 NR Description: putative ovule development protein antitegumenta
  misc_feature (453)..(528): Homolog of NCBI NO: 28201307 NR Description: putative ovule development protein antitegumenta
  misc_feature (199)..(473): Homolog of NCBI NO: 28201307 NR Description: putative ovule development protein antitegumenta
  misc_feature (1)..(464): Homolog of NCBI NO: 38492172 NR Description: ANT-like protein [Nicotiana tabacum]
  misc_feature (1)..(528): Homolog of NCBI NO: 1171429 NR Description: CKC
  misc_feature (1)..(528): Homolog of NCBI NO: 15235690 NR Description: ovule development protein aintegumenta (ANT)
MKMGGRGGREAIYSSSTSSAATSSSSVPPQLVVGDNTSNFGVCYGSNPNGGIYSHMSVMPLRSDGSLCLMEALNRSSHSNHHQDSSPKVEDFFGTHHNNTSHKEAMDLSLDSLFYNTTHEPNTTTNFQEFFSFPQTRNHEEETRNYGNDPSLTHGGSFNVGVYGEFQQSLSLSMSPGSQSSCITGSHHHQQNQNQNHQSQNHQQISEALVETSVGFETTTMAAAKKKRGQEDVVVVGQKQIVHRKSIDTFGQRTSQYRGVTRHRWTGRYEAHLWDNSFKKEGHSRKGRQVYLGGYDMEEKAARAYDLAALKYWGPSTHTNFSAENYQKEIEDMKNMTRQEYVAHLRRKSSGFSRGASIYRGVTRHHQHGRWQARIGRVAGNKDLYLGTFGTQEEAAEAYDVAAIKFRGTNAVTNFDITRYDVDRIMSSNTLLSGELARRNNNSIVVRNTEDQTALNAVVEGGSNKEVSTPERLLSFPAIFALPQVNQKMFGSNMGGNMSPWTSNPNAELKTVALTLPQMPVFAAWADS

SEQ ID NO: 43458 - DNA, 1681 bp, Arabidopsis thaliana
  misc_feature (1)..(1681): Ceres Seq. ID no. 13647037
  misc_feature: MA Experiment ID: 20000171 Result: Down-regulated in Transcription
  misc_feature: MA Experiment 20000171 PARAMETER Experiment Name: At_42deg_Heat_P Parameter: Age (day) Value: 14
  misc_feature: MA Experiment 20000171 PARAMETER Experiment Name: At_42deg_Heat_P Parameter: Organism Value: A. thaliana
  misc_feature: MA Experiment 20000171 PARAMETER Experiment Name: At_42deg_Heat_P Parameter: Plant Line Value: WS
  misc_feature: MA Experiment 20000171 PARAMETER Experiment Name: At_42deg_Heat_P Parameter: Temperature (deg C) Value: 42 vs. 22
  misc_feature: MA Experiment 20000171 PARAMETER Experiment Name: At_42deg_Heat_P Parameter: Timepoint (hr) Value: 1
  misc_feature: MA Experiment 20000171 PARAMETER Experiment Name: At_42deg_Heat_P Parameter: Tissue Value: Aerial
  misc_feature: MA Experiment ID: 20000173 Result: Down-regulated in Transcription
  misc_feature: MA Experiment 20000173 PARAMETER Experiment Name: At_42deg_Heat_P Parameter: Age (day) Value: 14
  misc_feature: MA Experiment 20000173 PARAMETER Experiment Name: At_42deg_Heat_P Parameter: Organism Value: A. thaliana
  misc_feature: MA Experiment 20000173 PARAMETER Experiment Name: At_42deg_Heat_P Parameter: Plant Line Value: WS
  misc_feature: MA Experiment 20000173 PARAMETER Experiment Name: At_42deg_Heat_P Parameter: Temperature (deg C) Value: 42 vs. 22
  misc_feature: MA Experiment 20000173 PARAMETER Experiment Name: At_42deg_Heat_P Parameter: Timepoint (hr) Value: 6
  misc_feature: MA Experiment 20000173 PARAMETER Experiment Name: At_42deg_Heat_P Parameter: Tissue Value: Aerial
  misc_feature: MA Experiment ID: 20000182 Result: Down-regulated in Transcription
  misc_feature: MA Experiment 20000182 PARAMETER Experiment Name: At_2mM_SA_P Parameter: Age (day) Value: 14
  misc_feature: MA Experiment 20000182 PARAMETER Experiment Name: At_2mM_SA_P Parameter: Organism Value: A. thaliana
  misc_feature: MA Experiment 20000182 PARAMETER Experiment Name: At_2mM_SA_P Parameter: Plant Line Value: WS
  misc_feature: MA Experiment 20000182 PARAMETER Experiment Name: At_2mM_SA_P Parameter: Timepoint (hr) Value: 6
  misc_feature: MA Experiment 20000182 PARAMETER Experiment Name: At_2mM_SA_P Parameter: Tissue Value: Aerial
  misc_feature: MA Experiment 20000182 PARAMETER Experiment Name: At_2mM_SA_P Parameter: Treatment Value: 2mM SA vs. No Treatment
  misc_feature: MA Experiment ID: 20000184 Result: Down-regulated in Transcription
  misc_feature: MA Experiment 20000184 PARAMETER Experiment Name: At_Shoots__P Parameter: Age (day) Value: 7
  misc_feature: MA Experiment 20000184 PARAMETER Experiment Name: At_Shoots__P Parameter: Tissue Value: Shoots vs. Whole Plant
  misc_feature: MA Experiment ID: 20000185 Result: Down-regulated in Transcription
  misc_feature: MA Experiment 20000185 PARAMETER Experiment Name: At_Roots__P Parameter: Age (day) Value: 7 vs. 21
  misc_feature: MA Experiment 20000185 PARAMETER Experiment Name: At_Roots__P Parameter: Organism Value: A. thaliana
  misc_feature: MA Experiment 20000185 PARAMETER Experiment Name: At_Roots__P Parameter: Tissue Value: Roots vs. Whole Plant
  misc_feature: MA Experiment ID: 20000234 Result: Down-regulated in Transcription
  misc_feature: MA Experiment 20000234 PARAMETER Experiment Name: At_Siliques_P Parameter: Age (day) Value: 21
  misc_feature: MA Experiment 20000234 PARAMETER Experiment Name: At_Siliques_P Parameter: Organism Value: A. thaliana
  misc_feature: MA Experiment 20000234 PARAMETER Experiment Name: At_Siliques_P Parameter: Plant Line Value: WS
  misc_feature: MA Experiment 20000234 PARAMETER Experiment Name: At_Siliques_P Parameter: Tissue Value: Less Than 5mm Siliques vs. Whole Plant
  misc_feature: MA Experiment ID: 20000264 Result: Down-regulated in Transcription
  misc_feature: MA Experiment 20000264 PARAMETER Experiment Name: At_Open_Flower_P Parameter: Age (day) Value: 21
  misc_feature: MA Experiment 20000264 PARAMETER Experiment Name: At_Open_Flower_P Parameter: Plant Line Value: WS
  misc_feature: MA Experiment 20000264 PARAMETER Experiment Name: At_Open_Flower_P Parameter: Tissue Value: Open Flower vs. Whole Plant
  misc_feature: MA Experiment ID: 20000265 Result: Down-regulated in Transcription
  misc_feature: MA Experiment 20000265 PARAMETER Experiment Name: At_Open_Flower_P Parameter: Age (day) Value: 21
  misc_feature: MA Experiment 20000265 PARAMETER Experiment Name: At_Open_Flower_P Parameter: Plant Line Value: WS
  misc_feature: MA Experiment 20000265 PARAMETER Experiment Name: At_Open_Flower_P Parameter: Tissue Value: Closed Flower vs. Whole Plant
  misc_feature: MA Experiment ID: 20000269 Result: Up-regulated in Transcription
  misc_feature: MA Experiment 20000269 PARAMETER Experiment Name: At_1mM_KNO3_L-vs-H_Roots_P Parameter: Age (day) Value: 7,10,12
  misc_feature: MA Experiment 20000269 PARAMETER Experiment Name: At_1mM_KNO3_L-vs-H_Roots_P Parameter: Organism Value: A. thaliana
  misc_feature: MA Experiment 20000269 PARAMETER Experiment Name: At_1mM_KNO3_L-vs-H_Roots_P Parameter: Plant Line Value: WS
  misc_feature: MA Experiment 20000269 PARAMETER Experiment Name: At_1mM_KNO3_L-vs-H_Roots_P Parameter: Timepoint (day) Value: 7,10,12
  misc_feature: MA Experiment 20000269 PARAMETER Experiment Name: At_1mM_KNO3_L-vs-H_Roots_P Parameter: Tissue Value: Roots
  misc_feature: MA Experiment 20000269 PARAMETER Experiment Name: At_1mM_KNO3_L-vs-H_Roots_P Parameter: Treatment Value: 1mM KNO3 vs. 50mM KNO3
  misc_feature: MA Experiment ID: 20000286 Result: Down-regulated in Transcription
  misc_feature: MA Experiment 20000286 PARAMETER Experiment Name: At_Open_Flower_P Parameter: Age (day) Value: 21
  misc_feature: MA Experiment 20000286 PARAMETER Experiment Name: At_Open_Flower_P Parameter: Plant Line Value: WS
  misc_feature: MA Experiment 20000286 PARAMETER Experiment Name: At_Open_Flower_P Parameter: Tissue Value: Half Open vs. Whole Plant
  misc_feature: MA Experiment ID: 20000437 Result: Down-regulated in Transcription
  misc_feature: MA Experiment 20000437 PARAMETER Experiment Name: At_Drought_P Parameter: Age (day) Value: 8
  misc_feature: MA Experiment 20000437 PARAMETER Experiment Name: At_Drought_P Parameter: Organism Value: A. thaliana
  misc_feature: MA Experiment 20000437 PARAMETER Experiment Name: At_Drought_P Parameter: Plant Line Value: WS
  misc_feature: MA Experiment 20000437 PARAMETER Experiment Name: At_Drought_P Parameter: Timepoint (hr) Value: 24
  misc_feature: MA Experiment 20000437 PARAMETER Experiment Name: At_Drought_P Parameter: Tissue Value: Whole Plant
  misc_feature: MA Experiment 20000437 PARAMETER Experiment Name: At_Drought_P Parameter: Treatment Value: Drought vs. No Drought
  misc_feature: MA Experiment ID: 20000439 Result: Down-regulated in Transcription
  misc_feature: MA Experiment 20000439 PARAMETER Experiment Name: At_Roots__P Parameter: Age (day) Value: 14 vs. 21
  misc_feature: MA Experiment 20000439 PARAMETER Experiment Name: At_Roots__P Parameter: Organism Value: A. thaliana
  misc_feature: MA Experiment 20000439 PARAMETER Experiment Name: At_Roots__P Parameter: Tissue Value: Roots vs. Whole Plant
  misc_feature: MA Experiment ID: 20000451 Result: Up-regulated in Transcription
  misc_feature: MA Experiment 20000451 PARAMETER Experiment Name: At_CS6879_Shoots-Roots_P Parameter: Age (day) Value: 14
  misc_feature: MA Experiment 20000451 PARAMETER Experiment Name: At_CS6879_Shoots-Roots_P Parameter: Organism Value: A. thaliana
  misc_feature: MA Experiment 20000451 PARAMETER Experiment Name: At_CS6879_Shoots-Roots_P Parameter: Plant Line Value: CS6879 vs. WS
  misc_feature: MA Experiment 20000451 PARAMETER Experiment Name: At_CS6879_Shoots-Roots_P Parameter: Tissue Value: Roots
  misc_feature: MA Experiment ID: 20000495 Result: Up-regulated in Transcription
  misc_feature: MA Experiment 20000495 PARAMETER Experiment Name: At_Guard_Cells_P Parameter: Harvest Date Value: 8/2/2002
  misc_feature: MA Experiment 20000495 PARAMETER Experiment Name: At_Guard_Cells_P Parameter: Organism Value: A. thaliana
  misc_feature: MA Experiment 20000495 PARAMETER Experiment Name: At_Guard_Cells_P Parameter: Tissue Value: Guard Cells vs. Leaves
  misc_feature: MA Experiment ID: 20000794 Result: Down-regulated in Transcription
  misc_feature: MA Experiment 20000794 PARAMETER Experiment Name: At_Petals_P Parameter: Age (day) Value: 23-25 days
  misc_feature: MA Experiment 20000794 PARAMETER Experiment Name: At_Petals_P Parameter: Plant Line Value: WS
  misc_feature: MA Experiment 20000794 PARAMETER Experiment Name: At_Petals_P Parameter: Tissue Value: Petals vs. Whole plant
  misc_feature: MA Experiment ID: 20001248 Result: Down-regulated in Transcription
  misc_feature: MA Experiment 20001248 PARAMETER Experiment Name: At_Far-red-induction_P Parameter: Age (day) Value: 7
  misc_feature: MA Experiment 20001248 PARAMETER Experiment Name: At_Far-red-induction_P Parameter: Light Value: Far-red vs. White
  misc_feature: MA Experiment 20001248 PARAMETER Experiment Name: At_Far-red-induction_P Parameter: Organism Value: A. thaliana
  misc_feature: MA Experiment 20001248 PARAMETER Experiment Name: At_Far-red-induction_P Parameter: Plant Line Value: Columbia
  misc_feature: MA Experiment 20001248 PARAMETER Experiment Name: At_Far-red-induction_P Parameter: Timepoint (hr) Value: 4
  misc_feature: MA Experiment 20001248 PARAMETER Experiment Name: At_Far-red-induction_P Parameter: Tissue Value: Whole Plant
  misc_feature: MA Experiment ID: 20001450 Result: Down-regulated in Transcription
  misc_feature: MA Experiment 20001450 PARAMETER Experiment Name: At_Far-red-induction_P Parameter: Age (day) Value: 7
  misc_feature: MA Experiment 20001450 PARAMETER Experiment Name: At_Far-red-induction_P Parameter: Light Value: Far-red vs. White
  misc_feature: MA Experiment 20001450 PARAMETER Experiment Name: At_Far-red-induction_P Parameter: Organism Value: A. thaliana
  misc_feature: MA Experiment 20001450 PARAMETER Experiment Name: At_Far-red-induction_P Parameter: Plant Line Value: Columbia
  misc_feature: MA Experiment 20001450 PARAMETER Experiment Name: At_Far-red-induction_P Parameter: Timepoint (hr) Value: 8
  misc_feature: MA Experiment 20001450 PARAMETER Experiment Name: At_Far-red-induction_P Parameter: Tissue Value: Whole Plant
  misc_feature: MA Experiment ID: 20001451 Result: Down-regulated in Transcription
  misc_feature: MA Experiment 20001451 PARAMETER Experiment Name: At_Far-red-induction_P Parameter: Age (day) Value: 7
  misc_feature: MA Experiment 20001451 PARAMETER Experiment Name: At_Far-red-induction_P Parameter: Light Value: Far-red vs. White
  misc_feature: MA Experiment 20001451 PARAMETER Experiment Name: At_Far-red-induction_P Parameter: Organism Value: A. thaliana
  misc_feature: MA Experiment 20001451 PARAMETER Experiment Name: At_Far-red-induction_P Parameter: Plant Line Value: Columbia
  misc_feature: MA Experiment 20001451 PARAMETER Experiment Name: At_Far-red-induction_P Parameter: Timepoint (hr) Value: 24
  misc_feature: MA Experiment 20001451 PARAMETER Experiment Name: At_Far-red-induction_P Parameter: Tissue Value: Whole Plant
  misc_feature: MA Experiment ID: 20001757 Result: Up-regulated in Transcription
  misc_feature: MA Experiment 20001757 PARAMETER Experiment Name: At_50mM_NH4NO3_L-to-H_P Parameter: Timepoint (hr) Value: 6
  misc_feature: MA Experiment 20001757 PARAMETER Experiment Name: At_50mM_NH4NO3_L-to-H_P Parameter: Tissue Value: Leaf
  misc_feature: MA Experiment 20001757 PARAMETER Experiment Name: At_50mM_NH4NO3_L-to-H_P Parameter: Treatment Value: 50mM NH4NO3 vs 100mM Mannitol
  misc_feature: MA Experiment ID: 20001905 Result: Down-regulated in Transcription
  misc_feature: MA Experiment 20001905 PARAMETER Experiment Name: At_Drought_Reproduction_P Parameter: Age (day) Value: 40
  misc_feature: MA Experiment 20001905 PARAMETER Experiment Name: At_Drought_Reproduction_P Parameter: Organism Value: A. thaliana
  misc_feature: MA Experiment 20001905 PARAMETER Experiment Name: At_Drought_Reproduction_P Parameter: Plant Line Value: WS
  misc_feature: MA Experiment 20001905 PARAMETER Experiment Name: At_Drought_Reproduction_P Parameter: Timepoint (day) Value: 10
  misc_feature: MA Experiment 20001905 PARAMETER Experiment Name: At_Drought_Reproduction_P Parameter: Tissue Value: Rosettes
  misc_feature: MA Experiment 20001905 PARAMETER Experiment Name: At_Drought_Reproduction_P Parameter: Treatment Value: Drought vs. No Drought
  misc_feature: MA Experiment ID: 20001910 Result: Down-regulated in Transcription
  misc_feature: MA Experiment 20001910 PARAMETER Experiment Name: At_Drought_Reproduction_P Parameter: Age (day) Value: 37
  misc_feature: MA Experiment 20001910 PARAMETER Experiment Name: At_Drought_Reproduction_P Parameter: Organism Value: A. thaliana
  misc_feature: MA Experiment 20001910 PARAMETER Experiment Name: At_Drought_Reproduction_P Parameter: Plant Line Value: WS
  misc_feature: MA Experiment 20001910 PARAMETER Experiment Name: At_Drought_Reproduction_P Parameter: Timepoint (day) Value: 7
  misc_feature: MA Experiment 20001910 PARAMETER Experiment Name: At_Drought_Reproduction_P Parameter: Tissue Value: Flowers
  misc_feature: MA Experiment 20001910 PARAMETER Experiment Name: At_Drought_Reproduction_P Parameter: Treatment Value: Drought vs. No Drought
  misc_feature: MA Experiment ID: 20001911 Result: Down-regulated in Transcription
  misc_feature: MA Experiment 20001911 PARAMETER Experiment Name: At_Drought_Reproduction_P Parameter: Age (day) Value: 40
  misc_feature: MA Experiment 20001911 PARAMETER Experiment Name: At_Drought_Reproduction_P Parameter: Organism Value: A. thaliana
  misc_feature: MA Experiment 20001911 PARAMETER Experiment Name: At_Drought_Reproduction_P Parameter: Plant Line Value: WS
  misc_feature: MA Experiment 20001911 PARAMETER Experiment Name: At_Drought_Reproduction_P Parameter: Timepoint (day) Value: 10
  misc_feature: MA Experiment 20001911 PARAMETER Experiment Name: At_Drought_Reproduction_P Parameter: Tissue Value: Flowers
  misc_feature: MA Experiment 20001911 PARAMETER Experiment Name: At_Drought_Reproduction_P Parameter: Treatment Value: Drought vs. No Drought
actcaaaagtagtaacaactaagaatggaagatatcatcatcggcgtggtggctctcgccgcggttctccttttcttcctctaccaaaaaccgaaaaccaaacggtacaagctacctccagggccatcaccacttccggtgatcggaaacctccttcagcttcagaagcttaacccacaacgcttcttcgctggatgggccaaaaaatacggtccaatcttgtcatacaggataggaagcagaacaatggtggtgatatcttcagctgagctagctaaagagcttctcaagacgcaagatgtcaactttgcggaccggcctccacatcgtggccatgagttcatatcctacggcaggcgtgacatggcattaaaccactacacaccgtattaccgagagataaggaagatggggatgaaccacttgttctcaccaacacgtgtggccacctttaagcatgtacgagaggaagaggctaggaggatgatggataagatcaacaaggccgcggataaatccgaagtagtcgatataagtgagcttatgttgaccttcacgaactcggttgtgtgtagacaagcgttcgggaagaagtacaatgaagatggagaagagatgaagaggttcatcaagattctttatgggactcaaagcgttttggggaagatctttttctctgattttttcccatattgtggctttcttgatgatttatcaggcctcacagcttatatgaaagagtgtttcgaaagacaagacacttatattcaagaggttgtcaatgagaccttgatcctaagagagtcaagcccgaaaccgagagcatgattgatctcttgatggggatctacaaagaacaacctttcgcttctgaatttactgtagataatgtcaaagccgtcatcttggatattgtagtggcgggaacagatactgcagctgcggcggttgtgtgggggatgacgtatctaatgaagtacccacaagtgttgaagaaagctcaagcagaagtgagagagtatatgaaagagaaaggttaacgttcgttactgaagacgatgtcaagaaccttccttacttcagagctttagttaaagaaaccctaaggatcgaaccagtgattcctctcctaatccctcgtgcttgcattcaagataccaagatcgccggttacgacatccccgcaggaacaacggtcaacgtcaacgcgtgggccgtgtcacgtgacgagaaagaatggggaccgaaccctgatgagttcaggcccgagaggtttcttgagaaggaagttgacttcaaaggcacggactacgagtttataccgttcgggtcaggccggagaatgtgcccgggaatgcgtcttggggccgcgatgcttgaggttccttatgcgaaccttctcctcagcttcaattttaaactccctaatgggatgaaaccagatgatatcaacatggatgtcatgactggtcttgctatgcacaagtcgcagcatctcaagcttgttccagagaaagtgaacaagtattagctaatatatatcaaataaatctaccttctctgattatatagtatatgttcctccaatgtattctgcttcaatgtttggtttctttcttaaatggcaatcgtctctctatctttctcttcacattttgatatgaaggaagcaaattcacat

SEQ ID NO: 43459 - protein, 267 aa, Arabidopsis thaliana
  peptide (1)..(267): Ceres Seq. ID no. 13647038
  misc_feature (31)..(264): Pfam Name: Cytochrome P450 Pfam Description: Cytochrome P450
  misc_feature (11)..(256): Homolog of NCBI NO: 16507125 NR Description: cytochrome P450 [Citrus sinensis]
  misc_feature (1)..(264): Homolog of NCBI NO: 16323067 NR Description: AT4g13770/F18A5_160 [Arabidopsis thaliana]
  misc_feature (4)..(256): Homolog of NCBI NO: 15235968 NR Description: cytochrome P450 83B1 [Arabidopsis thaliana]
  misc_feature (1)..(264): Homolog of NCBI NO: 619745 NR Description: cytochrome p450 dependent monooxygenase
  misc_feature (1)..(264): Homolog of NCBI NO: 15236349 NR Description: cytochrome P450 family [Arabidopsis thaliana]
MEDIIIGVVALAAVLLFFLYQKPKTKRYKLPPGPSPLPVIGNLLQLQKLNPQRFFAGWAKKYGPILSYRIGSRTMVVISSAELAKELLKTQDVNFADRPPHRGHEFISYGRRDMALNHYTPYYREIRKMGMNHLFSPTRVATFKHVREEEARRMMDKINKAADKSEVVDISELMLTFTNSVVCRQAFGKKYNEDGEEMKRFIKILYGTQSVLGKIFFSDFFPYCGFLDDLSGLTAYMKECFERQDTYIQEVVNETLILRESSPKPRA

SEQ ID NO: 43460 - protein, 193 aa, Arabidopsis thaliana
  peptide (1)..(193): Ceres Seq. ID no. 13647039
  misc_feature (1)..(190): Pfam Name: Cytochrome P450 Pfam Description: Cytochrome P450
  misc_feature (1)..(182): Homolog of NCBI NO: 16507125 NR Description: cytochrome P450 [Citrus sinensis]
  misc_feature (1)..(190): Homolog of NCBI NO: 16323067 NR Description: AT4g13770/F18A5_160 [Arabidopsis thaliana]
  misc_feature (1)..(182): Homolog of NCBI NO: 15235968 NR Description: cytochrome P450 83B1 [Arabidopsis thaliana]
  misc_feature (1)..(190): Homolog of NCBI NO: 619745 NR Description: cytochrome p450 dependent monooxygenase
  misc_feature (1)..(190): Homolog of NCBI NO: 15236349 NR Description: cytochrome P450 family [Arabidopsis thaliana]
MVVISSAELAKELLKTQDVNFADRPPHRGHEFISYGRRDMALNHYTPYYREIRKMGMNHLFSPTRVATFKHVREEEARRMMDKINKAADKSEVVDISELMLTFTNSVVCRQAFGKKYNEDGEEMKRFIKILYGTQSVLGKIFFSDFFPYCGFLDDLSGLTAYMKECFERQDTYIQEVVNETLILRESSPKPRA

SEQ ID NO: 43461 - protein, 154 aa, Arabidopsis thaliana
  peptide (1)..(154): Ceres Seq. ID no. 13647040
  misc_feature (1)..(151): Pfam Name: Cytochrome P450 Pfam Description: Cytochrome P450
  misc_feature (1)..(143): Homolog of NCBI NO: 16507125 NR Description: cytochrome P450 [Citrus sinensis]
  misc_feature (1)..(151): Homolog of NCBI NO: 16323067 NR Description: AT4g13770/F18A5_160 [Arabidopsis thaliana]
  misc_feature (1)..(143): Homolog of NCBI NO: 15235968 NR Description: cytochrome P450 83B1 [Arabidopsis thaliana]
  misc_feature (1)..(151): Homolog of NCBI NO: 619745 NR Description: cytochrome p450 dependent monooxygenase
  misc_feature (1)..(151): Homolog of NCBI NO: 15236349 NR Description: cytochrome P450 family [Arabidopsis thaliana]
MALNHYTPYYREIRKMGMNHLFSPTRVATFKHVREEEARRMMDKINKAADKSEVVDISELMLTFTNSVVCRQAFGKKYNEDGEEMKRFIKILYGTQSVLGKIFFSDFFPYCGFLDDLSGLTAYMKECFERQDTYIQEVVNETLILRESSPKPRA

SEQ ID NO: 43462 - DNA, 1532 bp, Arabidopsis thaliana
  misc_feature (1)..(1532): Ceres Seq. ID no. 12395074
  misc_feature: MA Experiment ID: 108434 Result: Down-regulated in Transcription
  misc_feature: MA Experiment 108434 PARAMETER Experiment Name: At_Root_Tips_cDNA_P Parameter: Tissue Value: Root Tips
  misc_feature: MA Experiment ID: 108463 Result: Up-regulated in Transcription
  misc_feature: MA Experiment 108463 PARAMETER Experiment Name: At_Germinating_Seeds_cDNA_P Parameter: Age (day) Value: 3 vs. 0
  misc_feature: MA Experiment 108463 PARAMETER Experiment Name: At_Germinating_Seeds_cDNA_P Parameter: Tissue Value: Germinating Seeds
  misc_feature: MA Experiment ID: 108464 Result: Up-regulated in Transcription
  misc_feature: MA Experiment 108464 PARAMETER Experiment Name: At_Germinating_Seeds_cDNA_P Parameter: Age (day) Value: 4 vs. 0
  misc_feature: MA Experiment 108464 PARAMETER Experiment Name: At_Germinating_Seeds_cDNA_P Parameter: Tissue Value: Germinating Seeds
  misc_feature: MA Experiment ID: 108579 Result: Up-regulated in Transcription
  misc_feature: MA Experiment 108579 PARAMETER Experiment Name: At_4deg_Cold_cDNA_P Parameter: Temperature (deg C) Value: 4 vs. 22
  misc_feature: MA Experiment 108579 PARAMETER Experiment Name: At_4deg_Cold_cDNA_P Parameter: Timepoint (hr) Value: 6
  misc_feature: MA Experiment 108579 PARAMETER Experiment Name: At_4deg_Cold_cDNA_P Parameter: Tissue Value: Aerial
  misc_feature: MA Experiment ID: 20000144 Result: Up-regulated in Transcription
  misc_feature: MA Experiment 20000144 PARAMETER Experiment Name: At_42deg_Heat_cDNA_P Parameter: Temperature (deg C) Value: 42 vs. 22
  misc_feature: MA Experiment 20000144 PARAMETER Experiment Name: At_42deg_Heat_cDNA_P Parameter: Timepoint (hr) Value: 1
  misc_feature: MA Experiment 20000144 PARAMETER Experiment Name: At_42deg_Heat_cDNA_P Parameter: Tissue Value: Aerial
  misc_feature: MA Experiment ID: 20000173 Result: Down-regulated in Transcription
  misc_feature: MA Experiment 20000173 PARAMETER Experiment Name: At_42deg_Heat_P Parameter: Age (day) Value: 14
  misc_feature: MA Experiment 20000173 PARAMETER Experiment Name: At_42deg_Heat_P Parameter: Organism Value: A. thaliana
  misc_feature: MA Experiment 20000173 PARAMETER Experiment Name: At_42deg_Heat_P Parameter: Plant Line Value: WS
  misc_feature: MA Experiment 20000173 PARAMETER Experiment Name: At_42deg_Heat_P Parameter: Temperature (deg C) Value: 42 vs. 22
  misc_feature: MA Experiment 20000173 PARAMETER Experiment Name: At_42deg_Heat_P Parameter: Timepoint (hr) Value: 6
  misc_feature: MA Experiment 20000173 PARAMETER Experiment Name: At_42deg_Heat_P Parameter: Tissue Value: Aerial
  misc_feature: MA Experiment ID: 20000184 Result: Down-regulated in Transcription
  misc_feature: MA Experiment 20000184 PARAMETER Experiment Name: At_Shoots__P Parameter: Age (day) Value: 7
  misc_feature: MA Experiment 20000184 PARAMETER Experiment Name: At_Shoots__P Parameter: Tissue Value: Shoots vs. Whole Plant
  misc_feature: MA Experiment ID: 20000224 Result: Up-regulated in Transcription
  misc_feature: MA Experiment ID: 20000227 Result: Down-regulated in Transcription
  misc_feature: MA Experiment 20000227 PARAMETER Experiment Name: At_Root-Tips-vs-Tops_P Parameter: Tissue Value: Root Tips vs. Root Tops
  misc_feature: MA Experiment ID: 20000234 Result: Down-regulated in Transcription
  misc_feature: MA Experiment 20000234 PARAMETER Experiment Name: At_Siliques_P Parameter: Age (day) Value: 21
  misc_feature: MA Experiment 20000234 PARAMETER Experiment Name: At_Siliques_P Parameter: Organism Value: A. thaliana
  misc_feature: MA Experiment 20000234 PARAMETER Experiment Name: At_Siliques_P Parameter: Plant Line Value: WS
  misc_feature: MA Experiment 20000234 PARAMETER Experiment Name: At_Siliques_P Parameter: Tissue Value: Less Than 5mm Siliques vs. Whole Plant
  misc_feature: MA Experiment ID: 20000235 Result: Down-regulated in Transcription
  misc_feature: MA Experiment 20000235 PARAMETER Experiment Name: At_Siliques_P Parameter: Age (day) Value: 21
  misc_feature: MA Experiment 20000235 PARAMETER Experiment Name: At_Siliques_P Parameter: Organism Value: A. thaliana
  misc_feature: MA Experiment 20000235 PARAMETER Experiment Name: At_Siliques_P Parameter: Plant Line Value: WS
  misc_feature: MA Experiment 20000235 PARAMETER Experiment Name: At_Siliques_P Parameter: Tissue Value: 5-10mm Siliques vs. Whole Plant
  misc_feature: MA Experiment ID: 20000265 Result: Down-regulated in Transcription
  misc_feature: MA Experiment 20000265 PARAMETER Experiment Name: At_Open_Flower_P Parameter: Age (day) Value: 21
  misc_feature: MA Experiment 20000265 PARAMETER Experiment Name: At_Open_Flower_P Parameter: Plant Line Value: WS
  misc_feature: MA Experiment 20000265 PARAMETER Experiment Name: At_Open_Flower_P Parameter: Tissue Value: Closed Flower vs. Whole Plant
  misc_feature: MA Experiment ID: 20000286 Result: Down-regulated in Transcription
  misc_feature: MA Experiment 20000286 PARAMETER Experiment Name: At_Open_Flower_P Parameter: Age (day) Value: 21
  misc_feature: MA Experiment 20000286 PARAMETER Experiment Name: At_Open_Flower_P Parameter: Plant Line Value: WS
  misc_feature: MA Experiment 20000286 PARAMETER Experiment Name: At_Open_Flower_P Parameter: Tissue Value: Half Open vs. Whole Plant
  misc_feature: MA Experiment ID: 20000437 Result: Up-regulated in Transcription
  misc_feature: MA Experiment 20000437 PARAMETER Experiment Name: At_Drought_P Parameter: Age (day) Value: 8
  misc_feature: MA Experiment 20000437 PARAMETER Experiment Name: At_Drought_P Parameter: Organism Value: A. thaliana
  misc_feature: MA Experiment 20000437 PARAMETER Experiment Name: At_Drought_P Parameter: Plant Line Value: WS
  misc_feature: MA Experiment 20000437 PARAMETER Experiment Name: At_Drought_P Parameter: Timepoint (hr) Value: 24
  misc_feature: MA Experiment 20000437 PARAMETER Experiment Name: At_Drought_P Parameter: Tissue Value: Whole Plant
  misc_feature: MA Experiment 20000437 PARAMETER Experiment Name: At_Drought_P Parameter: Treatment Value: Drought vs. No Drought
  misc_feature: MA Experiment ID: 20000495 Result: Up-regulated in Transcription
  misc_feature: MA Experiment 20000495 PARAMETER Experiment Name: At_Guard_Cells_P Parameter: Harvest Date Value: 8/2/2002
  misc_feature: MA Experiment 20000495 PARAMETER Experiment Name: At_Guard_Cells_P Parameter: Organism Value: A. thaliana
  misc_feature: MA Experiment 20000495 PARAMETER Experiment Name: At_Guard_Cells_P Parameter: Tissue Value: Guard Cells vs. Leaves
  misc_feature: MA Experiment ID: 20000496 Result: Up-regulated in Transcription
  misc_feature: MA Experiment 20000496 PARAMETER Experiment Name: At_Guard_Cells_P Parameter: Harvest Date Value: 7/19/2002
  misc_feature: MA Experiment 20000496 PARAMETER Experiment Name: At_Guard_Cells_P Parameter: Organism Value: Canola
  misc_feature: MA Experiment 20000496 PARAMETER Experiment Name: At_Guard_Cells_P Parameter: Tissue Value: Guard Cells vs. Leaves
aaaaaattttacacttatgctcttcatatcacatacaacaaactcatatatataaaaactttaaccttcgtatagcaacgatctagtagaaagcttatactaaaactttctgattctcttaatatggcggaggagtttaaagctacggcatcgatttgtggtggcggaggtggcgcgtggtggaactcgccaaggagcgttatgtctccttcggatcatttcttgtcaccatgcttcggagcggctatcacttccaatgattttagctcgcaagagaatcatctcaaatctaggatgacttgtacggacaacaacaacatcgttttcgggcagcgagaggcggattctgacagtggaggaagtaccgtgacgatggactcgacgttgcagatgatgggtctagggttttcctcaaattgttcttcagattggaaccaaaccattttacaagaagacttaaactcaagcttcataaggagctcacaagatcaagatcatggccaaggattcttatccacaactacttcaccttatatacttaatccagcttgttcttcatctccatcaacttcttcgtcctcaagcttgatacgaaccttttacgatcccgaaccaagtccatacaactttgtctccaccacaagtggttcaatcaacgatcctcaactttcttgggctaataagacaaatcctcatcatcaagtagcttatggactaattaacagcttctctaacaacgcaaactctcgacccttttggaattcttcatcaaccactaacttaaacaacacgacgccgagcaattttgtaaccactccgcagataatatctactcgtttggaggacaaaaccaagaatctgaagacaagagctcagagtgagtctttgaagagagcaaaggataatgaatctgcggcgaagaaaccgagagtcaccacgccttcaccgttgccaactttcaaggtgagaaaagagaatctaagggaccagataacttcattacaacaactagtttcacctttcggaaagacagatactgcatctgttctccaagaagctatagagtacatcaagttccttcacgaccaagtcactgttctaagcactccatacatgaaacaaggtgcctcgaaccaacaacaacagcagatatctggtaaatcgaagagtcaagatgaaaatgagaatcacgaactaagaggacatggtctatgtctcgtcccaatatcaagcacgtttccggtggctaacgaaacaacagccgatttttggacaccaacgtttgggggcaacaatttcaggtgattaaagagagagggttgtggttgtcaagacggatgggaacatatgctaaattcagcttggagactctaaagcataacaataatttttaatgtattttcttcttctttcaatattttaaggggggtttattgctgaatttagcatatatgggttgtttttatgttgaataaccttttgttcctgtcattgttcttgaatatatatatatacatatttttgtcgttggt

SEQ ID NO: 43463 - protein, 393 aa, Arabidopsis thaliana
  peptide (1)..(393): Ceres Seq. ID no. 12395075
  misc_feature (282)..(320): Pfam Name: Helix-loop-helix DNA-binding domain Pfam Description: Helix-loop-helix DNA-binding domain
  misc_feature (244)..(375): Homolog of NCBI NO: 15234636 NR Description: putative protein; protein id: At4g05170.1
  misc_feature (341)..(393): Homolog of NCBI NO: 34910130 NR Description: B1070A12.8 [Oryza sativa (japonica
  misc_feature (252)..(323): Homolog of NCBI NO: 34910130 NR Description: B1070A12.8 [Oryza sativa (japonica
  misc_feature (202)..(393): Homolog of NCBI NO: 15232315 NR Description: hypothetical protein; protein id: At3g20640.1
  misc_feature (202)..(393): Homolog of NCBI NO: 9294343 NR Description: gene_id:F3H11.2~unknown protein [Arabidopsis
  misc_feature (340)..(393): Homolog of NCBI NO: 25404333 NR Description: hypothetical protein T13M11.1 [imported] -
  misc_feature (58)..(325): Homolog of NCBI NO: 25404333 NR Description: hypothetical protein T13M11.1 [imported] -
  misc_feature (1)..(343): Homolog of NCBI NO: 30696595 NR Description: expressed protein [Arabidopsis thaliana]
  misc_feature (1)..(393): Homolog of NCBI NO: 21553730 NR Description: unknown [Arabidopsis thaliana]
  misc_feature (1)..(393): Homolog of NCBI NO: 18407276 NR Description: expressed protein
MAEEFKATASICGGGGGAWWNSPRSVMSPSDHFLSPCFGAAITSNDFSSQENHLKSRMTCTDNNNIVFGQREADSDSGGSTVTMDSTLQMMGLGFSSNCSSDWNQTILQEDLNSSFIRSSQDQDHGQGFLSTTTSPYILNPACSSSPSTSSSSSLIRTFYDPEPSPYNFVSTTSGSINDPQLSWANKTNPHHQVAYGLINSFSNNANSRPFWNSSSTTNLNNTTPSNFVTTPQIISTRLEDKTKNLKTRAQSESLKRAKDNESAAKKPRVTTPSPLPTFKVRKENLRDQITSLQQLVSPFGKTDTASVLQEAIEYIKFLHDQVTVLSTPYMKQGASNQQQQQISGKSKSQDENENHELRGHGLCLVPISSTFPVANETTADFWTPTFGGNNFR

SEQ ID NO: 43464 - protein, 367 aa, Arabidopsis thaliana
  peptide (1)..(367): Ceres Seq. ID no. 12395076
  misc_feature (256)..(294): Pfam Name: Helix-loop-helix DNA-binding domain Pfam Description: Helix-loop-helix DNA-binding domain
  misc_feature (218)..(349): Homolog of NCBI NO: 15234636 NR Description: putative protein; protein id: At4g05170.1
  misc_feature (315)..(367): Homolog of NCBI NO: 34910130 NR Description: B1070A12.8 [Oryza sativa (japonica
  misc_feature (226)..(297): Homolog of NCBI NO: 34910130 NR Description: B1070A12.8 [Oryza sativa (japonica
  misc_feature (176)..(367): Homolog of NCBI NO: 15232315 NR Description: hypothetical protein; protein id: At3g20640.1
  misc_feature (176)..(367): Homolog of NCBI NO: 9294343 NR Description: gene_id:F3H11.2~unknown protein [Arabidopsis
  misc_feature (314)..(367): Homolog of NCBI NO: 25404333 NR Description: hypothetical protein T13M11.1 [imported] -
  misc_feature (32)..(299): Homolog of NCBI NO: 25404333 NR Description: hypothetical protein T13M11.1 [imported] -
  misc_feature (1)..(317): Homolog of NCBI NO: 30696595 NR Description: expressed protein [Arabidopsis thaliana]
  misc_feature (1)..(367): Homolog of NCBI NO: 21553730 NR Description: unknown [Arabidopsis thaliana]
  misc_feature (1)..(367): Homolog of NCBI NO: 18407276 NR Description: expressed protein
MSPSDHFLSPCFGAAITSNDFSSQENHLKSRMTCTDNNNIVFGQREADSDSGGSTVTMDSTLQMMGLGFSSNCSSDWNQTILQEDLNSSFIRSSQDQDHGQGFLSTTTSPYILNPACSSSPSTSSSSSLIRTFYDPEPSPYNFVSTTSGSINDPQLSWANKTNPHHQVAYGLINSFSNNANSRPFWNSSSTTNLNNTTPSNFVTTPQIISTRLEDKTKNLKTRAQSESLKRAKDNESAAKKPRVTTPSPLPTFKVRKENLRDQITSLQQLVSPFGKTDTASVLQEAIEYIKFLHDQVTVLSTPYMKQGASNQQQQQISGKSKSQDENENHELRGHGLCLVPISSTFPVANETTADFWTPTFGGNNFR

SEQ ID NO: 43465 - protein, 336 aa, Arabidopsis thaliana
  peptide (1)..(336): Ceres Seq. ID no. 12395077
  misc_feature (225)..(263): Pfam Name: Helix-loop-helix DNA-binding domain Pfam Description: Helix-loop-helix DNA-binding domain
  misc_feature (187)..(318): Homolog of NCBI NO: 15234636 NR Description: putative protein; protein id: At4g05170.1
  misc_feature (284)..(336): Homolog of NCBI NO: 34910130 NR Description: B1070A12.8 [Oryza sativa (japonica
  misc_feature (195)..(266): Homolog of NCBI NO: 34910130 NR Description: B1070A12.8 [Oryza sativa (japonica
  misc_feature (145)..(336): Homolog of NCBI NO: 15232315 NR Description: hypothetical protein; protein id: At3g20640.1
  misc_feature (145)..(336): Homolog of NCBI NO: 9294343 NR Description: gene_id:F3H11.2~unknown protein [Arabidopsis
  misc_feature (283)..(336): Homolog of NCBI NO: 25404333 NR Description: hypothetical protein T13M11.1 [imported] -
  misc_feature (1)..(268): Homolog of NCBI NO: 25404333 NR Description: hypothetical protein T13M11.1 [imported] -
  misc_feature (1)..(286): Homolog of NCBI NO: 30696595 NR Description: expressed protein [Arabidopsis thaliana]
  misc_feature (1)..(336): Homolog of NCBI NO: 21553730 NR Description: unknown [Arabidopsis thaliana]
  misc_feature (1)..(336): Homolog of NCBI NO: 18407276 NR Description: expressed protein
MTCTDNNNIVFGQREADSDSGGSTVTMDSTLQMMGLGFSSNCSSDWNQTILQEDLNSSFIRSSQDQDHGQGFLSTTTSPYILNPACSSSPSTSSSSSLIRTFYDPEPSPYNFVSTTSGSINDPQLSWANKTNPHHQVAYGLINSFSNNANSRPFWNSSSTTNLNNTTPSNFVTTPQIISTRLEDKTKNLKTRAQSESLKRAKDNESAAKKPRVTTPSPLPTFKVRKENLRDQITSLQQLVSPFGKTDTASVLQEAIEYIKFLHDQVTVLSTPYMKQGASNQQQQQISGKSKSQDENENHELRGHGLCLVPISSTFPVANETTADFWTPTFGGNNFR

SEQ ID NO: 43466 - DNA, 1509 bp, Arabidopsis thaliana
  misc_feature (1)..(1509): Ceres Seq. ID no. 13646986
  misc_feature: MA Experiment ID: 20000264 Result: Up-regulated in Transcription
  misc_feature: MA Experiment 20000264 PARAMETER Experiment Name: At_Open_Flower_P Parameter: Age (day) Value: 21
  misc_feature: MA Experiment 20000264 PARAMETER Experiment Name: At_Open_Flower_P Parameter: Plant Line Value: WS
  misc_feature: MA Experiment 20000264 PARAMETER Experiment Name: At_Open_Flower_P Parameter: Tissue Value: Open Flower vs. Whole Plant
  misc_feature: MA Experiment ID: 20000265 Result: Up-regulated in Transcription
  misc_feature: MA Experiment 20000265 PARAMETER Experiment Name: At_Open_Flower_P Parameter: Age (day) Value: 21
  misc_feature: MA Experiment 20000265 PARAMETER Experiment Name: At_Open_Flower_P Parameter: Plant Line Value: WS
  misc_feature: MA Experiment 20000265 PARAMETER Experiment Name: At_Open_Flower_P Parameter: Tissue Value: Closed Flower vs. Whole Plant
  misc_feature: MA Experiment ID: 20000286 Result: Up-regulated in Transcription
  misc_feature: MA Experiment 20000286 PARAMETER Experiment Name: At_Open_Flower_P Parameter: Age (day) Value: 21
  misc_feature: MA Experiment 20000286 PARAMETER Experiment Name: At_Open_Flower_P Parameter: Plant Line Value: WS
  misc_feature: MA Experiment 20000286 PARAMETER Experiment Name: At_Open_Flower_P Parameter: Tissue Value: Half Open vs. Whole Plant
  misc_feature: MA Experiment ID: 20000794 Result: Up-regulated in Transcription
  misc_feature: MA Experiment 20000794 PARAMETER Experiment Name: At_Petals_P Parameter: Age (day) Value: 23-25 days
  misc_feature: MA Experiment 20000794 PARAMETER Experiment Name: At_Petals_P Parameter: Plant Line Value: WS
  misc_feature: MA Experiment 20000794 PARAMETER Experiment Name: At_Petals_P Parameter: Tissue Value: Petals vs. Whole plant
ttcctttctcttcctctctctctctcttcaccatgactgatccttattccaatttcttcacagactggttcaagtctaatccttttcaccattaccctaattcctccactaacccctctcctcatcctcttcctcctgttactcctccctcttccttcttcttcttccctcaatccggagacctccgccgtccaccgccgccaccaactcctcctccttctcctcctctccgagaagccctccctctcctcagcctcagccccgccaacaaacaacaagaccaccatcacaaccatgaccaccttattcaagaaccaccttcaacctccatggatgtcgactacgatcatcaccatcaagatgatcatcataacctcgatgacgatgaccatgacgtcaccgttgctcttcacataggccttccaagccctagtgctcaagagatggcctctttgctcatgatgtcttcttcttcctcttcctcgaggaccactcatcatcacgaggacatgaatcacaagaaagacctcgaccatgagtacagccacggagctgtcggaggaggagaagatgacgatgaagattcagtcggcggagacggcggctgtagaatcagcagactcaacaagggtcaatattggatccctacaccttctcagattctcattggccctactcagttctcatgtcctgtttgcttcaaaaccttcaacagatacaataacatgcagatgcatatgtggggacatggatcacaatacagaaaaggacctgaatctctaaggggaacacaaccaacaggaatgctaaggcttccgtgctattgctgcgccccaggctgtcgcaacaacattgaccatccaagggcaaagcctctcaaagacttcagaacccttcaaacacattacaagagaaaacatgggatcaaacctttcatgtgtaggaaatgtggaaaggctttcgcagtccgaggggactggagaacacatgagaagaattgtggcaaactttggtattgcatatgtggatctgatttcaagcacaagagatctctcaaagatcacatcaaggcttttgggaatggtcatggagcctacggaattgatgggtttgatgaagaagatgagcctgcctctgaggtagaacaattagacaatgatcatgagtcaatgcagtctaaatagcttatatatattactataagtactaagtaattcggtatatatattaattataagaaacctaaatctatggaccaagttttgatggaggtagggcttttcaaactaaaagctatatcatctaattgatcataggaaaaaaatgaatcaagagcacttggaaaattttaaattgtatctttagcttcctagttaaatttattgcaagacaatgtagcagtctaaccaatgaggttcccaacggtttatttctatttgtatattattttgtcattagcttcacctttcgttaattcgaaggacataacttataaatgtttaaattatg

SEQ ID NO: 43467 - protein, 393 aa, Arabidopsis thaliana
  peptide (1)..(393): Ceres Seq. ID no. 13646987
  misc_feature (227)..(249): Pfam Name: Zinc finger, C2H2 type Pfam Description: Zinc finger, C2H2 type
  misc_feature (227)..(249): Pfam Name: Zinc finger, C2H2 type Pfam Description: Zinc finger, C2H2 type
  misc_feature (134)..(362): Homolog of NCBI NO: 34908460 NR Description: P0683F02.21 [Oryza sativa (japonica
  misc_feature (103)..(375): Homolog of NCBI NO: 15223175 NR Description: WIP3 protein [Arabidopsis thaliana]
  misc_feature (199)..(383): Homolog of NCBI NO: 30693123 NR Description: transparent testa 1 (TT1) protein [Arabidopsis
  misc_feature (199)..(381): Homolog of NCBI NO: 18253283 NR Description: transparent testa 1 [Arabidopsis thaliana]
  misc_feature (152)..(388): Homolog of NCBI NO: 15222242 NR Description: zinc finger protein -related [Arabidopsis
  misc_feature (134)..(362): Homolog of NCBI NO: 34908460 NR Description: P0683F02.21 [Oryza sativa (japonica
  misc_feature (199)..(383): Homolog of NCBI NO: 30693123 NR Description: transparent testa 1 (TT1) protein [Arabidopsis
  misc_feature (152)..(388): Homolog of NCBI NO: 15222242 NR Description: zinc finger protein -related [Arabidopsis
  misc_feature (11)..(393): Homolog of NCBI NO: 15230370 NR Description: zinc finger - like protein [Arabidopsis thaliana]
  misc_feature (11)..(393): Homolog of NCBI NO: 28973719 NR Description: putative zinc finger protein [Arabidopsis
  misc_feature (126)..(382): Homolog of NCBI NO: 9294415 NR Description: zinc finger-like protein [Arabidopsis thaliana]
  misc_feature (126)..(382): Homolog of NCBI NO: 30685975 NR Description: DNA-binding protein -related [Arabidopsis
  misc_feature (116)..(382): Homolog of NCBI NO: 15223781 NR Description: expressed protein [Arabidopsis thaliana]
  misc_feature (199)..(381): Homolog of NCBI NO: 18253283 NR Description: transparent testa 1 [Arabidopsis thaliana]
  misc_feature (103)..(375): Homolog of NCBI NO: 15223175 NR Description: WIP3 protein [Arabidopsis thaliana]
  misc_feature (116)..(382): Homolog of NCBI NO: 15223781 NR Description: expressed protein [Arabidopsis thaliana]
  misc_feature (126)..(382): Homolog of NCBI NO: 30685975 NR Description: DNA-binding protein -related [Arabidopsis
  misc_feature (126)..(382): Homolog of NCBI NO: 9294415 NR Description: zinc finger-like protein [Arabidopsis thaliana]
  misc_feature (11)..(393): Homolog of NCBI NO: 28973719 NR Description: putative zinc finger protein [Arabidopsis
  misc_feature (11)..(393): Homolog of NCBI NO: 15230370 NR Description: zinc finger - like protein [Arabidopsis thaliana]
PFSSSLSLFTMTDPYSNFFTDWFKSNPFHHYPNSSTNPSPHPLPPVTPPSSFFFFPQSGDLRRPPPPPTPPPSPPLREALPLLSLSPANKQQDHHHNHDHLIQEPPSTSMDVDYDHHHQDDHHNLDDDDHDVTVALHIGLPSPSAQEMASLLMMSSSSSSSRTTHHHEDMNHKKDLDHEYSHGAVGGGEDDDEDSVGGDGGCRISRLNKGQYWIPTPSQILIGPTQFSCPVCFKTFNRYNNMQMHMWGHGSQYRKGPESLRGTQPTGMLRLPCYCCAPGCRNNIDHPRAKPLKDFRTLQTHYKRKHGIKPFMCRKCGKAFAVRGDWRTHEKNCGKLWYCICGSDFKHKRSLKDHIKAFGNGHGAYGIDGFDEEDEPASEVEQLDNDHESMQSK

SEQ ID NO: 43468 - protein, 383 aa, Arabidopsis thaliana
  peptide (1)..(383): Ceres Seq. ID no. 13646988
  misc_feature (217)..(239): Pfam Name: Zinc finger, C2H2 type Pfam Description: Zinc finger, C2H2 type
  misc_feature (217)..(239): Pfam Name: Zinc finger, C2H2 type Pfam Description: Zinc finger, C2H2 type
  misc_feature (124)..(352): Homolog of NCBI NO: 34908460 NR Description: P0683F02.21 [Oryza sativa (japonica
  misc_feature (93)..(365): Homolog of NCBI NO: 15223175 NR Description: WIP3 protein [Arabidopsis thaliana]
  misc_feature (189)..(373): Homolog of NCBI NO: 30693123 NR Description: transparent testa 1 (TT1) protein [Arabidopsis
  misc_feature (189)..(371): Homolog of NCBI NO: 18253283 NR Description: transparent testa 1 [Arabidopsis thaliana]
  misc_feature (142)..(378): Homolog of NCBI NO: 15222242 NR Description: zinc finger protein -related [Arabidopsis
  misc_feature (124)..(352): Homolog of NCBI NO: 34908460 NR Description: P0683F02.21 [Oryza sativa (japonica
  misc_feature (189)..(373): Homolog of NCBI NO: 30693123 NR Description: transparent testa 1 (TT1) protein [Arabidopsis
  misc_feature (142)..(378): Homolog of NCBI NO: 15222242 NR Description: zinc finger protein -related [Arabidopsis
  misc_feature (1)..(383): Homolog of NCBI NO: 15230370 NR Description: zinc finger - like protein [Arabidopsis thaliana]
  misc_feature (1)..(383): Homolog of NCBI NO: 28973719 NR Description: putative zinc finger protein [Arabidopsis
  misc_feature (116)..(372): Homolog of NCBI NO: 9294415 NR Description: zinc finger-like protein [Arabidopsis thaliana]
  misc_feature (116)..(372): Homolog of NCBI NO: 30685975 NR Description: DNA-binding protein -related [Arabidopsis
  misc_feature (106)..(372): Homolog of NCBI NO: 15223781 NR Description: expressed protein [Arabidopsis thaliana]
  misc_feature (189)..(371): Homolog of NCBI NO: 18253283 NR Description: transparent testa 1 [Arabidopsis thaliana]
  misc_feature (93)..(365): Homolog of NCBI NO: 15223175 NR Description: WIP3 protein [Arabidopsis thaliana]
  misc_feature (106)..(372): Homolog of NCBI NO: 15223781 NR Description: expressed protein [Arabidopsis thaliana]
  misc_feature (116)..(372): Homolog of NCBI NO: 30685975 NR Description: DNA-binding protein -related [Arabidopsis
  misc_feature (116)..(372): Homolog of NCBI NO: 9294415 NR Description: zinc finger-like protein [Arabidopsis thaliana]
  misc_feature (1)..(383): Homolog of NCBI NO: 28973719 NR Description: putative zinc finger protein [Arabidopsis
  misc_feature (1)..(383): Homolog of NCBI NO: 15230370 NR Description: zinc finger - like protein [Arabidopsis thaliana]
MTDPYSNFFTDWFKSNPFHHYPNSSTNPSPHPLPPVTPPSSFFFFPQSGDLRRPPPPPTPPPSPPLREALPLLSLSPANKQQDHHHNHDHLIQEPPSTSMDVDYDHHHQDDHHNLDDDDHDVTVALHIGLPSPSAQEMASLLMMSSSSSSSRTTHHHEDMNHKKDLDHEYSHGAVGGGEDDDEDSVGGDGGCRISRLNKGQYWIPTPSQILIGPTQFSCPVCFKTFNRYNNMQMHMWGHGSQYRKGPESLRGTQPTGMLRLPCYCCAPGCRNNIDHPRAKPLKDFRTLQTHYKRKHGIKPFMCRKCGKAFAVRGDWRTHEKNCGKLWYCICGSDFKHKRSLKDHIKAFGNGHGAYGIDGFDEEDEPASEVEQLDNDHESMQSK

SEQ ID NO: 43469 - protein, 284 aa, Arabidopsis thaliana
  peptide (1)..(284): Ceres Seq. ID no. 13646989
  misc_feature (118)..(140): Pfam Name: Zinc finger, C2H2 type Pfam Description: Zinc finger, C2H2 type
  misc_feature (118)..(140): Pfam Name: Zinc finger, C2H2 type Pfam Description: Zinc finger, C2H2 type
  misc_feature (25)..(253): Homolog of NCBI NO: 34908460 NR Description: P0683F02.21 [Oryza sativa (japonica
  misc_feature (1)..(266): Homolog of NCBI NO: 15223175 NR Description: WIP3 protein [Arabidopsis thaliana]
  misc_feature (90)..(274): Homolog of NCBI NO: 30693123 NR Description: transparent testa 1 (TT1) protein [Arabidopsis
  misc_feature (90)..(272): Homolog of NCBI NO: 18253283 NR Description: transparent testa 1 [Arabidopsis thaliana]
  misc_feature (43)..(279): Homolog of NCBI NO: 15222242 NR Description: zinc finger protein -related [Arabidopsis
  misc_feature (25)..(253): Homolog of NCBI NO: 34908460 NR Description: P0683F02.21 [Oryza sativa (japonica
  misc_feature (90)..(274): Homolog of NCBI NO: 30693123 NR Description: transparent testa 1 (TT1) protein [Arabidopsis
  misc_feature (43)..(279): Homolog of NCBI NO: 15222242 NR Description: zinc finger protein -related [Arabidopsis
  misc_feature (1)..(284): Homolog of NCBI NO: 15230370 NR Description: zinc finger - like protein [Arabidopsis thaliana]
  misc_feature (1)..(284): Homolog of NCBI NO: 28973719 NR Description: putative zinc finger protein [Arabidopsis
  misc_feature (17)..(273): Homolog of NCBI NO: 9294415 NR Description: zinc finger-like protein [Arabidopsis thaliana]
  misc_feature (17)..(273): Homolog of NCBI NO: 30685975 NR Description: DNA-binding protein -related [Arabidopsis
  misc_feature (7)..(273): Homolog of NCBI NO: 15223781 NR Description: expressed protein [Arabidopsis thaliana]
  misc_feature (90)..(272): Homolog of NCBI NO: 18253283 NR Description: transparent testa 1 [Arabidopsis thaliana]
  misc_feature (1)..(266): Homolog of NCBI NO: 15223175 NR Description: WIP3 protein [Arabidopsis thaliana]
  misc_feature (7)..(273): Homolog of NCBI NO: 15223781 NR Description: expressed protein [Arabidopsis thaliana]
  misc_feature (17)..(273): Homolog of NCBI NO: 30685975 NR Description: DNA-binding protein -related [Arabidopsis
  misc_feature (17)..(273): Homolog of NCBI NO: 9294415 NR Description: zinc finger-like protein [Arabidopsis thaliana]
  misc_feature (1)..(284): Homolog of NCBI NO: 28973719 NR Description: putative zinc finger protein [Arabidopsis
  misc_feature (1)..(284): Homolog of NCBI NO: 15230370 NR Description: zinc finger - like protein [Arabidopsis thaliana]
MDVDYDHHHQDDHHNLDDDDHDVTVALHIGLPSPSAQEMASLLMMSSSSSSSRTTHHHEDMNHKKDLDHEYSHGAVGGGEDDDEDSVGGDGGCRISRLNKGQYWIPTPSQILIGPTQFSCPVCFKTFNRYNNMQMHMWGHGSQYRKGPESLRGTQPTGMLRLPCYCCAPGCRNNIDHPRAKPLKDFRTLQTHYKRKHGIKPFMCRKCGKAFAVRGDWRTHEKNCGKLWYCICGSDFKHKRSLKDHIKAFGNGHGAYGIDGFDEEDEPASEVEQLDNDHESMQSK

SEQ ID NO: 43470 - DNA, 1403 bp, Arabidopsis thaliana
  misc_feature (1)..(1403): Ceres Seq. ID no. 13504828
  misc_feature: MA Experiment ID: 108462 Result: Down-regulated in Transcription
  misc_feature: MA Experiment 108462 PARAMETER Experiment Name: At_Germinating_Seeds_cDNA_P Parameter: Age (day) Value: 2 vs. 0
  misc_feature: MA Experiment 108462 PARAMETER Experiment Name: At_Germinating_Seeds_cDNA_P Parameter: Tissue Value: Germinating Seeds
  misc_feature: MA Experiment ID: 108463 Result: Down-regulated in Transcription
  misc_feature: MA Experiment 108463 PARAMETER Experiment Name: At_Germinating_Seeds_cDNA_P Parameter: Age (day) Value: 3 vs. 0
  misc_feature: MA Experiment 108463 PARAMETER Experiment Name: At_Germinating_Seeds_cDNA_P Parameter: Tissue Value: Germinating Seeds
  misc_feature: MA Experiment ID: 108464 Result: Down-regulated in Transcription
  misc_feature: MA Experiment 108464 PARAMETER Experiment Name: At_Germinating_Seeds_cDNA_P Parameter: Age (day) Value: 4 vs. 0
  misc_feature: MA Experiment 108464 PARAMETER Experiment Name: At_Germinating_Seeds_cDNA_P Parameter: Tissue Value: Germinating Seeds
  misc_feature: MA Experiment ID: 108573 Result: Up-regulated in Transcription
  misc_feature: MA Experiment 108573 PARAMETER Experiment Name: At_Drought_cDNA_P Parameter: Timepoint (hr) Value: 6
  misc_feature: MA Experiment 108573 PARAMETER Experiment Name: At_Drought_cDNA_P Parameter: Tissue Value: Aerial
  misc_feature: MA Experiment 108573 PARAMETER Experiment Name: At_Drought_cDNA_P Parameter: Treatment Value: Drought vs. No Drought
  misc_feature: MA Experiment ID: 108577 Result: Down-regulated in Transcription
  misc_feature: MA Experiment 108577 PARAMETER Experiment Name: At_42deg_Heat_cDNA_P Parameter: Temperature (deg C) Value: 42 vs. 22
  misc_feature: MA Experiment 108577 PARAMETER Experiment Name: At_42deg_Heat_cDNA_P Parameter: Timepoint (hr) Value: 6
  misc_feature: MA Experiment 108577 PARAMETER Experiment Name: At_42deg_Heat_cDNA_P Parameter: Tissue Value: Aerial
  misc_feature: MA Experiment ID: 20000111 Result: Down-regulated in Transcription
  misc_feature: MA Experiment 20000111 PARAMETER Experiment Name: At_42deg_Heat_cDNA_P Parameter: Temperature (deg C) Value: 42 vs. 22
  misc_feature: MA Experiment 20000111 PARAMETER Experiment Name: At_42deg_Heat_cDNA_P Parameter: Timepoint (hr) Value: 6
  misc_feature: MA Experiment 20000111 PARAMETER Experiment Name: At_42deg_Heat_cDNA_P Parameter: Tissue Value: Aerial
  misc_feature: MA Experiment ID: 20000113 Result: Down-regulated in Transcription
  misc_feature: MA Experiment 20000113 PARAMETER Experiment Name: At_42deg_Heat_cDNA_P Parameter: Temperature (deg C) Value: 42 vs. 22
  misc_feature: MA Experiment 20000113 PARAMETER Experiment Name: At_42deg_Heat_cDNA_P Parameter: Timepoint (hr) Value: 8
  misc_feature: MA Experiment 20000113 PARAMETER Experiment Name: At_42deg_Heat_cDNA_P Parameter: Tissue Value: Aerial
aaagaaacaaaacccatacaaaaaaagtcgaatccaaatctctctctccggcgatctcatccatggcggaaggcggcgaagattcccagcggttgaagaaaattgcggcggctgccttcgactacgaaaacgacgctcgatgggccgattactggtccaatatcctcatccctcctcacatggcttctcgtcccgaggtcgtcgaccatttcaagcgcaaattctaccaacgctacatcgatcctgatcttgttgtggagcctatgtcgacttcatcttcgtcttcacaatctgccaggccaactgctacatctgcatcttcaactgcatcttctaatgcaaatgaacaagttcgttcacggaactcaggatcggttcctcgaacctctgggccatctgctacgactggtgcaaccccaagttcaatgcgctgggatgagcagacgattcagttttcagtcaatgcttgggtttttgttatagctgtgctggcagtgctacctctaataccaaagaacctctcaaatagggcttatcgtctatctttcatgggaactgcatgctcatctctatattccttatactccttatacgggaggccaagggcatggaatatgcaagggctgcaagtttattttcaatcaattgtggcagcaaaggatttcatctacttcatctactgccttacattcgtcacttcacatctctgtctcaagtttgctttgattcccatcttgtgccgggcacttgaacaagtagccaagttcttgaggcgtaactttggtcggtccactatatacagaaagtacttggaagacccttgtgtgtgggtggagtcaaacactactaccctcaacatcttgtcatcgcaggctgagatagccattggcttccttctgattatctctctgctctcatggcaacgtaacattatacagacgttcatgtactggcagctattgaagctgatgtatcaagcaccggtaacagctggttaccaccagagcacgtggagcagaatagggaggacggtgactccgattatccaacgttacgctcctttcttgaatactccggtcagtgccgttcagagatggtggttcaggtgataaaaagaaacaaaatgcagaggtgacttttgaaacccttttgaaaaaccagaagattgattaaatagctttcaacaatccatgttaatttcatattcagcgtaaagtagattcttcttctcttttaacgttttcctttggctatcgctgaaataaaaatctcttattacttttggtttctagtttagttatatgtgactaattgcctttccagtttccaccttgccattttcattggtgagatacttcaaaagtttctaaaaaaataataataataatattttattatgattt

SEQ ID NO: 43471 - protein, 368 aa, Arabidopsis thaliana
  peptide (1)..(368): Ceres Seq. ID no. 13504829
  misc_feature (109)..(197): Homolog of NCBI NO: 34911634 NR Description: P0039G05.19 [Oryza sativa (japonica
  misc_feature (24)..(238): Homolog of NCBI NO: 34912430 NR Description: P0681B11.19 [Oryza sativa (japonica
  misc_feature (21)..(368): Homolog of NCBI NO: 18396183 NR Description: expressed protein [Arabidopsis thaliana]
RNKTHTKKVESKSLSPAISSMAEGGEDSQRLKKIAAAAFDYENDARWADYWSNILIPPHMASRPEVVDHFKRKFYQRYIDPDLVVEPMSTSSSSSQSARPTATSASSTASSNANEQVRSRNSGSVPRTSGPSATTGATPSSMRWDEQTIQFSVNAWVFVIAVLAVLPLIPKNLSNRAYRLSFMGTACSSLYSLYSLYGRPRAWNMQGLQVYFQSIVAAKDFIYFIYCLTFVTSHLCLKFALIPILCRALEQVAKFLRRNFGRSTIYRKYLEDPCVWVESNTTTLNILSSQAEIAIGFLLIISLLSWQRNIIQTFMYWQLLKLMYQAPVTAGYHQSTWSRIGRTVTPIIQRYAPFLNTPVSAVQRWWFR

SEQ ID NO: 43472 - protein, 348 aa, Arabidopsis thaliana
  peptide (1)..(348): Ceres Seq. ID no. 13504830
  misc_feature (89)..(177): Homolog of NCBI NO: 34911634 NR Description: P0039G05.19 [Oryza sativa (japonica
  misc_feature (4)..(218): Homolog of NCBI NO: 34912430 NR Description: P0681B11.19 [Oryza sativa (japonica
  misc_feature (1)..(348): Homolog of NCBI NO: 18396183 NR Description: expressed protein [Arabidopsis thaliana]
MAEGGEDSQRLKKIAAAAFDYENDARWADYWSNILIPPHMASRPEVVDHFKRKFYQRYIDPDLVVEPMSTSSSSSQSARPTATSASSTASSNANEQVRSRNSGSVPRTSGPSATTGATPSSMRWDEQTIQFSVNAWVFVIAVLAVLPLIPKNLSNRAYRLSFMGTACSSLYSLYSLYGRPRAWNMQGLQVYFQSIVAAKDFIYFIYCLTFVTSHLCLKFALIPILCRALEQVAKFLRRNFGRSTIYRKYLEDPCVWVESNTTTLNILSSQAEIAIGFLLIISLLSWQRNIIQTFMYWQLLKLMYQAPVTAGYHQSTWSRIGRTVTPIIQRYAPFLNTPVSAVQRWWFR

SEQ ID NO: 43473 - protein, 309 aa, Arabidopsis thaliana
  peptide (1)..(309): Ceres Seq. ID no. 13504831
  misc_feature (50)..(138): Homolog of NCBI NO: 34911634 NR Description: P0039G05.19 [Oryza sativa (japonica
  misc_feature (1)..(179): Homolog of NCBI NO: 34912430 NR Description: P0681B11.19 [Oryza sativa (japonica
  misc_feature (1)..(309): Homolog of NCBI NO: 18396183 NR Description: expressed protein [Arabidopsis thaliana]
MASRPEVVDHFKRKFYQRYIDPDLVVEPMSTSSSSSQSARPTATSASSTASSNANEQVRSRNSGSVPRTSGPSATTGATPSSMRWDEQTIQFSVNAWVFVIAVLAVLPLIPKNLSNRAYRLSFMGTACSSLYSLYSLYGRPRAWNMQGLQVYFQSIVAAKDFIYFIYCLTFVTSHLCLKFALIPILCRALEQVAKFLRRNFGRSTIYRKYLEDPCVWVESNTTTLNILSSQAEIAIGFLLIISLLSWQRNIIQTFMYWQLLKLMYQAPVTAGYHQSTWSRIGRTVTPIIQRYAPFLNTPVSAVQRWWFR

SEQ ID NO: 43474 - DNA, 1359 bp, Arabidopsis thaliana
  misc_feature (1)..(1359): Ceres Seq. ID no. 13500042
  misc_feature: MA Experiment ID: 20000314 Result: Down-regulated in Transcription
  misc_feature: MA Experiment 20000314 PARAMETER Experiment Name: At_14day_Shoots-Roots_Sub_P Parameter: Age (day) Value: 14
  misc_feature: MA Experiment 20000314 PARAMETER Experiment Name: At_14day_Shoots-Roots_Sub_P Parameter: Organism Value: A. thaliana
  misc_feature: MA Experiment 20000314 PARAMETER Experiment Name: At_14day_Shoots-Roots_Sub_P Parameter: Plant Line Value: WS
  misc_feature: MA Experiment 20000314 PARAMETER Experiment Name: At_14day_Shoots-Roots_Sub_P Parameter: Tissue Value: Roots vs. Whole Plant
  misc_feature: MA Experiment ID: 20000355 Result: Up-regulated in Transcription
  misc_feature: MA Experiment 20000355 PARAMETER Experiment Name: At_Siliques_Sub_P Parameter: Age (day) Value: 21
  misc_feature: MA Experiment 20000355 PARAMETER Experiment Name: At_Siliques_Sub_P Parameter: Organism Value: A. thaliana
  misc_feature: MA Experiment 20000355 PARAMETER Experiment Name: At_Siliques_Sub_P Parameter: Plant Line Value: WS
  misc_feature: MA Experiment 20000355 PARAMETER Experiment Name: At_Siliques_Sub_P Parameter: Tissue Value: Less Than 5mm Siliques vs. Whole Plant
  misc_feature: MA Experiment ID: 20000440 Result: Up-regulated in Transcription
  misc_feature: MA Experiment 20000440 PARAMETER Experiment Name: At_Closed-Flower__Sub_P Parameter: Tissue Value: Closed Flower vs. Whole Plant
aaaaacgctcgaaagagtttaaaaattgtgaacatattgtgatgaatcatcatgagcagtgacttcatacttgatattacgagtgagaggccactataaaaagcaggcgcgtcctcgaagaagaagaagaagtaacaaattggtggaaatcagaagttgaatcggagaataacaacgatgacgacgaacaagcaggtcatattcaaagaccacgtgagtggtttccctaaggaatccgatttcaatttcaccaccaccaccgtcgaacttagggttccggaaggttctaaatcggttcttgtgaagaatctctacctgtcatgcgatccttatatgcggtctcgcatggggaaacctgatccctcctctgctcttgctcaagcttacgctcccggcaagccaatctatgggtatggagtgtctagagtgatagaatctgggcatccagattacaagaaaggtgatttactctggggaatagttggatgggaggagtatagtgttattacaccaatggctcacatgcatttcaagatccaacatacagatgttccattatcctactatactggacttctcggtatgcctggtatgactgcctatgctgggttttatgaagtttgttctccaaagaaaggagagacagtttatgtgtcagctgcatctggtgcggttggtcagcttgtgggacaatttgctaagatgatgggctgttatgttgttggaagcgctggaagtaaagaaaaggttgatctcctgaagaccaagtttgggtttgatgatgcatttaactacaaggaagaatctgaccttagtgctgccctcaaaaggtgttttcccaagggcatcgacatgtactttgagaacgtaggaggcaaaatgctagatgcagtgctcttaaacatgaacccacacgggcgtatcgctgtctgtggaatgatctcacagtacaatcttgaaaatcaagaaggtgtacacaacctatccaatatcatctacaaacgaatacgcattcaaggctttgtagtggctgatttctacgacaaatacccaaagttcttggagttggtgcttccgcgcattaaagaagggaagataacgtatgtggaagatgtagctgatgggctcgagaaagctcctgaagctcttgtggggcttttccatggtaagaacgttgggaaacaagttgttgttattgctcgtgagtgaagaatacttatttgggagtaatgtcttattgcgcgtgagtgaagaatacttatttgggagaaatgttatatttatccaacaagagttggtatgtctgttgaacccaaccgtgagtttttggtttatgaataatactagtaactataatat

SEQ ID NO: 43475 - protein, 343 aa, Arabidopsis thaliana
  peptide (1)..(343): Ceres Seq. ID no. 13500043
  misc_feature (132)..(340): Pfam Name: Zinc-binding dehydrogenase Pfam Description: Zinc-binding dehydrogenase
  misc_feature (1)..(343): Homolog of NCBI NO: 21593645 NR Description: allyl alcohol dehydrogenase, putative
  misc_feature (4)..(343): Homolog of NCBI NO: 15228456 NR Description: NADP-dependent oxidoreductase (P2), putative
  misc_feature (1)..(343): Homolog of NCBI NO: 11358742 NR Description: quinone oxidoreductase-like protein - Arabidopsis
  misc_feature (1)..(343): Homolog of NCBI NO: 21539447 NR Description: quinone oxidoreductase-like protein [Arabidopsis
  misc_feature (1)..(343): Homolog of NCBI NO: 17529140 NR Description: putative quinone oxidoreductase [Arabidopsis
  misc_feature (1)..(343): Homolog of NCBI NO: 22326861 NR Description: NADP-dependent oxidoreductase, putative
  misc_feature (1)..(343): Homolog of NCBI NO: 15237888 NR Description: NADP-dependent oxidoreductase (P1), putative
  misc_feature (1)..(343): Homolog of NCBI NO: 1362014 NR Description: probable NADPH2:quinone reductase (EC 1.6.5.5) P2
  misc_feature (1)..(343): Homolog of NCBI NO: 21554121 NR Description: quinone oxidoreductase-like protein [Arabidopsis
  misc_feature (1)..(343): Homolog of NCBI NO: 15237890 NR Description: allyl alcohol dehydrogenase, putative
MTTNKQVIFKDHVSGFPKESDFNFTTTTVELRVPEGSKSVLVKNLYLSCDPYMRSRMGKPDPSSALAQAYAPGKPIYGYGVSRVIESGHPDYKKGDLLWGIVGWEEYSVITPMAHMHFKIQHTDVPLSYYTGLLGMPGMTAYAGFYEVCSPKKGETVYVSAASGAVGQLVGQFAKMMGCYVVGSAGSKEKVDLLKTKFGFDDAFNYKEESDLSAALKRCFPKGIDMYFENVGGKMLDAVLLNMNPHGRIAVCGMISQYNLENQEGVHNLSNIIYKRIRIQGFVVADFYDKYPKFLELVLPRIKEGKITYVEDVADGLEKAPEALVGLFHGKNVGKQVVVIARE

SEQ ID NO: 43476 - protein, 291 aa, Arabidopsis thaliana
  peptide (1)..(291): Ceres Seq. ID no. 13500044
  misc_feature (80)..(288): Pfam Name: Zinc-binding dehydrogenase Pfam Description: Zinc-binding dehydrogenase
  misc_feature (1)..(291): Homolog of NCBI NO: 21593645 NR Description: allyl alcohol dehydrogenase, putative
  misc_feature (1)..(291): Homolog of NCBI NO: 15228456 NR Description: NADP-dependent oxidoreductase (P2), putative
  misc_feature (1)..(291): Homolog of NCBI NO: 11358742 NR Description: quinone oxidoreductase-like protein - Arabidopsis
  misc_feature (1)..(291): Homolog of NCBI NO: 21539447 NR Description: quinone oxidoreductase-like protein [Arabidopsis
  misc_feature (1)..(291): Homolog of NCBI NO: 17529140 NR Description: putative quinone oxidoreductase [Arabidopsis
  misc_feature (1)..(291): Homolog of NCBI NO: 22326861 NR Description: NADP-dependent oxidoreductase, putative
  misc_feature (1)..(291): Homolog of NCBI NO: 15237888 NR Description: NADP-dependent oxidoreductase (P1), putative
  misc_feature (1)..(291): Homolog of NCBI NO: 1362014 NR Description: probable NADPH2:quinone reductase (EC 1.6.5.5) P2
  misc_feature (1)..(291): Homolog of NCBI NO: 21554121 NR Description: quinone oxidoreductase-like protein [Arabidopsis
  misc_feature (1)..(291): Homolog of NCBI NO: 15237890 NR Description: allyl alcohol dehydrogenase, putative
MRSRMGKPDPSSALAQAYAPGKPIYGYGVSRVIESGHPDYKKGDLLWGIVGWEEYSVITPMAHMHFKIQHTDVPLSYYTGLLGMPGMTAYAGFYEVCSPKKGETVYVSAASGAVGQLVGQFAKMMGCYVVGSAGSKEKVDLLKTKFGFDDAFNYKEESDLSAALKRCFPKGIDMYFENVGGKMLDAVLLNMNPHGRIAVCGMISQYNLENQEGVHNLSNIIYKRIRIQGFVVADFYDKYPKFLELVLPRIKEGKITYVEDVADGLEKAPEALVGLFHGKNVGKQVVVIARE

SEQ ID NO: 43477 - protein, 287 aa, Arabidopsis thaliana
  peptide (1)..(287): Ceres Seq. ID no. 13500045
  misc_feature (76)..(284): Pfam Name: Zinc-binding dehydrogenase Pfam Description: Zinc-binding dehydrogenase
  misc_feature (1)..(287): Homolog of NCBI NO: 21593645 NR Description: allyl alcohol dehydrogenase, putative
  misc_feature (1)..(287): Homolog of NCBI NO: 15228456 NR Description: NADP-dependent oxidoreductase (P2), putative
  misc_feature (1)..(287): Homolog of NCBI NO: 11358742 NR Description: quinone oxidoreductase-like protein - Arabidopsis
  misc_feature (1)..(287): Homolog of NCBI NO: 21539447 NR Description: quinone oxidoreductase-like protein [Arabidopsis
  misc_feature (1)..(287): Homolog of NCBI NO: 17529140 NR Description: putative quinone oxidoreductase [Arabidopsis
  misc_feature (1)..(287): Homolog of NCBI NO: 22326861 NR Description: NADP-dependent oxidoreductase, putative
  misc_feature (1)..(287): Homolog of NCBI NO: 15237888 NR Description: NADP-dependent oxidoreductase (P1), putative
  misc_feature (1)..(287): Homolog of NCBI NO: 1362014 NR Description: probable NADPH2:quinone reductase (EC 1.6.5.5) P2
  misc_feature (1)..(287): Homolog of NCBI NO: 21554121 NR Description: quinone oxidoreductase-like protein [Arabidopsis
  misc_feature (1)..(287): Homolog of NCBI NO: 15237890 NR Description: allyl alcohol dehydrogenase, putative
MGKPDPSSALAQAYAPGKPIYGYGVSRVIESGHPDYKKGDLLWGIVGWEEYSVITPMAHMHFKIQHTDVPLSYYTGLLGMPGMTAYAGFYEVCSPKKGETVYVSAASGAVGQLVGQFAKMMGCYVVGSAGSKEKVDLLKTKFGFDDAFNYKEESDLSAALKRCFPKGIDMYFENVGGKMLDAVLLNMNPHGRIAVCGMISQYNLENQEGVHNLSNIIYKRIRIQGFVVADFYDKYPKFLELVLPRIKEGKITYVEDVADGLEKAPEALVGLFHGKNVGKQVVVIARE

SEQ ID NO: 43478 - DNA, 1490 bp, Arabidopsis thaliana
  misc_feature (1)..(1490): Ceres Seq. ID no. 13489567
  misc_feature: MA Experiment ID: 108434 Result: Up-regulated in Transcription
  misc_feature: MA Experiment 108434 PARAMETER Experiment Name: At_Root_Tips_cDNA_P Parameter: Tissue Value: Root Tips
  misc_feature: MA Experiment ID: 108461 Result: Down-regulated in Transcription
  misc_feature: MA Experiment 108461 PARAMETER Experiment Name: At_Germinating_Seeds_cDNA_P Parameter: Age (day) Value: 1 vs. 0
  misc_feature: MA Experiment 108461 PARAMETER Experiment Name: At_Germinating_Seeds_cDNA_P Parameter: Tissue Value: Germinating Seeds
  misc_feature: MA Experiment ID: 108462 Result: Down-regulated in Transcription
  misc_feature: MA Experiment 108462 PARAMETER Experiment Name: At_Germinating_Seeds_cDNA_P Parameter: Age (day) Value: 2 vs. 0
  misc_feature: MA Experiment 108462 PARAMETER Experiment Name: At_Germinating_Seeds_cDNA_P Parameter: Tissue Value: Germinating Seeds
  misc_feature: MA Experiment ID: 108463 Result: Down-regulated in Transcription
  misc_feature: MA Experiment 108463 PARAMETER Experiment Name: At_Germinating_Seeds_cDNA_P Parameter: Age (day) Value: 3 vs. 0
  misc_feature: MA Experiment 108463 PARAMETER Experiment Name: At_Germinating_Seeds_cDNA_P Parameter: Tissue Value: Germinating Seeds
  misc_feature: MA Experiment ID: 108464 Result: Down-regulated in Transcription
  misc_feature: MA Experiment 108464 PARAMETER Experiment Name: At_Germinating_Seeds_cDNA_P Parameter: Age (day) Value: 4 vs. 0
  misc_feature: MA Experiment 108464 PARAMETER Experiment Name: At_Germinating_Seeds_cDNA_P Parameter: Tissue Value: Germinating Seeds
  misc_feature: MA Experiment ID: 108469 Result: Down-regulated in Transcription
  misc_feature: MA Experiment ID: 108489 Result: Up-regulated in Transcription
  misc_feature: MA Experiment ID: 108579 Result: Up-regulated in Transcription
  misc_feature: MA Experiment 108579 PARAMETER Experiment Name: At_4deg_Cold_cDNA_P Parameter: Temperature (deg C) Value: 4 vs. 22
  misc_feature: MA Experiment 108579 PARAMETER Experiment Name: At_4deg_Cold_cDNA_P Parameter: Timepoint (hr) Value: 6
  misc_feature: MA Experiment 108579 PARAMETER Experiment Name: At_4deg_Cold_cDNA_P Parameter: Tissue Value: Aerial
  misc_feature: MA Experiment ID: 108585 Result: Up-regulated in Transcription
  misc_feature: MA Experiment 108585 PARAMETER Experiment Name: At_5mM_NaNP_cDNA_P Parameter: Timepoint (hr) Value: 6
  misc_feature: MA Experiment 108585 PARAMETER Experiment Name: At_5mM_NaNP_cDNA_P Parameter: Tissue Value: Aerial
  misc_feature: MA Experiment 108585 PARAMETER Experiment Name: At_5mM_NaNP_cDNA_P Parameter: Treatment Value: null
  misc_feature: MA Experiment ID: 108594 Result: Down-regulated in Transcription
  misc_feature: MA Experiment 108594 PARAMETER Experiment Name: At_Ler-rhl_Root_cDNA_P Parameter: Plant Line Value: null
  misc_feature: MA Experiment ID: 20000069 Result: Up-regulated in Transcription
  misc_feature: MA Experiment 20000069 PARAMETER Experiment Name: At_100uM_ABA_Mutants_cDNA_P Parameter: Plant Line Value: CS23
  misc_feature: MA Experiment 20000069 PARAMETER Experiment Name: At_100uM_ABA_Mutants_cDNA_P Parameter: Timepoint (hr) Value: 6
  misc_feature: MA Experiment 20000069 PARAMETER Experiment Name: At_100uM_ABA_Mutants_cDNA_P Parameter: Tissue Value: Aerial
  misc_feature: MA Experiment 20000069 PARAMETER Experiment Name: At_100uM_ABA_Mutants_cDNA_P Parameter: Treatment Value: 100uM ABA vs. No Treatment
  misc_feature: MA Experiment ID: 20000070 Result: Up-regulated in Transcription
  misc_feature: MA Experiment 20000070 PARAMETER Experiment Name: At_100uM_ABA_Mutants_cDNA_P Parameter: Plant Line Value: CS24
  misc_feature: MA Experiment 20000070 PARAMETER Experiment Name: At_100uM_ABA_Mutants_cDNA_P Parameter: Timepoint (hr) Value: 6
  misc_feature: MA Experiment 20000070 PARAMETER Experiment Name: At_100uM_ABA_Mutants_cDNA_P Parameter: Tissue Value: Aerial
  misc_feature: MA Experiment 20000070 PARAMETER Experiment Name: At_100uM_ABA_Mutants_cDNA_P Parameter: Treatment Value: 100uM ABA vs. No Treatment
  misc_feature: MA Experiment ID: 20000071 Result: Up-regulated in Transcription
  misc_feature: MA Experiment 20000071 PARAMETER Experiment Name: At_100uM_ABA_Mutants_cDNA_P Parameter: Plant Line Value: CS8104
  misc_feature: MA Experiment 20000071 PARAMETER Experiment Name: At_100uM_ABA_Mutants_cDNA_P Parameter: Timepoint (hr) Value: 6
  misc_feature: MA Experiment 20000071 PARAMETER Experiment Name: At_100uM_ABA_Mutants_cDNA_P Parameter: Tissue Value: Aerial
  misc_feature: MA Experiment 20000071 PARAMETER Experiment Name: At_100uM_ABA_Mutants_cDNA_P Parameter: Treatment Value: 100uM ABA vs. No Treatment
  misc_feature: MA Experiment ID: 20000072 Result: Up-regulated in Transcription
  misc_feature: MA Experiment 20000072 PARAMETER Experiment Name: At_100uM_ABA_Mutants_cDNA_P Parameter: Plant Line Value: CS8105
  misc_feature: MA Experiment 20000072 PARAMETER Experiment Name: At_100uM_ABA_Mutants_cDNA_P Parameter: Timepoint (hr) Value: 6
  misc_feature: MA Experiment 20000072 PARAMETER Experiment Name: At_100uM_ABA_Mutants_cDNA_P Parameter: Tissue Value: Aerial
  misc_feature: MA Experiment 20000072 PARAMETER Experiment Name: At_100uM_ABA_Mutants_cDNA_P Parameter: Treatment Value: 100uM ABA vs. No Treatment
  misc_feature: MA Experiment ID: 20000086 Result: Up-regulated in Transcription
  misc_feature: MA Experiment 20000086 PARAMETER Experiment Name: At_100uM_ABA_Mutants_cDNA_P Parameter: Plant Line Value: CS22
  misc_feature: MA Experiment 20000086 PARAMETER Experiment Name: At_100uM_ABA_Mutants_cDNA_P Parameter: Timepoint (hr) Value: 6
  misc_feature: MA Experiment 20000086 PARAMETER Experiment Name: At_100uM_ABA_Mutants_cDNA_P Parameter: Tissue Value: Aerial
  misc_feature: MA Experiment 20000086 PARAMETER Experiment Name: At_100uM_ABA_Mutants_cDNA_P Parameter: Treatment Value: 100uM ABA vs. No Treatment
  misc_feature: MA Experiment ID: 20000087 Result: Up-regulated in Transcription
  misc_feature: MA Experiment 20000087 PARAMETER Experiment Name: At_100uM_ABA_Mutants_cDNA_P Parameter: Plant Line Value: WS
  misc_feature: MA Experiment 20000087 PARAMETER Experiment Name: At_100uM_ABA_Mutants_cDNA_P Parameter: Timepoint (hr) Value: 6
  misc_feature: MA Experiment 20000087 PARAMETER Experiment Name: At_100uM_ABA_Mutants_cDNA_P Parameter: Tissue Value: Aerial
  misc_feature: MA Experiment 20000087 PARAMETER Experiment Name: At_100uM_ABA_Mutants_cDNA_P Parameter: Treatment Value: 100uM ABA vs. No Treatment
  misc_feature: MA Experiment ID: 20000117 Result: Up-regulated in Transcription
  misc_feature: MA Experiment 20000117 PARAMETER Experiment Name: At_100uM_ABA_Mutants_cDNA_P Parameter: Plant Line Value: Columbia
  misc_feature: MA Experiment 20000117 PARAMETER Experiment Name: At_100uM_ABA_Mutants_cDNA_P Parameter: Timepoint (hr) Value: 6
  misc_feature: MA Experiment 20000117 PARAMETER Experiment Name: At_100uM_ABA_Mutants_cDNA_P Parameter: Tissue Value: Aerial
  misc_feature: MA Experiment 20000117 PARAMETER Experiment Name: At_100uM_ABA_Mutants_cDNA_P Parameter: Treatment Value: 100uM ABA vs. No Treatment
  misc_feature: MA Experiment ID: 20000179 Result: Down-regulated in Transcription
  misc_feature: MA Experiment 20000179 PARAMETER Experiment Name: At_Germinating_Seeds_P Parameter: Age (hr) Value: 6 vs. 0
  misc_feature: MA Experiment 20000179 PARAMETER Experiment Name: At_Germinating_Seeds_P Parameter: Tissue Value: Germinating Seeds
  misc_feature: MA Experiment ID: 20000180 Result: Down-regulated in Transcription
  misc_feature: MA Experiment 20000180 PARAMETER Experiment Name: At_Germinating_Seeds_P Parameter: Age (hr) Value: 24 vs. 0
  misc_feature: MA Experiment 20000180 PARAMETER Experiment Name: At_Germinating_Seeds_P Parameter: Tissue Value: Germinating Seeds
  misc_feature: MA Experiment ID: 20000185 Result: Up-regulated in Transcription
  misc_feature: MA Experiment 20000185 PARAMETER Experiment Name: At_Roots__P Parameter: Age (day) Value: 7 vs. 21
  misc_feature: MA Experiment 20000185 PARAMETER Experiment Name: At_Roots__P Parameter: Organism Value: A. thaliana
  misc_feature: MA Experiment 20000185 PARAMETER Experiment Name: At_Roots__P Parameter: Tissue Value: Roots vs. Whole Plant
  misc_feature: MA Experiment ID: 20000227 Result: Up-regulated in Transcription
  misc_feature: MA Experiment 20000227 PARAMETER Experiment Name: At_Root-Tips-vs-Tops_P Parameter: Tissue Value: Root Tips vs. Root Tops
  misc_feature: MA Experiment ID: 20000234 Result: Up-regulated in Transcription
  misc_feature: MA Experiment 20000234 PARAMETER Experiment Name: At_Siliques_P Parameter: Age (day) Value: 21
  misc_feature: MA Experiment 20000234 PARAMETER Experiment Name: At_Siliques_P Parameter: Organism Value: A. thaliana
  misc_feature: MA Experiment 20000234 PARAMETER Experiment Name: At_Siliques_P Parameter: Plant Line Value: WS
  misc_feature: MA Experiment 20000234 PARAMETER Experiment Name: At_Siliques_P Parameter: Tissue Value: Less Than 5mm Siliques vs. Whole Plant
  misc_feature: MA Experiment ID: 20000235 Result: Up-regulated in Transcription
  misc_feature: MA Experiment 20000235 PARAMETER Experiment Name: At_Siliques_P Parameter: Age (day) Value: 21
  misc_feature: MA Experiment 20000235 PARAMETER Experiment Name: At_Siliques_P Parameter: Organism Value: A. thaliana
  misc_feature: MA Experiment 20000235 PARAMETER Experiment Name: At_Siliques_P Parameter: Plant Line Value: WS
  misc_feature: MA Experiment 20000235 PARAMETER Experiment Name: At_Siliques_P Parameter: Tissue Value: 5-10mm Siliques vs. Whole Plant
  misc_feature: MA Experiment ID: 20000265 Result: Up-regulated in Transcription
  misc_feature: MA Experiment 20000265 PARAMETER Experiment Name: At_Open_Flower_P Parameter: Age (day) Value: 21
  misc_feature: MA Experiment 20000265 PARAMETER Experiment Name: At_Open_Flower_P Parameter: Plant Line Value: WS
  misc_feature: MA Experiment 20000265 PARAMETER Experiment Name: At_Open_Flower_P Parameter: Tissue Value: Closed Flower vs. Whole Plant
  misc_feature: MA Experiment ID: 20000286 Result: Up-regulated in Transcription
  misc_feature: MA Experiment 20000286 PARAMETER Experiment Name: At_Open_Flower_P Parameter: Age (day) Value: 21
  misc_feature: MA Experiment 20000286 PARAMETER Experiment Name: At_Open_Flower_P Parameter: Plant Line Value: WS
  misc_feature: MA Experiment 20000286 PARAMETER Experiment Name: At_Open_Flower_P Parameter: Tissue Value: Half Open vs. Whole Plant
  misc_feature: MA Experiment ID: 20000439 Result: Up-regulated in Transcription
  misc_feature: MA Experiment 20000439 PARAMETER Experiment Name: At_Roots__P Parameter: Age (day) Value: 14 vs. 21
  misc_feature: MA Experiment 20000439 PARAMETER Experiment Name: At_Roots__P Parameter: Organism Value: A. thaliana
  misc_feature: MA Experiment 20000439 PARAMETER Experiment Name: At_Roots__P Parameter: Tissue Value: Roots vs. Whole Plant
  misc_feature: MA Experiment ID: 20000709 Result: Up-regulated in Transcription
  misc_feature: MA Experiment 20000709 PARAMETER Experiment Name: At_15mM_NH4NO3_L-to-H_P Parameter: Age (hr) Value: 14
  misc_feature: MA Experiment 20000709 PARAMETER Experiment Name: At_15mM_NH4NO3_L-to-H_P Parameter: Organism Value: A. thaliana
  misc_feature: MA Experiment 20000709 PARAMETER Experiment Name: At_15mM_NH4NO3_L-to-H_P Parameter: Plant Line Value: WS
  misc_feature: MA Experiment 20000709 PARAMETER Experiment Name: At_15mM_NH4NO3_L-to-H_P Parameter: Timepoint (hr) Value: 4
  misc_feature: MA Experiment 20000709 PARAMETER Experiment Name: At_15mM_NH4NO3_L-to-H_P Parameter: Tissue Value: Aerial
  misc_feature: MA Experiment 20000709 PARAMETER Experiment Name: At_15mM_NH4NO3_L-to-H_P Parameter: Treatment Value: 15mM NH4NO3 vs. 30mM Mannitol
tccacgttctcagagttagttacacagctttcaacgatgaatcagctcgcgctttcaagatccggttacaccgccgccgtgaggtttctccctatgctttccgcagctgttccgaagatcttatcatctctcgccgccgcatccaccgtccgcaacttcagctctaccggaagtcctctcaccagctaccaaatcaataaaccttcgccgtcaaaatccttcacttccaggcttctccaccaatcctcctccgccggtactcctccgcaacaacttttcggcgcccgtagcttctcatctcccagcagtgatttcaacagctaccacattaatccgccgtctaactggggaatccgaatcgtgccggagaggaaagcttgtgtgattgagcggtttggtaaattccacacgactttgccggcggggattcacttccttgttccgtttgtggatcgtatcgcttatgttcattctctaaaggaagaagcgattcctattggtaatcagactgcgattacaaaggataacgttagcatccacatcgatggtgttctctacgttaagattgtggatcctaagttggcttcttatggcgttgagaatccgatctatgctgttatgcagttggctcagactacaatgcgtagtgagctcggtaaaattactcttgacaagacttttgaggaacgggacactctcaatgagaagattgtggaagccatcaatgttgctgcaaaagattggggtcttcagtgccttcgttatgagatcagggatatcatgcctcctaatggagtgagagttgctatggaaatgcaagctgaagctgaacgtaaaaagagagcccagattcttgagtctgaaggagaacgtcaagcccatatcaatagagctgatggtaagaaaagttctgtaatcttggaatcagaagctgcaatgatggaccaagtcaatcgtgcacaaggtgaggctgaagcaatattagctagagcacaagcaacagccaagggactggccatggtatctcaatccctcaaggaagctggtggagaggaggctgcgagtttgagagttgcggagcaatacattcaagcttttggcaaaattgctaaggagggtacaacaatgctgcttccgagtaatgtcgacaatcctgctagcatgatcgctcaagctttaggaatgtacaaagggttgtcaacaaaggtcccaacagtggtttcagggaaacttctggagtagaatcctctactaacgtggttgttgccaaacttgaatagaagctataatgtagctgaacctagggaacaactattcttttgatttgtccaggctttttagccattttcagtttgtttatttcttcatatgagaaacagttatcttaccatataaccattttgcaaactagaaaacagatctaatctcaaatttctgacagagtttttgcaccagatttggtcttctaagtgttggctcttgttatcttt

SEQ ID NO: 43479 - protein, 413 aa, Arabidopsis thaliana
  peptide (1)..(413): Ceres Seq. ID no. 13489568
  misc_feature (113)..(404): Homolog of NCBI NO: 7305503 NR Description: stomatin (EPB72)-like 2; stomatin-like 2;
  misc_feature (71)..(409): Homolog of NCBI NO: 31197807 NR Description: ENSANGP00000018661 [Anopheles gambiae]
  misc_feature (118)..(399): Homolog of NCBI NO: 15892375 NR Description: unknown [Rickettsia conorii]
  misc_feature (118)..(401): Homolog of NCBI NO: 15604196 NR Description: unknown [Rickettsia prowazekii]
  misc_feature (113)..(410): Homolog of NCBI NO: 23394406 NR Description: unknown [Phytophthora infestans]
  misc_feature (83)..(413): Homolog of NCBI NO: 7716464 NR Description: stomatin-like protein [Zea mays]
  misc_feature (62)..(405): Homolog of NCBI NO: 18417021 NR Description: expressed protein [Arabidopsis thaliana]
  misc_feature (62)..(405): Homolog of NCBI NO: 7487517 NR Description: hypothetical protein T29A15.70 - Arabidopsis
  misc_feature (13)..(413): Homolog of NCBI NO: 21554125 NR Description: stomatin-like protein [Arabidopsis thaliana]
  misc_feature (13)..(413): Homolog of NCBI NO: 15239547 NR Description: expressed protein [Arabidopsis thaliana]
STFSELVTQLSTMNQLALSRSGYTAAVRFLPMLSAAVPKILSSLAAASTVRNFSSTGSPLTSYQINKPSPSKSFTSRLLHQSSSAGTPPQQLFGARSFSSPSSDFNSYHINPPSNWGIRIVPERKACVIERFGKFHTTLPAGIHFLVPFVDRIAYVHSLKEEAIPIGNQTAITKDNVSIHIDGVLYVKIVDPKLASYGVENPIYAVMQLAQTTMRSELGKITLDKTFEERDTLNEKIVEAINVAAKDWGLQCLRYEIRDIMPPNGVRVAMEMQAEAERKKRAQILESEGERQAHINRADGKKSSVILESEAAMMDQVNRAQGEAEAILARAQATAKGLAMVSQSLKEAGGEEAASLRVAEQYIQAFGKIAKEGTTMLLPSNVDNPASMIAQALGMYKGLSTKVPTVVSGKLLE

SEQ ID NO: 43480 - protein, 401 aa, Arabidopsis thaliana
  peptide (1)..(401): Ceres Seq. ID no. 13489569
  misc_feature (101)..(392): Homolog of NCBI NO: 7305503 NR Description: stomatin (EPB72)-like 2; stomatin-like 2;
  misc_feature (59)..(397): Homolog of NCBI NO: 31197807 NR Description: ENSANGP00000018661 [Anopheles gambiae]
  misc_feature (106)..(387): Homolog of NCBI NO: 15892375 NR Description: unknown [Rickettsia conorii]
  misc_feature (106)..(389): Homolog of NCBI NO: 15604196 NR Description: unknown [Rickettsia prowazekii]
  misc_feature (101)..(398): Homolog of NCBI NO: 23394406 NR Description: unknown [Phytophthora infestans]
  misc_feature (71)..(401): Homolog of NCBI NO: 7716464 NR Description: stomatin-like protein [Zea mays]
  misc_feature (50)..(393): Homolog of NCBI NO: 18417021 NR Description: expressed protein [Arabidopsis thaliana]
  misc_feature (50)..(393): Homolog of NCBI NO: 7487517 NR Description: hypothetical protein T29A15.70 - Arabidopsis
  misc_feature (1)..(401): Homolog of NCBI NO: 21554125 NR Description: stomatin-like protein [Arabidopsis thaliana]
  misc_feature (1)..(401): Homolog of NCBI NO: 15239547 NR Description: expressed protein [Arabidopsis thaliana]
MNQLALSRSGYTAAVRFLPMLSAAVPKILSSLAAASTVRNFSSTGSPLTSYQINKPSPSKSFTSRLLHQSSSAGTPPQQLFGARSFSSPSSDFNSYHINPPSNWGIRIVPERKACVIERFGKFHTTLPAGIHFLVPFVDRIAYVHSLKEEAIPIGNQTAITKDNVSIHIDGVLYVKIVDPKLASYGVENPIYAVMQLAQTTMRSELGKITLDKTFEERDTLNEKIVEAINVAAKDWGLQCLRYEIRDIMPPNGVRVAMEMQAEAERKKRAQILESEGERQAHINRADGKKSSVILESEAAMMDQVNRAQGEAEAILARAQATAKGLAMVSQSLKEAGGEEAASLRVAEQYIQAFGKIAKEGTTMLLPSNVDNPASMIAQALGMYKGLSTKVPTVVSGKLLE

SEQ ID NO: 43481 - protein, 382 aa, Arabidopsis thaliana
  peptide (1)..(382): Ceres Seq. ID no. 13489570
  misc_feature (82)..(373): Homolog of NCBI NO: 7305503 NR Description: stomatin (EPB72)-like 2; stomatin-like 2;
  misc_feature (40)..(378): Homolog of NCBI NO: 31197807 NR Description: ENSANGP00000018661 [Anopheles gambiae]
  misc_feature (87)..(368): Homolog of NCBI NO: 15892375 NR Description: unknown [Rickettsia conorii]
  misc_feature (87)..(370): Homolog of NCBI NO: 15604196 NR Description: unknown [Rickettsia prowazekii]
  misc_feature (82)..(379): Homolog of NCBI NO: 23394406 NR Description: unknown [Phytophthora infestans]
  misc_feature (52)..(382): Homolog of NCBI NO: 7716464 NR Description: stomatin-like protein [Zea mays]
  misc_feature (31)..(374): Homolog of NCBI NO: 18417021 NR Description: expressed protein [Arabidopsis thaliana]
  misc_feature (31)..(374): Homolog of NCBI NO: 7487517 NR Description: hypothetical protein T29A15.70 - Arabidopsis
  misc_feature (1)..(382): Homolog of NCBI NO: 21554125 NR Description: stomatin-like protein [Arabidopsis thaliana]
  misc_feature (1)..(382): Homolog of NCBI NO: 15239547 NR Description: expressed protein [Arabidopsis thaliana]
MLSAAVPKILSSLAAASTVRNFSSTGSPLTSYQINKPSPSKSFTSRLLHQSSSAGTPPQQLFGARSFSSPSSDFNSYHINPPSNWGIRIVPERKACVIERFGKFHTTLPAGIHFLVPFVDRIAYVHSLKEEAIPIGNQTAITKDNVSIHIDGVLYVKIVDPKLASYGVENPIYAVMQLAQTTMRSELGKITLDKTFEERDTLNEKIVEAINVAAKDWGLQCLRYEIRDIMPPNGVRVAMEMQAEAERKKRAQILESEGERQAHINRADGKKSSVILESEAAMMDQVNRAQGEAEAILARAQATAKGLAMVSQSLKEAGGEEAASLRVAEQYIQAFGKIAKEGTTMLLPSNVDNPASMIAQALGMYKGLSTKVPTVVSGKLLE

SEQ ID NO: 43482 - DNA, 1353 bp, Arabidopsis thaliana
  misc_feature (1)..(1353): Ceres Seq. ID no. 12395048
  misc_feature: MA Experiment ID: 108434 Result: Down-regulated in Transcription
  misc_feature: MA Experiment 108434 PARAMETER Experiment Name: At_Root_Tips_cDNA_P Parameter: Tissue Value: Root Tips
  misc_feature: MA Experiment ID: 108464 Result: Up-regulated in Transcription
  misc_feature: MA Experiment 108464 PARAMETER Experiment Name: At_Germinating_Seeds_cDNA_P Parameter: Age (day) Value: 4 vs. 0
  misc_feature: MA Experiment 108464 PARAMETER Experiment Name: At_Germinating_Seeds_cDNA_P Parameter: Tissue Value: Germinating Seeds
  misc_feature: MA Experiment ID: 108577 Result: Down-regulated in Transcription
  misc_feature: MA Experiment 108577 PARAMETER Experiment Name: At_42deg_Heat_cDNA_P Parameter: Temperature (deg C) Value: 42 vs. 22
  misc_feature: MA Experiment 108577 PARAMETER Experiment Name: At_42deg_Heat_cDNA_P Parameter: Timepoint (hr) Value: 6
  misc_feature: MA Experiment 108577 PARAMETER Experiment Name: At_42deg_Heat_cDNA_P Parameter: Tissue Value: Aerial
  misc_feature: MA Experiment ID: 108595 Result: Up-regulated in Transcription
  misc_feature: MA Experiment 108595 PARAMETER Experiment Name: At_Ler-pi_Ovule_cDNA_P Parameter: Plant Line Value: null
  misc_feature: MA Experiment ID: 108605 Result: Up-regulated in Transcription
  misc_feature: MA Experiment 108605 PARAMETER Experiment Name: At_100uM_ABA_cDNA_P Parameter: Timepoint (hr) Value: 6
  misc_feature: MA Experiment 108605 PARAMETER Experiment Name: At_100uM_ABA_cDNA_P Parameter: Tissue Value: Aerial
  misc_feature: MA Experiment 108605 PARAMETER Experiment Name: At_100uM_ABA_cDNA_P Parameter: Treatment Value: 100uM ABA vs. No Treatment
  misc_feature: MA Experiment ID: 108607 Result: Up-regulated in Transcription
  misc_feature: MA Experiment 108607 PARAMETER Experiment Name: At_100uM_ABA_cDNA_P Parameter: Timepoint (hr) Value: 4
  misc_feature: MA Experiment 108607 PARAMETER Experiment Name: At_100uM_ABA_cDNA_P Parameter: Tissue Value: Aerial
  misc_feature: MA Experiment 108607 PARAMETER Experiment Name: At_100uM_ABA_cDNA_P Parameter: Treatment Value: 100uM ABA vs. No Treatment
  misc_feature: MA Experiment ID: 20000069 Result: Up-regulated in Transcription
  misc_feature: MA Experiment 20000069 PARAMETER Experiment Name: At_100uM_ABA_Mutants_cDNA_P Parameter: Plant Line Value: CS23
  misc_feature: MA Experiment 20000069 PARAMETER Experiment Name: At_100uM_ABA_Mutants_cDNA_P Parameter: Timepoint (hr) Value: 6
  misc_feature: MA Experiment 20000069 PARAMETER Experiment Name: At_100uM_ABA_Mutants_cDNA_P Parameter: Tissue Value: Aerial
  misc_feature: MA Experiment 20000069 PARAMETER Experiment Name: At_100uM_ABA_Mutants_cDNA_P Parameter: Treatment Value: 100uM ABA vs. No Treatment
  misc_feature: MA Experiment ID: 20000070 Result: Up-regulated in Transcription
  misc_feature: MA Experiment 20000070 PARAMETER Experiment Name: At_100uM_ABA_Mutants_cDNA_P Parameter: Plant Line Value: CS24
  misc_feature: MA Experiment 20000070 PARAMETER Experiment Name: At_100uM_ABA_Mutants_cDNA_P Parameter: Timepoint (hr) Value: 6
  misc_feature: MA Experiment 20000070 PARAMETER Experiment Name: At_100uM_ABA_Mutants_cDNA_P Parameter: Tissue Value: Aerial
  misc_feature: MA Experiment 20000070 PARAMETER Experiment Name: At_100uM_ABA_Mutants_cDNA_P Parameter: Treatment Value: 100uM ABA vs. No Treatment
  misc_feature: MA Experiment ID: 20000071 Result: Up-regulated in Transcription
  misc_feature: MA Experiment 20000071 PARAMETER Experiment Name: At_100uM_ABA_Mutants_cDNA_P Parameter: Plant Line Value: CS8104
  misc_feature: MA Experiment 20000071 PARAMETER Experiment Name: At_100uM_ABA_Mutants_cDNA_P Parameter: Timepoint (hr) Value: 6
  misc_feature: MA Experiment 20000071 PARAMETER Experiment Name: At_100uM_ABA_Mutants_cDNA_P Parameter: Tissue Value: Aerial
  misc_feature: MA Experiment 20000071 PARAMETER Experiment Name: At_100uM_ABA_Mutants_cDNA_P Parameter: Treatment Value: 100uM ABA vs. No Treatment
  misc_feature: MA Experiment ID: 20000072 Result: Up-regulated in Transcription
  misc_feature: MA Experiment 20000072 PARAMETER Experiment Name: At_100uM_ABA_Mutants_cDNA_P Parameter: Plant Line Value: CS8105
  misc_feature: MA Experiment 20000072 PARAMETER Experiment Name: At_100uM_ABA_Mutants_cDNA_P Parameter: Timepoint (hr) Value: 6
  misc_feature: MA Experiment 20000072 PARAMETER Experiment Name: At_100uM_ABA_Mutants_cDNA_P Parameter: Tissue Value: Aerial
  misc_feature: MA Experiment 20000072 PARAMETER Experiment Name: At_100uM_ABA_Mutants_cDNA_P Parameter: Treatment Value: 100uM ABA vs. No Treatment
  misc_feature: MA Experiment ID: 20000086 Result: Up-regulated in Transcription
  misc_feature: MA Experiment 20000086 PARAMETER Experiment Name: At_100uM_ABA_Mutants_cDNA_P Parameter: Plant Line Value: CS22
  misc_feature: MA Experiment 20000086 PARAMETER Experiment Name: At_100uM_ABA_Mutants_cDNA_P Parameter: Timepoint (hr) Value: 6
  misc_feature: MA Experiment 20000086 PARAMETER Experiment Name: At_100uM_ABA_Mutants_cDNA_P Parameter: Tissue Value: Aerial
  misc_feature: MA Experiment 20000086 PARAMETER Experiment Name: At_100uM_ABA_Mutants_cDNA_P Parameter: Treatment Value: 100uM ABA vs. No Treatment
  misc_feature: MA Experiment ID: 20000087 Result: Up-regulated in Transcription
  misc_feature: MA Experiment 20000087 PARAMETER Experiment Name: At_100uM_ABA_Mutants_cDNA_P Parameter: Plant Line Value: WS
  misc_feature: MA Experiment 20000087 PARAMETER Experiment Name: At_100uM_ABA_Mutants_cDNA_P Parameter: Timepoint (hr) Value: 6
  misc_feature: MA Experiment 20000087 PARAMETER Experiment Name: At_100uM_ABA_Mutants_cDNA_P Parameter: Tissue Value: Aerial
  misc_feature: MA Experiment 20000087 PARAMETER Experiment Name: At_100uM_ABA_Mutants_cDNA_P Parameter: Treatment Value: 100uM ABA vs. No Treatment
  misc_feature: MA Experiment ID: 20000088 Result: Up-regulated in Transcription
  misc_feature: MA Experiment 20000088 PARAMETER Experiment Name: At_100uM_ABA_Mutants_cDNA_P Parameter: Plant Line Value: Landsberg
  misc_feature: MA Experiment 20000088 PARAMETER Experiment Name: At_100uM_ABA_Mutants_cDNA_P Parameter: Timepoint (hr) Value: 6
  misc_feature: MA Experiment 20000088 PARAMETER Experiment Name: At_100uM_ABA_Mutants_cDNA_P Parameter: Tissue Value: Aerial
  misc_feature: MA Experiment 20000088 PARAMETER Experiment Name: At_100uM_ABA_Mutants_cDNA_P Parameter: Treatment Value: 100uM ABA vs. No Treatment
  misc_feature: MA Experiment ID: 20000111 Result: Down-regulated in Transcription
  misc_feature: MA Experiment 20000111 PARAMETER Experiment Name: At_42deg_Heat_cDNA_P Parameter: Temperature (deg C) Value: 42 vs. 22
  misc_feature: MA Experiment 20000111 PARAMETER Experiment Name: At_42deg_Heat_cDNA_P Parameter: Timepoint (hr) Value: 6
  misc_feature: MA Experiment 20000111 PARAMETER Experiment Name: At_42deg_Heat_cDNA_P Parameter: Tissue Value: Aerial
  misc_feature: MA Experiment ID: 20000117 Result: Up-regulated in Transcription
  misc_feature: MA Experiment 20000117 PARAMETER Experiment Name: At_100uM_ABA_Mutants_cDNA_P Parameter: Plant Line Value: Columbia
  misc_feature: MA Experiment 20000117 PARAMETER Experiment Name: At_100uM_ABA_Mutants_cDNA_P Parameter: Timepoint (hr) Value: 6
  misc_feature: MA Experiment 20000117 PARAMETER Experiment Name: At_100uM_ABA_Mutants_cDNA_P Parameter: Tissue Value: Aerial
  misc_feature: MA Experiment 20000117 PARAMETER Experiment Name: At_100uM_ABA_Mutants_cDNA_P Parameter: Treatment Value: 100uM ABA vs. No Treatment
caaatgatcccaataattattcttctctttatctctcttttcctcttaaccatccactaatcaaacactaaaacctagaaaaaaaaaggatcaaatcatggagacggaagaagagatgaaggaaagtagtataagcatggtggaggcaaagttgcctccgggattcagatttcacccgaaggacgatgagcttgtctgcgattacttgatgagacgatcgcttcacaataatcatcgaccacctcttgtcctgatccaagtcgatctcaacaagtgtgagccttgggacatcccaaaaatggcatgcgtgggagggaaggattggtatttctacagccaaagagaccgaaaatacgcgacggggctgagaactaaccgagcaacggccaccggatattggaaagccaccggcaaagacagaaccattctaagaaagggtaagctagttgggatgaggaagacattggttttctatcaaggtcgagctcctcgaggccgtaaaaccgattgggtcatgcacgaattccgtctccaaggatctcatcatcctcccaatcattctctgagctctccaaaggaagactgggtcttgtgtagggtattccataagaatacggaaggagttatatgtagagacaacatgggaagctgttttgatgagacagcctctgcatcgcttcctccactgatggatccttacatcaactttgaccaagaaccctcttcttatctcagtgatgatcatcactacatcatcaatgagcacgtaccctgcttctccaatttgtcacagaaccaaaccttaaactcgaacctaaccaactcagtctctgaactcaagattccatgcaagaaccctaaccccttgtttactggtggttcagcctcagccacgctcacaggcctcgactcattctgttcttcagatcagatggttctcagagctctactcagtcagctcactaagattgatggaagcctcgggcctaaagaatcacagagttatggagaaggtagctcggagagcctcctgaccgacatcggtattccaagcactgtttggaattgctgatgatcgagtgtaacgagagttactattgctatattcctatccatgattggaacaattcttcggggggaaataacgtgtgcttgtctgattgtacaaacatttcctcactcttgtacccacggtagattcatgtaaaataccacttatgacgctagacatacatatatttcatcgtagttccatttgtttcaaggtattaaggacctctagaacaattgatcaaaaagataatatgaaacatcactacctgtgtacatgatgggataggtgattgaatagcc

SEQ ID NO: 43483 - protein, 324 aa, Arabidopsis thaliana
  peptide (1)..(324): Ceres Seq. ID no. 12395049
  misc_feature (19)..(146): Pfam Name: No apical meristem (NAM) protein Pfam Description: No apical meristem (NAM) protein
  misc_feature (15)..(248): Homolog of NCBI NO: 15229637 NR Description: organ separation protein, putative; protein id:
  misc_feature (19)..(315): Homolog of NCBI NO: 21537315 NR Description: NAM, no apical meristem,-like protein
  misc_feature (19)..(315): Homolog of NCBI NO: 15240252 NR Description: NAM, no apical meristem, - like protein
  misc_feature (10)..(230): Homolog of NCBI NO: 38636961 NR Description: putative NAC domain protein NAC1
  misc_feature (10)..(323): Homolog of NCBI NO: 15148912 NR Description: NAC domain protein NAC1 [Phaseolus vulgaris]
  misc_feature (249)..(323): Homolog of NCBI NO: 15795128 NR Description: NAM (no apical meristem) protein-like
  misc_feature (1)..(245): Homolog of NCBI NO: 15795128 NR Description: NAM (no apical meristem) protein-like
  misc_feature (68)..(324): Homolog of NCBI NO: 30696045 NR Description: NAC1 / No apical meristem (NAM) protein family
  misc_feature (1)..(324): Homolog of NCBI NO: 25404083 NR Description: hypothetical protein T6H22.19 [imported] -
  misc_feature (1)..(324): Homolog of NCBI NO: 15222818 NR Description: NAC1
METEEEMKESSISMVEAKLPPGFRFHPKDDELVCDYLMRRSLHNNHRPPLVLIQVDLNKCEPWDIPKMACVGGKDWYFYSQRDRKYATGLRTNRATATGYWKATGKDRTILRKGKLVGMRKTLVFYQGRAPRGRKTDWVMHEFRLQGSHHPPNHSLSSPKEDWVLCRVFHKNTEGVICRDNMGSCFDETASASLPPLMDPYINFDQEPSSYLSDDHHYIINEHVPCFSNLSQNQTLNSNLTNSVSELKIPCKNPNPLFTGGSASATLTGLDSFCSSDQMVLRALLSQLTKIDGSLGPKESQSYGEGSSESLLTDIGIPSTVWNC

SEQ ID NO: 43484 - protein, 318 aa, Arabidopsis thaliana
  peptide (1)..(318): Ceres Seq. ID no. 12395050
  misc_feature (13)..(140): Pfam Name: No apical meristem (NAM) protein Pfam Description: No apical meristem (NAM) protein
  misc_feature (9)..(242): Homolog of NCBI NO: 15229637 NR Description: organ separation protein, putative; protein id:
  misc_feature (13)..(309): Homolog of NCBI NO: 21537315 NR Description: NAM, no apical meristem,-like protein
  misc_feature (13)..(309): Homolog of NCBI NO: 15240252 NR Description: NAM, no apical meristem, - like protein
  misc_feature (4)..(224): Homolog of NCBI NO: 38636961 NR Description: putative NAC domain protein NAC1
  misc_feature (4)..(317): Homolog of NCBI NO: 15148912 NR Description: NAC domain protein NAC1 [Phaseolus vulgaris]
  misc_feature (243)..(317): Homolog of NCBI NO: 15795128 NR Description: NAM (no apical meristem) protein-like
  misc_feature (1)..(239): Homolog of NCBI NO: 15795128 NR Description: NAM (no apical meristem) protein-like
  misc_feature (62)..(318): Homolog of NCBI NO: 30696045 NR Description: NAC1 / No apical meristem (NAM) protein family
  misc_feature (1)..(318): Homolog of NCBI NO: 25404083 NR Description: hypothetical protein T6H22.19 [imported] -
  misc_feature (1)..(318): Homolog of NCBI NO: 15222818 NR Description: NAC1
MKESSISMVEAKLPPGFRFHPKDDELVCDYLMRRSLHNNHRPPLVLIQVDLNKCEPWDIPKMACVGGKDWYFYSQRDRKYATGLRTNRATATGYWKATGKDRTILRKGKLVGMRKTLVFYQGRAPRGRKTDWVMHEFRLQGSHHPPNHSLSSPKEDWVLCRVFHKNTEGVICRDNMGSCFDETASASLPPLMDPYINFDQEPSSYLSDDHHYIINEHVPCFSNLSQNQTLNSNLTNSVSELKIPCKNPNPLFTGGSASATLTGLDSFCSSDQMVLRALLSQLTKIDGSLGPKESQSYGEGSSESLLTDIGIPSTVWNC

SEQ ID NO: 43485 - protein, 311 aa, Arabidopsis thaliana
  peptide (1)..(311): Ceres Seq. ID no. 12395051
  misc_feature (6)..(133): Pfam Name: No apical meristem (NAM) protein Pfam Description: No apical meristem (NAM) protein
  misc_feature (2)..(235): Homolog of NCBI NO: 15229637 NR Description: organ separation protein, putative; protein id:
  misc_feature (6)..(302): Homolog of NCBI NO: 21537315 NR Description: NAM, no apical meristem,-like protein
  misc_feature (6)..(302): Homolog of NCBI NO: 15240252 NR Description: NAM, no apical meristem, - like protein
  misc_feature (1)..(217): Homolog of NCBI NO: 38636961 NR Description: putative NAC domain protein NAC1
  misc_feature (1)..(310): Homolog of NCBI NO: 15148912 NR Description: NAC domain protein NAC1 [Phaseolus vulgaris]
  misc_feature (236)..(310): Homolog of NCBI NO: 15795128 NR Description: NAM (no apical meristem) protein-like
  misc_feature (1)..(232): Homolog of NCBI NO: 15795128 NR Description: NAM (no apical meristem) protein-like
  misc_feature (55)..(311): Homolog of NCBI NO: 30696045 NR Description: NAC1 / No apical meristem (NAM) protein family
  misc_feature (1)..(311): Homolog of NCBI NO: 25404083 NR Description: hypothetical protein T6H22.19 [imported] -
  misc_feature (1)..(311): Homolog of NCBI NO: 15222818 NR Description: NAC1
MVEAKLPPGFRFHPKDDELVCDYLMRRSLHNNHRPPLVLIQVDLNKCEPWDIPKMACVGGKDWYFYSQRDRKYATGLRTNRATATGYWKATGKDRTILRKGKLVGMRKTLVFYQGRAPRGRKTDWVMHEFRLQGSHHPPNHSLSSPKEDWVLCRVFHKNTEGVICRDNMGSCFDETASASLPPLMDPYINFDQEPSSYLSDDHHYIINEHVPCFSNLSQNQTLNSNLTNSVSELKIPCKNPNPLFTGGSASATLTGLDSFCSSDQMVLRALLSQLTKIDGSLGPKESQSYGEGSSESLLTDIGIPSTVWNC

SEQ ID NO: 43486 - DNA, 1191 bp, Arabidopsis thaliana
  misc_feature (1)..(1191): Ceres Seq. ID no. 12331021
  misc_feature: MA Experiment ID: 20000180 Result: Down-regulated in Transcription
  misc_feature: MA Experiment 20000180 PARAMETER Experiment Name: At_Germinating_Seeds_P Parameter: Age (hr) Value: 24 vs. 0
  misc_feature: MA Experiment 20000180 PARAMETER Experiment Name: At_Germinating_Seeds_P Parameter: Tissue Value: Germinating Seeds
  misc_feature: MA Experiment ID: 20000184 Result: Up-regulated in Transcription
  misc_feature: MA Experiment 20000184 PARAMETER Experiment Name: At_Shoots__P Parameter: Age (day) Value: 7
  misc_feature: MA Experiment 20000184 PARAMETER Experiment Name: At_Shoots__P Parameter: Tissue Value: Shoots vs. Whole Plant
  misc_feature: MA Experiment ID: 20001557 Result: Up-regulated in Transcription
  misc_feature: MA Experiment 20001557 PARAMETER Experiment Name: At_Drought_Soil_Dry_P Parameter: Age (day) Value: 27
  misc_feature: MA Experiment 20001557 PARAMETER Experiment Name: At_Drought_Soil_Dry_P Parameter: Organism Value: A. thaliana
  misc_feature: MA Experiment 20001557 PARAMETER Experiment Name: At_Drought_Soil_Dry_P Parameter: Plant Line Value: WS
  misc_feature: MA Experiment 20001557 PARAMETER Experiment Name: At_Drought_Soil_Dry_P Parameter: Post Timepoint (hr) Value: 3
  misc_feature: MA Experiment 20001557 PARAMETER Experiment Name: At_Drought_Soil_Dry_P Parameter: Post-Treatment Value: Re-Water vs. No Drought
  misc_feature: MA Experiment 20001557 PARAMETER Experiment Name: At_Drought_Soil_Dry_P Parameter: Timepoint (day) Value: 13
  misc_feature: MA Experiment 20001557 PARAMETER Experiment Name: At_Drought_Soil_Dry_P Parameter: Treatment Value: Drought vs. No Drought
  misc_feature: MA Experiment ID: 20001558 Result: Up-regulated in Transcription
  misc_feature: MA Experiment 20001558 PARAMETER Experiment Name: At_Drought_Soil_Dry_P Parameter: Age (day) Value: 27
  misc_feature: MA Experiment 20001558 PARAMETER Experiment Name: At_Drought_Soil_Dry_P Parameter: Organism Value: A. thaliana
  misc_feature: MA Experiment 20001558 PARAMETER Experiment Name: At_Drought_Soil_Dry_P Parameter: Plant Line Value: WS
  misc_feature: MA Experiment 20001558 PARAMETER Experiment Name: At_Drought_Soil_Dry_P Parameter: Post Timepoint (hr) Value: 6
  misc_feature: MA Experiment 20001558 PARAMETER Experiment Name: At_Drought_Soil_Dry_P Parameter: Post-Treatment Value: Re-Water vs. No Drought
  misc_feature: MA Experiment 20001558 PARAMETER Experiment Name: At_Drought_Soil_Dry_P Parameter: Timepoint (day) Value: 13
  misc_feature: MA Experiment 20001558 PARAMETER Experiment Name: At_Drought_Soil_Dry_P Parameter: Treatment Value: Drought vs. No Drought
gcacagccaaaccccccccaattttggcctctcgatttagttttttgaaaccctaagctcgatttcgatcctccggcatactcggtttcgccgccgaatctctgcttgtagcgagtgttactattcaatcggcgagaatgtcgatgtcgaagagttcaaaaatgcttcagttcatcaactacaggatgcgagtgacgatccaagacggaagacagctcgttgggaagttcatggcgtttgaccgtcacatgaacctcgttctcggcgattgcgaggagtttcgtaagcttccaccagctaaagggaagaagatcaacgaagagcgtgaagatcgccgtacgctaggtttagtgttgcttagaggtgaagaagttatctcaatgactgtcgaaggaccacctcctcctgaagaatctcgtgctaaagctggctcagcagctgctgttgctggtccaggaattggccgtgccgctgggcgtggagttcctactggtccgttagttcaagctcagcctggtttatctggtcctgttcgtggtgttggtggacctgctccgggaatgatgcagcctcagatctctcgtccaccacagctttcagctcctccgattattcgacctccgggacagatgttgccaccgcctccttttggtggtcaaggtcctcctatgggaagaggtcctccaccgccttatggtatgaggccaccgccacagcagttttctggaccaccaccgcctcagtatgggcaaaggccaatgattcctcctcctggtggtatgatgagaggacctcctcctccacttcatggaatgcaaggacctcctccgcctcgccctggaatgcctcctgctcctggtggttttgctccaccgcgtcctggcatgccaccacataatcagcagcagtgattaggttagcagtgaatgaacaggactcttgtctcggctttttactgtttttgtcgctgttttcttgagattatgaaggctttaagatgtttgattgaacttcctcaggtttacggtatcgtgctatcatgttgcctttcattgactttagccgcaatttctcatctatcttagctttcaaagtttgtagatttgttgacgagtgagttgtctttgccttatcttcttgtgttttcttttaagaacgaatccattaaactttgttatgacttcttaaggc

SEQ ID NO: 43487 - protein, 257 aa, Arabidopsis thaliana
  peptide (1)..(257): Ceres Seq. ID no. 12331022
  misc_feature (7)..(84): Pfam Name: LSM domain Pfam Description: LSM domain
  misc_feature (1)..(240): Homolog of NCBI NO: 4507135 NR Description: small nuclear ribonucleoprotein polypeptide N
  misc_feature (1)..(240): Homolog of NCBI NO: 38150007 NR Description: small nuclear ribonucleoprotein polypeptide B/B'
  misc_feature (1)..(240): Homolog of NCBI NO: 8099650 NR Description: snRNP-associated protein; SmB [Danio rerio]
  misc_feature (1)..(240): Homolog of NCBI NO: 112305 NR Description: small nuclear ribonucleoprotein-associated
  misc_feature (1)..(240): Homolog of NCBI NO: 7208221 NR Description: small nuclear ribonucleoprotein B' [Macropus
  misc_feature (1)..(252): Homolog of NCBI NO: 33146808 NR Description: putative snRNP(small nuclear ribonucleoprotein
  misc_feature (1)..(252): Homolog of NCBI NO: 34900024 NR Description: putative snRNP protein [Oryza sativa (japonica
  misc_feature (1)..(256): Homolog of NCBI NO: 21536707 NR Description: putative snRNP protein [Arabidopsis thaliana]
  misc_feature (1)..(256): Homolog of NCBI NO: 15241519 NR Description: putative protein
  misc_feature (1)..(257): Homolog of NCBI NO: 15237095 NR Description: putative snRNP protein
MSMSKSSKMLQFINYRMRVTIQDGRQLVGKFMAFDRHMNLVLGDCEEFRKLPPAKGKKINEEREDRRTLGLVLLRGEEVISMTVEGPPPPEESRAKAGSAAAVAGPGIGRAAGRGVPTGPLVQAQPGLSGPVRGVGGPAPGMMQPQISRPPQLSAPPIIRPPGQMLPPPPFGGQGPPMGRGPPPPYGMRPPPQQFSGPPPPQYGQRPMIPPPGGMMRGPPPPLHGMQGPPPPRPGMPPAPGGFAPPRPGMPPHNQQQ

SEQ ID NO: 43488 - protein, 255 aa, Arabidopsis thaliana
  peptide (1)..(255): Ceres Seq. ID no. 12331023
  misc_feature (5)..(82): Pfam Name: LSM domain Pfam Description: LSM domain
  misc_feature (1)..(238): Homolog of NCBI NO: 4507135 NR Description: small nuclear ribonucleoprotein polypeptide N
  misc_feature (1)..(238): Homolog of NCBI NO: 38150007 NR Description: small nuclear ribonucleoprotein polypeptide B/B'
  misc_feature (1)..(238): Homolog of NCBI NO: 8099650 NR Description: snRNP-associated protein; SmB [Danio rerio]
  misc_feature (1)..(238): Homolog of NCBI NO: 112305 NR Description: small nuclear ribonucleoprotein-associated
  misc_feature (1)..(238): Homolog of NCBI NO: 7208221 NR Description: small nuclear ribonucleoprotein B' [Macropus
  misc_feature (1)..(250): Homolog of NCBI NO: 33146808 NR Description: putative snRNP(small nuclear ribonucleoprotein
  misc_feature (1)..(250): Homolog of NCBI NO: 34900024 NR Description: putative snRNP protein [Oryza sativa (japonica
  misc_feature (1)..(254): Homolog of NCBI NO: 21536707 NR Description: putative snRNP protein [Arabidopsis thaliana]
  misc_feature (1)..(254): Homolog of NCBI NO: 15241519 NR Description: putative protein
  misc_feature (1)..(255): Homolog of NCBI NO: 15237095 NR Description: putative snRNP protein
MSKSSKMLQFINYRMRVTIQDGRQLVGKFMAFDRHMNLVLGDCEEFRKLPPAKGKKINEEREDRRTLGLVLLRGEEVISMTVEGPPPPEESRAKAGSAAAVAGPGIGRAAGRGVPTGPLVQAQPGLSGPVRGVGGPAPGMMQPQISRPPQLSAPPIIRPPGQMLPPPPFGGQGPPMGRGPPPPYGMRPPPQQFSGPPPPQYGQRPMIPPPGGMMRGPPPPLHGMQGPPPPRPGMPPAPGGFAPPRPGMPPHNQQQ

SEQ ID NO: 43489 - protein, 249 aa, Arabidopsis thaliana
  peptide (1)..(249): Ceres Seq. ID no. 12331024
  misc_feature (1)..(76): Pfam Name: LSM domain Pfam Description: LSM domain
  misc_feature (1)..(232): Homolog of NCBI NO: 4507135 NR Description: small nuclear ribonucleoprotein polypeptide N
  misc_feature (1)..(232): Homolog of NCBI NO: 38150007 NR Description: small nuclear ribonucleoprotein polypeptide B/B'
  misc_feature (1)..(232): Homolog of NCBI NO: 8099650 NR Description: snRNP-associated protein; SmB [Danio rerio]
  misc_feature (1)..(232): Homolog of NCBI NO: 112305 NR Description: small nuclear ribonucleoprotein-associated
  misc_feature (1)..(232): Homolog of NCBI NO: 7208221 NR Description: small nuclear ribonucleoprotein B' [Macropus
  misc_feature (1)..(244): Homolog of NCBI NO: 33146808 NR Description: putative snRNP(small nuclear ribonucleoprotein
  misc_feature (1)..(244): Homolog of NCBI NO: 34900024 NR Description: putative snRNP protein [Oryza sativa (japonica
  misc_feature (1)..(248): Homolog of NCBI NO: 21536707 NR Description: putative snRNP protein [Arabidopsis thaliana]
  misc_feature (1)..(248): Homolog of NCBI NO: 15241519 NR Description: putative protein
  misc_feature (1)..(249): Homolog of NCBI NO: 15237095 NR Description: putative snRNP protein
MLQFINYRMRVTIQDGRQLVGKFMAFDRHMNLVLGDCEEFRKLPPAKGKKINEEREDRRTLGLVLLRGEEVISMTVEGPPPPEESRAKAGSAAAVAGPGIGRAAGRGVPTGPLVQAQPGLSGPVRGVGGPAPGMMQPQISRPPQLSAPPIIRPPGQMLPPPPFGGQGPPMGRGPPPPYGMRPPPQQFSGPPPPQYGQRPMIPPPGGMMRGPPPPLHGMQGPPPPRPGMPPAPGGFAPPRPGMPPHNQQQ

SEQ ID NO: 43490 - DNA, 1827 bp, Arabidopsis thaliana
  misc_feature (1)..(1827): Ceres Seq. ID no. 12331099
  misc_feature: MA Experiment ID: 20000113 Result: Up-regulated in Transcription
  misc_feature: MA Experiment 20000113 PARAMETER Experiment Name: At_42deg_Heat_cDNA_P Parameter: Temperature (deg C) Value: 42 vs. 22
  misc_feature: MA Experiment 20000113 PARAMETER Experiment Name: At_42deg_Heat_cDNA_P Parameter: Timepoint (hr) Value: 8
  misc_feature: MA Experiment 20000113 PARAMETER Experiment Name: At_42deg_Heat_cDNA_P Parameter: Tissue Value: Aerial
  misc_feature: MA Experiment ID: 20000173 Result: Up-regulated in Transcription
  misc_feature: MA Experiment 20000173 PARAMETER Experiment Name: At_42deg_Heat_P Parameter: Age (day) Value: 14
  misc_feature: MA Experiment 20000173 PARAMETER Experiment Name: At_42deg_Heat_P Parameter: Organism Value: A. thaliana
  misc_feature: MA Experiment 20000173 PARAMETER Experiment Name: At_42deg_Heat_P Parameter: Plant Line Value: WS
  misc_feature: MA Experiment 20000173 PARAMETER Experiment Name: At_42deg_Heat_P Parameter: Temperature (deg C) Value: 42 vs. 22
  misc_feature: MA Experiment 20000173 PARAMETER Experiment Name: At_42deg_Heat_P Parameter: Timepoint (hr) Value: 6
  misc_feature: MA Experiment 20000173 PARAMETER Experiment Name: At_42deg_Heat_P Parameter: Tissue Value: Aerial
  misc_feature: MA Experiment ID: 20000185 Result: Down-regulated in Transcription
  misc_feature: MA Experiment 20000185 PARAMETER Experiment Name: At_Roots__P Parameter: Age (day) Value: 7 vs. 21
  misc_feature: MA Experiment 20000185 PARAMETER Experiment Name: At_Roots__P Parameter: Organism Value: A. thaliana
  misc_feature: MA Experiment 20000185 PARAMETER Experiment Name: At_Roots__P Parameter: Tissue Value: Roots vs. Whole Plant
  misc_feature: MA Experiment ID: 20000439 Result: Down-regulated in Transcription
  misc_feature: MA Experiment 20000439 PARAMETER Experiment Name: At_Roots__P Parameter: Age (day) Value: 14 vs. 21
  misc_feature: MA Experiment 20000439 PARAMETER Experiment Name: At_Roots__P Parameter: Organism Value: A. thaliana
  misc_feature: MA Experiment 20000439 PARAMETER Experiment Name: At_Roots__P Parameter: Tissue Value: Roots vs. Whole Plant
  misc_feature: MA Experiment ID: 20000496 Result: Up-regulated in Transcription
  misc_feature: MA Experiment 20000496 PARAMETER Experiment Name: At_Guard_Cells_P Parameter: Harvest Date Value: 7/19/2002
  misc_feature: MA Experiment 20000496 PARAMETER Experiment Name: At_Guard_Cells_P Parameter: Organism Value: Canola
  misc_feature: MA Experiment 20000496 PARAMETER Experiment Name: At_Guard_Cells_P Parameter: Tissue Value: Guard Cells vs. Leaves
  misc_feature: MA Experiment ID: 20000794 Result: Up-regulated in Transcription
  misc_feature: MA Experiment 20000794 PARAMETER Experiment Name: At_Petals_P Parameter: Age (day) Value: 23-25 days
  misc_feature: MA Experiment 20000794 PARAMETER Experiment Name: At_Petals_P Parameter: Plant Line Value: WS
  misc_feature: MA Experiment 20000794 PARAMETER Experiment Name: At_Petals_P Parameter: Tissue Value: Petals vs. Whole plant
aaatttcgtttcgacatatttcgcgattcgtctaaggtaaaaaaaaactctcatctttttttcttttagatcgttaatttttgatcagcgattcgaaattctgatctgtgttctttgagcttgtcttatctcttgattcgatctgctgaaaacctagaaattttttattcttttgtttgagtatgagtatatttacgattttaacaaaaaaatatatatatgaattgaggttttttatttagcgaattgggttttaattgttcacattcgtttggctctctcgaggtgagtgataaagtatagaactttcttatgcttaggatcttaaatttgagttctttgattaaccctgtcatgtgttattaattgatctcatttatattggtttatgaaatttgattgggtttaatgaacattgatctgtgacctaatcgatgattgataacattgctggttcatctgatttctcatctggtgtgtctgctcgatcctctgaagaaagtttgaaactcaggcttggtttgtgcagattgattgatttatctcattacttgactatggtgtgcttgattctttgatgaaagcttgaagttaatgtttggtttgtgcaatatgattgggattaactgcatttgatatctgaccaaaatcaatgataaattacattgcttggttatcttattacttaagtttggtgttcctgcatgatcccctgagcttgaagttcatgcttggtttgtccaattgtgacctaaattgatgttttcttgtggtatcttttcgtaggttttgttactgattgagaaaacatgggaggtgacaatgataatgacaaagacaaagggtttcatgggtatcctcccgctggatacccaccccctggggcttatccacccgctggatacccacaacaaggttaccctccaccacccggtgcttacccgcctgcaggttatcctccgggtgcctacccacctgcacctggtggttatcctccagcccctggttatggtggttatcctccagctcctggttatggaggttatcctcctgcacctggtcatggtggttaccctcctgctggctatcctgctcatcactcaggtactgtgtttcttttgctaatggtttttttctcccatgtagtttgccagttaagtgttgtaatggtcactgtacaaacaagttaaaataggagaagttgtttatatgttgttttgtgattgtctgtatgttcattgctaaaatctgagatttagtatcatatttggtgttaaatgtcactttggtttctttattcatgctgttatttatacttgtttcaggacacgcaggaggaattgggggtatgattgcaggtgctgcagctgcctatggagctcaccacgtagctcatagctctcacggtccttacggacatgctgcatatggtcacggttttggccatggtcatggctatggctatggtcatggtcatggtaagttcaagcatgggaagcacgggaagttcaagcatgggaagcatggaatgtttggaggaggcaagttcaagaagtggaagtgatctagttaataccttttgtgaatctgtctggactgaccaatgtttcaaataagccctaaacattatataagttgactttcgtcggttagattgctggttcgagttggaataattgaaacttaattagtatcaaatcttattgtgtactttaaagctatcgttggctttataatgatagattctggtttcggtgtgttgttttaagatttttgtataaactgatttttacattgcttaagcttatagaagtcatgattatgatc

SEQ ID NO: 43491 - protein, 126 aa, Arabidopsis thaliana
  peptide (1)..(126): Ceres Seq. ID no. 12331100
  misc_feature (2)..(92): Pfam Name: Single-stranded DNA binding protein, SSDP Pfam Description: Single-stranded DNA binding protein, SSDP
  misc_feature (48)..(94): Homolog of NCBI NO: 21553447 NR Description: putative glycine and proline-rich protein
  misc_feature (1)..(113): Homolog of NCBI NO: 15234178 NR Description: putative protein
  misc_feature (1)..(113): Homolog of NCBI NO: 7487135 NR Description: hypothetical protein T18B16.170 - Arabidopsis
  misc_feature (2)..(99): Homolog of NCBI NO: 585217 NR Description: GLYCINE RICH PROTEIN A3
  misc_feature (1)..(78): Homolog of NCBI NO: 21553447 NR Description: putative glycine and proline-rich protein
  misc_feature (1)..(101): Homolog of NCBI NO: 15238005 NR Description: glycine/proline-rich protein; protein id:
  misc_feature (1)..(99): Homolog of NCBI NO: 13543234 NR Description: Unknown (protein for MGC:12025) [Mus musculus]
  misc_feature (1)..(99): Homolog of NCBI NO: 6478148 NR Description: putative glycine and proline-rich protein
  misc_feature (1)..(99): Homolog of NCBI NO: 33668156 NR Description: GPRP [Oryza sativa (indica cultivar-group)]
  misc_feature (1)..(99): Homolog of NCBI NO: 18422542 NR Description: expressed protein
MGGDNDNDKDKGFHGYPPAGYPPPGAYPPAGYPQQGYPPPPGAYPPAGYPPGAYPPAPGGYPPAPGYGGYPPAPGYGGYPPAPGHGGYPPAGYPAHHSGTVFLLLMVFFSHVVCQLSVVMVTVQTS

SEQ ID NO: 43492 - protein, 100 aa, Arabidopsis thaliana
  peptide (1)..(100): Ceres Seq. ID no. 12331101
MIMTKTKGFMGILPLDTHPLGLIHPLDTHNKVTLHHPVLTRLQVILRVPTHLHLVVILQPLVMVVILQLLVMEVILLHLVMVVTLLLAILLITQVLCFFC

SEQ ID NO: 43493 - protein, 98 aa, Arabidopsis thaliana
  peptide (1)..(98): Ceres Seq. ID no. 12331102
MTKTKGFMGILPLDTHPLGLIHPLDTHNKVTLHHPVLTRLQVILRVPTHLHLVVILQPLVMVVILQLLVMEVILLHLVMVVTLLLAILLITQVLCFFC

SEQ ID NO: 43494 - DNA, 511 bp, Arabidopsis thaliana
  misc_feature (1)..(511): Ceres Seq. ID no. 12579960
  misc_feature: MA Experiment ID: 108434 Result: Down-regulated in Transcription
  misc_feature: MA Experiment 108434 PARAMETER Experiment Name: At_Root_Tips_cDNA_P Parameter: Tissue Value: Root Tips
  misc_feature: MA Experiment ID: 108463 Result: Up-regulated in Transcription
  misc_feature: MA Experiment 108463 PARAMETER Experiment Name: At_Germinating_Seeds_cDNA_P Parameter: Age (day) Value: 3 vs. 0
  misc_feature: MA Experiment 108463 PARAMETER Experiment Name: At_Germinating_Seeds_cDNA_P Parameter: Tissue Value: Germinating Seeds
  misc_feature: MA Experiment ID: 108464 Result: Up-regulated in Transcription
  misc_feature: MA Experiment 108464 PARAMETER Experiment Name: At_Germinating_Seeds_cDNA_P Parameter: Age (day) Value: 4 vs. 0
  misc_feature: MA Experiment 108464 PARAMETER Experiment Name: At_Germinating_Seeds_cDNA_P Parameter: Tissue Value: Germinating Seeds
  misc_feature: MA Experiment ID: 108579 Result: Up-regulated in Transcription
  misc_feature: MA Experiment 108579 PARAMETER Experiment Name: At_4deg_Cold_cDNA_P Parameter: Temperature (deg C) Value: 4 vs. 22
  misc_feature: MA Experiment 108579 PARAMETER Experiment Name: At_4deg_Cold_cDNA_P Parameter: Timepoint (hr) Value: 6
  misc_feature: MA Experiment 108579 PARAMETER Experiment Name: At_4deg_Cold_cDNA_P Parameter: Tissue Value: Aerial
  misc_feature: MA Experiment ID: 20000087 Result: Up-regulated in Transcription
  misc_feature: MA Experiment 20000087 PARAMETER Experiment Name: At_100uM_ABA_Mutants_cDNA_P Parameter: Plant Line Value: WS
  misc_feature: MA Experiment 20000087 PARAMETER Experiment Name: At_100uM_ABA_Mutants_cDNA_P Parameter: Timepoint (hr) Value: 6
  misc_feature: MA Experiment 20000087 PARAMETER Experiment Name: At_100uM_ABA_Mutants_cDNA_P Parameter: Tissue Value: Aerial
  misc_feature: MA Experiment 20000087 PARAMETER Experiment Name: At_100uM_ABA_Mutants_cDNA_P Parameter: Treatment Value: 100uM ABA vs. No Treatment
  misc_feature: MA Experiment ID: 20000180 Result: Up-regulated in Transcription
  misc_feature: MA Experiment 20000180 PARAMETER Experiment Name: At_Germinating_Seeds_P Parameter: Age (hr) Value: 24 vs. 0
  misc_feature: MA Experiment 20000180 PARAMETER Experiment Name: At_Germinating_Seeds_P Parameter: Tissue Value: Germinating Seeds
  misc_feature: MA Experiment ID: 20000185 Result: Up-regulated in Transcription
  misc_feature: MA Experiment 20000185 PARAMETER Experiment Name: At_Roots__P Parameter: Age (day) Value: 7 vs. 21
  misc_feature: MA Experiment 20000185 PARAMETER Experiment Name: At_Roots__P Parameter: Organism Value: A. thaliana
  misc_feature: MA Experiment 20000185 PARAMETER Experiment Name: At_Roots__P Parameter: Tissue Value: Roots vs. Whole Plant
  misc_feature: MA Experiment ID: 20001560 Result: Up-regulated in Transcription
  misc_feature: MA Experiment 20001560 PARAMETER Experiment Name: At_Drought_Soil_Dry_P Parameter: Age (day) Value: 28
  misc_feature: MA Experiment 20001560 PARAMETER Experiment Name: At_Drought_Soil_Dry_P Parameter: Organism Value: A. thaliana
  misc_feature: MA Experiment 20001560 PARAMETER Experiment Name: At_Drought_Soil_Dry_P Parameter: Plant Line Value: WS
  misc_feature: MA Experiment 20001560 PARAMETER Experiment Name: At_Drought_Soil_Dry_P Parameter: Post Timepoint (hr) Value: None
  misc_feature: MA Experiment 20001560 PARAMETER Experiment Name: At_Drought_Soil_Dry_P Parameter: Post-Treatment Value: None
  misc_feature: MA Experiment 20001560 PARAMETER Experiment Name: At_Drought_Soil_Dry_P Parameter: Timepoint (day) Value: 14
  misc_feature: MA Experiment 20001560 PARAMETER Experiment Name: At_Drought_Soil_Dry_P Parameter: Treatment Value: Drought vs. No Drought
  misc_feature: MA Experiment ID: 20001904 Result: Up-regulated in Transcription
  misc_feature: MA Experiment 20001904 PARAMETER Experiment Name: At_Drought_Reproduction_P Parameter: Age (day) Value: 37
  misc_feature: MA Experiment 20001904 PARAMETER Experiment Name: At_Drought_Reproduction_P Parameter: Organism Value: A. thaliana
  misc_feature: MA Experiment 20001904 PARAMETER Experiment Name: At_Drought_Reproduction_P Parameter: Plant Line Value: WS
  misc_feature: MA Experiment 20001904 PARAMETER Experiment Name: At_Drought_Reproduction_P Parameter: Timepoint (day) Value: 7
  misc_feature: MA Experiment 20001904 PARAMETER Experiment Name: At_Drought_Reproduction_P Parameter: Tissue Value: Rosettes
  misc_feature: MA Experiment 20001904 PARAMETER Experiment Name: At_Drought_Reproduction_P Parameter: Treatment Value: Drought vs. No Drought
catcctaatcgaaaaacagtctgcacacttatcacttctttcgaaatctctctctatccctctcaaaaatgaagctctctgtgcgttttatctccgctgctcttctcttgttcatggtattcattgccacagggatgggtccagtcaccgtggaggcacgcacgtgtgagtcaaaaagccataggttcaagggtccatgtgtgagcacacacaactgtgcaaacgtgtgccacaacgaaggcttcggcggaggtaaatgccgtggattccgtcgtcgttgctactgcacaagacactgctgatccatccattctcatgactcaaatcttcgatccatcgtcagtgtgttacttctttcttatctaaatcttccgtacggtaccatgtcgtaccgtacatgagtgttttctcgaataagtcattggtttgtgtgtttccggttttaatgtaatgttaaatcaattaatggcttttaatatattgtattatggatctcaatctaaaagttttt

SEQ ID NO: 43495 - protein, 77 aa, Arabidopsis thaliana; identical to SEQ ID NO: 25733
  peptide (1)..(77): Ceres Seq. ID no. 12579961
  misc_feature (31)..(77): Pfam Name: Gamma-thionins family Pfam Description: Gamma-thionins family
  misc_feature (1)..(77): Homolog of NCBI NO: 17066707 NR Description: defensin protein precursor [Capsicum annuum]
  misc_feature (1)..(77): Homolog of NCBI NO: 16225423 NR Description: putative gamma-thionin [Castanea sativa]
  misc_feature (1)..(77): Homolog of NCBI NO: 28624546 NR Description: defensin protein 1 [Prunus persica]
  misc_feature (1)..(77): Homolog of NCBI NO: 11387188 NR Description: Flower-specific gamma-thionin precursor (Defensin
  misc_feature (1)..(77): Homolog of NCBI NO: 22330359 NR Description: plant defensin protein, putative (PDF2.4)
  misc_feature (1)..(77): Homolog of NCBI NO: 21553559 NR Description: protease inhibitor II [Arabidopsis thaliana]
  misc_feature (1)..(77): Homolog of NCBI NO: 15226876 NR Description: plant defensin protein, putative (PDF2.1)
  misc_feature (1)..(77): Homolog of NCBI NO: 15226872 NR Description: plant defensin protein, putative (PDF2.2)
  misc_feature (1)..(77): Homolog of NCBI NO: 7488534 NR Description: proteinase inhibitor II - turnip
  misc_feature (1)..(77): Homolog of NCBI NO: 15226878 NR Description: plant defensin protein, putative (PDF2.3)

SEQ ID NO: 43496 - protein, 62 aa, Arabidopsis thaliana; identical to SEQ ID NO: 25734
  peptide (1)..(62): Ceres Seq. ID no. 12579962
  misc_feature (16)..(62): Pfam Name: Gamma-thionins family Pfam Description: Gamma-thionins family
  misc_feature (1)..(62): Homolog of NCBI NO: 17066707 NR Description: defensin protein precursor [Capsicum annuum]
  misc_feature (1)..(62): Homolog of NCBI NO: 16225423 NR Description: putative gamma-thionin [Castanea sativa]
  misc_feature (1)..(62): Homolog of NCBI NO: 28624546 NR Description: defensin protein 1 [Prunus persica]
  misc_feature (1)..(62): Homolog of NCBI NO: 11387188 NR Description: Flower-specific gamma-thionin precursor (Defensin
  misc_feature (1)..(62): Homolog of NCBI NO: 22330359 NR Description: plant defensin protein, putative (PDF2.4)
  misc_feature (1)..(62): Homolog of NCBI NO: 21553559 NR Description: protease inhibitor II [Arabidopsis thaliana]
  misc_feature (1)..(62): Homolog of NCBI NO: 15226876 NR Description: plant defensin protein, putative (PDF2.1)
  misc_feature (1)..(62): Homolog of NCBI NO: 15226872 NR Description: plant defensin protein, putative (PDF2.2)
  misc_feature (1)..(62): Homolog of NCBI NO: 7488534 NR Description: proteinase inhibitor II - turnip
  misc_feature (1)..(62): Homolog of NCBI NO: 15226878 NR Description: plant defensin protein, putative (PDF2.3)

SEQ ID NO: 43497 - protein, 55 aa, Arabidopsis thaliana
  peptide (1)..(55): Ceres Seq. ID no. 12579963
  misc_feature (9)..(55): Pfam Name: Gamma-thionins family Pfam Description: Gamma-thionins family
  misc_feature (1)..(55): Homolog of NCBI NO: 17066707 NR Description: defensin protein precursor [Capsicum annuum]
  misc_feature (1)..(55): Homolog of NCBI NO: 16225423 NR Description: putative gamma-thionin [Castanea sativa]
  misc_feature (1)..(55): Homolog of NCBI NO: 28624546 NR Description: defensin protein 1 [Prunus persica]
  misc_feature (1)..(55): Homolog of NCBI NO: 11387188 NR Description: Flower-specific gamma-thionin precursor (Defensin
  misc_feature (1)..(55): Homolog of NCBI NO: 22330359 NR Description: plant defensin protein, putative (PDF2.4)
  misc_feature (1)..(55): Homolog of NCBI NO: 21553559 NR Description: protease inhibitor II [Arabidopsis thaliana]
  misc_feature (1)..(55): Homolog of NCBI NO: 15226876 NR Description: plant defensin protein, putative (PDF2.1)
  misc_feature (1)..(55): Homolog of NCBI NO: 15226872 NR Description: plant defensin protein, putative (PDF2.2)
  misc_feature (1)..(55): Homolog of NCBI NO: 7488534 NR Description: proteinase inhibitor II - turnip
  misc_feature (1)..(55): Homolog of NCBI NO: 15226878 NR Description: plant defensin protein, putative (PDF2.3)
MGPVTVEARTCESKSHRFKGPCVSTHNCANVCHNEGFGGGKCRGFRRRCYCTRHC

SEQ ID NO: 43498 - protein, 55 aa, Arabidopsis thaliana
  peptide (1)..(55): Ceres Seq. ID no. 12579964
ILIEKQSAHLSLLSKSLSIPLKNEALCAFYLRCSSLVHGIHCHRDGSSHRGGTHV

SEQ ID NO: 43499 - DNA, 1887 bp, Arabidopsis thaliana
  misc_feature (1)..(1887): Ceres Seq. ID no. 12370796
  misc_feature: MA Experiment ID: 108595 Result: Down-regulated in Transcription
  misc_feature: MA Experiment 108595 PARAMETER Experiment Name: At_Ler-pi_Ovule_cDNA_P Parameter: Plant Line Value: null
  misc_feature: MA Experiment ID: 20000087 Result: Down-regulated in Transcription
  misc_feature: MA Experiment 20000087 PARAMETER Experiment Name: At_100uM_ABA_Mutants_cDNA_P Parameter: Plant Line Value: WS
  misc_feature: MA Experiment 20000087 PARAMETER Experiment Name: At_100uM_ABA_Mutants_cDNA_P Parameter: Timepoint (hr) Value: 6
  misc_feature: MA Experiment 20000087 PARAMETER Experiment Name: At_100uM_ABA_Mutants_cDNA_P Parameter: Tissue Value: Aerial
  misc_feature: MA Experiment 20000087 PARAMETER Experiment Name: At_100uM_ABA_Mutants_cDNA_P Parameter: Treatment Value: 100uM ABA vs. No Treatment
  misc_feature: MA Experiment ID: 20000224 Result: Up-regulated in Transcription
  misc_feature: MA Experiment ID: 20000265 Result: Up-regulated in Transcription
  misc_feature: MA Experiment 20000265 PARAMETER Experiment Name: At_Open_Flower_P Parameter: Age (day) Value: 21
  misc_feature: MA Experiment 20000265 PARAMETER Experiment Name: At_Open_Flower_P Parameter: Plant Line Value: WS
  misc_feature: MA Experiment 20000265 PARAMETER Experiment Name: At_Open_Flower_P Parameter: Tissue Value: Closed Flower vs. Whole Plant
  misc_feature: MA Experiment ID: 20000794 Result: Up-regulated in Transcription
  misc_feature: MA Experiment 20000794 PARAMETER Experiment Name: At_Petals_P Parameter: Age (day) Value: 23-25 days
  misc_feature: MA Experiment 20000794 PARAMETER Experiment Name: At_Petals_P Parameter: Plant Line Value: WS
  misc_feature: MA Experiment 20000794 PARAMETER Experiment Name: At_Petals_P Parameter: Tissue Value: Petals vs. Whole plant
gaatttgtgtgttccgaccgaaaaatcaggaagaagaagaagaagattgacaaacaaaaaggattcacctttagtgactgagtgagagaaagagattgaaggaaaaaaaaaaaaaagggtgaagctttggagagaggataaccacgtagaggattctaatccgtggttgcaaacgaaggacccagaatttctggaatctcttgcttcgatcgaatcactctcatgtctaacgaagactctcttccgcctttcactttgtttggtttggatgatgtcgaaaattacggtctggtcactgaagcagacaattcgttacctttagatatacacaatcaggtttttcaacttgtggagaagggaaaccaatcattcaaagagtctcgctttgaagaggctattagcagttattcaaaggccaattctattaaacctcttgaccctattgttcttggcaatagaagtgctgcttatataagatttggccaatatctgaagcagagatctgcatcaatttctgaatataaacctctgaatggttttgatatgtcgatgcttggtgaacttgctcttaaggatgctgataagctaatgagtcttcagagcagtttagtgaagtcatatattacaaaggcttgtgccctcatgttgctagaaagatatgaggtagcccgtgacactatcctctcaggtctacagattgatccctttagcggtcctctacgatccaatcttcaggaattggagaaagtgatgcctaattcgatgcgtaaaacccatggaatggctgagcggtctgatgattttgattgcactgtttgcctgaaattgctgtacgaacctgctacaactccatgtgggcatacattctgccgatcatgcctctttcagtcaatggatcgcggcaacaaatgtccactatgtcgaactgtcatttttatgactccaagaacatgcgctgtcaatgtgacactgaataacatcatagagaaaaactttccagaggagtatgctgaaaggaaatcagagcaagacactctggtccacctaggcaatgaaagtatgccccttttcgtcatggatgtgataatcccctgtcagaagttgtctcttcatatatttgaaccacgatatcgactaatggtgagaagaataatggaaggaaatcatcggatgggaatggtagctcttgattcggcgacaggttctccagtggatgttgcttgcgaagttgaaatcacagagtgtgatccactcccggatggacgttttgtcctggagctggaaagccatagaaggtgccgcattgtaaaagcttgggatcaagatggatatcgtgttgcagaggttgaatgggtgaaagatataccaccacaaagcgagcaagggaaagcagatctgcgggaactgacgaccagcgcagcatcatttgctcggtcatggctagatagagcaaaggaagcagctagacaaggagacagaagaagacttgaaatacttctaaatgttgaatctatgataccaacgcctcaagatcccgagcgcttcagtttctggcttgctacactgacagataggagaccttcagaaagattggaactacttcggcttcaggatactggagagagaataaagcgcgggttgatatatctccgatcagtagaaagaggatgcagaatgcaatgaactggcagcatgatggcattgtattgccggttaaactacagagataaacttgggacctgttcataagaaggttgacaaaacatttattcatgattaaaggaatacataagatagagatccttgtaggatcgctgtcatcctttgtcggatccattgttgtagattttgtttgcgactgtattttatttaattaccatattcttc

SEQ ID NO: 43500 - protein, 486 aa, Arabidopsis thaliana
  peptide (1)..(486): Ceres Seq. ID no. 12370797
  misc_feature (279)..(478): Pfam Name: ATP-dependent protease La (LON) domain Pfam Description: ATP-dependent protease La (LON) domain
  misc_feature (191)..(476): Homolog of NCBI NO: 26449305 NR Description: hypothetical protein [Macaca fascicularis]
  misc_feature (41)..(83): Homolog of NCBI NO: 34933034 NR Description: similar to hypothetical protein FLJ22612 [Rattus
  misc_feature (191)..(415): Homolog of NCBI NO: 34933034 NR Description: similar to hypothetical protein FLJ22612 [Rattus
  misc_feature (200)..(471): Homolog of NCBI NO: 18676903 NR Description: unnamed protein product [Homo sapiens]
  misc_feature (41)..(83): Homolog of NCBI NO: 10439066 NR Description: unnamed protein product [Homo sapiens]
  misc_feature (191)..(411): Homolog of NCBI NO: 10439066 NR Description: unnamed protein product [Homo sapiens]
  misc_feature (193)..(471): Homolog of NCBI NO: 40217796 NR Description: hypothetical protein FLJ23749 [Homo sapiens]
  misc_feature (193)..(471): Homolog of NCBI NO: 38089190 NR Description: similar to hypothetical protein FLJ23749 [Mus
  misc_feature (1)..(486): Homolog of NCBI NO: 18394639 NR Description: expressed protein
  misc_feature (1)..(486): Homolog of NCBI NO: 21554128 NR Description: unknown [Arabidopsis thaliana]
MSNEDSLPPFTLFGLDDVENYGLVTEADNSLPLDIHNQVFQLVEKGNQSFKESRFEEAISSYSKANSIKPLDPIVLGNRSAAYIRFGQYLKQRSASISEYKPLNGFDMSMLGELALKDADKLMSLQSSLVKSYITKACALMLLERYEVARDTILSGLQIDPFSGPLRSNLQELEKVMPNSMRKTHGMAERSDDFDCTVCLKLLYEPATTPCGHTFCRSCLFQSMDRGNKCPLCRTVIFMTPRTCAVNVTLNNIIEKNFPEEYAERKSEQDTLVHLGNESMPLFVMDVIIPCQKLSLHIFEPRYRLMVRRIMEGNHRMGMVALDSATGSPVDVACEVEITECDPLPDGRFVLELESHRRCRIVKAWDQDGYRVAEVEWVKDIPPQSEQGKADLRELTTSAASFARSWLDRAKEAARQGDRRRLEILLNVESMIPTPQDPERFSFWLATLTDRRPSERLELLRLQDTGERIKRGLIYLRSVERGCRMQ

SEQ ID NO: 43501 - protein, 379 aa, Arabidopsis thaliana
  peptide (1)..(379): Ceres Seq. ID no. 12370798
  misc_feature (172)..(371): Pfam Name: ATP-dependent protease La (LON) domain Pfam Description: ATP-dependent protease La (LON) domain
  misc_feature (84)..(304): Homolog of NCBI NO: 37622896 NR Description: ring finger protein 127 [Homo sapiens]
  misc_feature (71)..(362): Homolog of NCBI NO: 38348242 NR Description: FLJ45273 protein [Homo sapiens]
  misc_feature (84)..(369): Homolog of NCBI NO: 26449305 NR Description: hypothetical protein [Macaca fascicularis]
  misc_feature (84)..(308): Homolog of NCBI NO: 34933034 NR Description: similar to hypothetical protein FLJ22612 [Rattus
  misc_feature (93)..(364): Homolog of NCBI NO: 18676903 NR Description: unnamed protein product [Homo sapiens]
  misc_feature (84)..(304): Homolog of NCBI NO: 10439066 NR Description: unnamed protein product [Homo sapiens]
  misc_feature (86)..(364): Homolog of NCBI NO: 40217796 NR Description: hypothetical protein FLJ23749 [Homo sapiens]
  misc_feature (86)..(364): Homolog of NCBI NO: 38089190 NR Description: similar to hypothetical protein FLJ23749 [Mus
  misc_feature (1)..(379): Homolog of NCBI NO: 18394639 NR Description: expressed protein
  misc_feature (1)..(379): Homolog of NCBI NO: 21554128 NR Description: unknown [Arabidopsis thaliana]
MSMLGELALKDADKLMSLQSSLVKSYITKACALMLLERYEVARDTILSGLQIDPFSGPLRSNLQELEKVMPNSMRKTHGMAERSDDFDCTVCLKLLYEPATTPCGHTFCRSCLFQSMDRGNKCPLCRTVIFMTPRTCAVNVTLNNIIEKNFPEEYAERKSEQDTLVHLGNESMPLFVMDVIIPCQKLSLHIFEPRYRLMVRRIMEGNHRMGMVALDSATGSPVDVACEVEITECDPLPDGRFVLELESHRRCRIVKAWDQDGYRVAEVEWVKDIPPQSEQGKADLRELTTSAASFARSWLDRAKEAARQGDRRRLEILLNVESMIPTPQDPERFSFWLATLTDRRPSERLELLRLQDTGERIKRGLIYLRSVERGCRMQ

SEQ ID NO: 43502 - protein, 377 aa, Arabidopsis thaliana
  peptide (1)..(377): Ceres Seq. ID no. 12370799
  misc_feature (170)..(369): Pfam Name: ATP-dependent protease La (LON) domain Pfam Description: ATP-dependent protease La (LON) domain
  misc_feature (82)..(302): Homolog of NCBI NO: 37622896 NR Description: ring finger protein 127 [Homo sapiens]
  misc_feature (69)..(360): Homolog of NCBI NO: 38348242 NR Description: FLJ45273 protein [Homo sapiens]
  misc_feature (82)..(367): Homolog of NCBI NO: 26449305 NR Description: hypothetical protein [Macaca fascicularis]
  misc_feature (82)..(306): Homolog of NCBI NO: 34933034 NR Description: similar to hypothetical protein FLJ22612 [Rattus
  misc_feature (91)..(362): Homolog of NCBI NO: 18676903 NR Description: unnamed protein product [Homo sapiens]
  misc_feature (82)..(302): Homolog of NCBI NO: 10439066 NR Description: unnamed protein product [Homo sapiens]
  misc_feature (84)..(362): Homolog of NCBI NO: 40217796 NR Description: hypothetical protein FLJ23749 [Homo sapiens]
  misc_feature (84)..(362): Homolog of NCBI NO: 38089190 NR Description: similar to hypothetical protein FLJ23749 [Mus
  misc_feature (1)..(377): Homolog of NCBI NO: 18394639 NR Description: expressed protein
  misc_feature (1)..(377): Homolog of NCBI NO: 21554128 NR Description: unknown [Arabidopsis thaliana]
MLGELALKDADKLMSLQSSLVKSYITKACALMLLERYEVARDTILSGLQIDPFSGPLRSNLQELEKVMPNSMRKTHGMAERSDDFDCTVCLKLLYEPATTPCGHTFCRSCLFQSMDRGNKCPLCRTVIFMTPRTCAVNVTLNNIIEKNFPEEYAERKSEQDTLVHLGNESMPLFVMDVIIPCQKLSLHIFEPRYRLMVRRIMEGNHRMGMVALDSATGSPVDVACEVEITECDPLPDGRFVLELESHRRCRIVKAWDQDGYRVAEVEWVKDIPPQSEQGKADLRELTTSAASFARSWLDRAKEAARQGDRRRLEILLNVESMIPTPQDPERFSFWLATLTDRRPSERLELLRLQDTGERIKRGLIYLRSVERGCRMQ

SEQ ID NO: 43503 - DNA, 779 bp, Arabidopsis thaliana
  misc_feature (1)..(779): Ceres Seq. ID no. 12394520
  misc_feature: MA Experiment ID: 108573 Result: Up-regulated in Transcription
  misc_feature: MA Experiment 108573 PARAMETER Experiment Name: At_Drought_cDNA_P Parameter: Timepoint (hr) Value: 6
  misc_feature: MA Experiment 108573 PARAMETER Experiment Name: At_Drought_cDNA_P Parameter: Tissue Value: Aerial
  misc_feature: MA Experiment 108573 PARAMETER Experiment Name: At_Drought_cDNA_P Parameter: Treatment Value: Drought vs. No Drought
  misc_feature: MA Experiment ID: 108595 Result: Up-regulated in Transcription
  misc_feature: MA Experiment 108595 PARAMETER Experiment Name: At_Ler-pi_Ovule_cDNA_P Parameter: Plant Line Value: null
  misc_feature: MA Experiment ID: 20000234 Result: Up-regulated in Transcription
  misc_feature: MA Experiment 20000234 PARAMETER Experiment Name: At_Siliques_P Parameter: Age (day) Value: 21
  misc_feature: MA Experiment 20000234 PARAMETER Experiment Name: At_Siliques_P Parameter: Organism Value: A. thaliana
  misc_feature: MA Experiment 20000234 PARAMETER Experiment Name: At_Siliques_P Parameter: Plant Line Value: WS
  misc_feature: MA Experiment 20000234 PARAMETER Experiment Name: At_Siliques_P Parameter: Tissue Value: Less Than 5mm Siliques vs. Whole Plant
  misc_feature: MA Experiment ID: 20000235 Result: Up-regulated in Transcription
  misc_feature: MA Experiment 20000235 PARAMETER Experiment Name: At_Siliques_P Parameter: Age (day) Value: 21
  misc_feature: MA Experiment 20000235 PARAMETER Experiment Name: At_Siliques_P Parameter: Organism Value: A. thaliana
  misc_feature: MA Experiment 20000235 PARAMETER Experiment Name: At_Siliques_P Parameter: Plant Line Value: WS
  misc_feature: MA Experiment 20000235 PARAMETER Experiment Name: At_Siliques_P Parameter: Tissue Value: 5-10mm Siliques vs. Whole Plant
  misc_feature: MA Experiment ID: 20000264 Result: Up-regulated in Transcription
  misc_feature: MA Experiment 20000264 PARAMETER Experiment Name: At_Open_Flower_P Parameter: Age (day) Value: 21
  misc_feature: MA Experiment 20000264 PARAMETER Experiment Name: At_Open_Flower_P Parameter: Plant Line Value: WS
  misc_feature: MA Experiment 20000264 PARAMETER Experiment Name: At_Open_Flower_P Parameter: Tissue Value: Open Flower vs. Whole Plant
  misc_feature: MA Experiment ID: 20000267 Result: Up-regulated in Transcription
  misc_feature: MA Experiment 20000267 PARAMETER Experiment Name: At_Drought_P Parameter: Age (day) Value: 7
  misc_feature: MA Experiment 20000267 PARAMETER Experiment Name: At_Drought_P Parameter: Organism Value: A. thaliana
  misc_feature: MA Experiment 20000267 PARAMETER Experiment Name: At_Drought_P Parameter: Plant Line Value: WS
  misc_feature: MA Experiment 20000267 PARAMETER Experiment Name: At_Drought_P Parameter: Timepoint (hr) Value: 6
  misc_feature: MA Experiment 20000267 PARAMETER Experiment Name: At_Drought_P Parameter: Tissue Value: Whole Plant
  misc_feature: MA Experiment 20000267 PARAMETER Experiment Name: At_Drought_P Parameter: Treatment Value: Drought vs. No Drought
  misc_feature: MA Experiment ID: 20000268 Result: Up-regulated in Transcription
  misc_feature: MA Experiment 20000268 PARAMETER Experiment Name: At_100mM_NaCl__P Parameter: Age (day) Value: 14
  misc_feature: MA Experiment 20000268 PARAMETER Experiment Name: At_100mM_NaCl__P Parameter: Organism Value: A. thaliana
  misc_feature: MA Experiment 20000268 PARAMETER Experiment Name: At_100mM_NaCl__P Parameter: Plant Line Value: WS
  misc_feature: MA Experiment 20000268 PARAMETER Experiment Name: At_100mM_NaCl__P Parameter: Timepoint (hr) Value: 6
  misc_feature: MA Experiment 20000268 PARAMETER Experiment Name: At_100mM_NaCl__P Parameter: Tissue Value: Whole Plant
  misc_feature: MA Experiment 20000268 PARAMETER Experiment Name: At_100mM_NaCl__P Parameter: Treatment Value: 100mM NaCl vs. No Treatment
  misc_feature: MA Experiment ID: 20000286 Result: Up-regulated in Transcription
  misc_feature: MA Experiment 20000286 PARAMETER Experiment Name: At_Open_Flower_P Parameter: Age (day) Value: 21
  misc_feature: MA Experiment 20000286 PARAMETER Experiment Name: At_Open_Flower_P Parameter: Plant Line Value: WS
  misc_feature: MA Experiment 20000286 PARAMETER Experiment Name: At_Open_Flower_P Parameter: Tissue Value: Half Open vs. Whole Plant
  misc_feature: MA Experiment ID: 20000436 Result: Up-regulated in Transcription
  misc_feature: MA Experiment 20000436 PARAMETER Experiment Name: At_Drought_P Parameter: Age (day) Value: 7
  misc_feature: MA Experiment 20000436 PARAMETER Experiment Name: At_Drought_P Parameter: Organism Value: A. thaliana
  misc_feature: MA Experiment 20000436 PARAMETER Experiment Name: At_Drought_P Parameter: Plant Line Value: WS
  misc_feature: MA Experiment 20000436 PARAMETER Experiment Name: At_Drought_P Parameter: Timepoint (hr) Value: 12
  misc_feature: MA Experiment 20000436 PARAMETER Experiment Name: At_Drought_P Parameter: Tissue Value: Whole Plant
  misc_feature: MA Experiment 20000436 PARAMETER Experiment Name: At_Drought_P Parameter: Treatment Value: Drought vs. No Drought
  misc_feature: MA Experiment ID: 20000437 Result: Up-regulated in Transcription
  misc_feature: MA Experiment 20000437 PARAMETER Experiment Name: At_Drought_P Parameter: Age (day) Value: 8
  misc_feature: MA Experiment 20000437 PARAMETER Experiment Name: At_Drought_P Parameter: Organism Value: A. thaliana
  misc_feature: MA Experiment 20000437 PARAMETER Experiment Name: At_Drought_P Parameter: Plant Line Value: WS
  misc_feature: MA Experiment 20000437 PARAMETER Experiment Name: At_Drought_P Parameter: Timepoint (hr) Value: 24
  misc_feature: MA Experiment 20000437 PARAMETER Experiment Name: At_Drought_P Parameter: Tissue Value: Whole Plant
  misc_feature: MA Experiment 20000437 PARAMETER Experiment Name: At_Drought_P Parameter: Treatment Value: Drought vs. No Drought
  misc_feature: MA Experiment ID: 20000496 Result: Up-regulated in Transcription
  misc_feature: MA Experiment 20000496 PARAMETER Experiment Name: At_Guard_Cells_P Parameter: Harvest Date Value: 7/19/2002
  misc_feature: MA Experiment 20000496 PARAMETER Experiment Name: At_Guard_Cells_P Parameter: Organism Value: Canola
  misc_feature: MA Experiment 20000496 PARAMETER Experiment Name: At_Guard_Cells_P Parameter: Tissue Value: Guard Cells vs. Leaves
  misc_feature: MA Experiment ID: 20000794 Result: Up-regulated in Transcription
  misc_feature: MA Experiment 20000794 PARAMETER Experiment Name: At_Petals_P Parameter: Age (day) Value: 23-25 days
  misc_feature: MA Experiment 20000794 PARAMETER Experiment Name: At_Petals_P Parameter: Plant Line Value: WS
  misc_feature: MA Experiment 20000794 PARAMETER Experiment Name: At_Petals_P Parameter: Tissue Value: Petals vs. Whole plant
  misc_feature: MA Experiment ID: 20001557 Result: Up-regulated in Transcription
  misc_feature: MA Experiment 20001557 PARAMETER Experiment Name: At_Drought_Soil_Dry_P Parameter: Age (day) Value: 27
  misc_feature: MA Experiment 20001557 PARAMETER Experiment Name: At_Drought_Soil_Dry_P Parameter: Organism Value: A. thaliana
  misc_feature: MA Experiment 20001557 PARAMETER Experiment Name: At_Drought_Soil_Dry_P Parameter: Plant Line Value: WS
  misc_feature: MA Experiment 20001557 PARAMETER Experiment Name: At_Drought_Soil_Dry_P Parameter: Post Timepoint (hr) Value: 3
  misc_feature: MA Experiment 20001557 PARAMETER Experiment Name: At_Drought_Soil_Dry_P Parameter: Post-Treatment Value: Re-Water vs. No Drought
  misc_feature: MA Experiment 20001557 PARAMETER Experiment Name: At_Drought_Soil_Dry_P Parameter: Timepoint (day) Value: 13
  misc_feature: MA Experiment 20001557 PARAMETER Experiment Name: At_Drought_Soil_Dry_P Parameter: Treatment Value: Drought vs. No Drought
  misc_feature: MA Experiment ID: 20001559 Result: Up-regulated in Transcription
  misc_feature: MA Experiment 20001559 PARAMETER Experiment Name: At_Drought_Soil_Dry_P Parameter: Age (day) Value: 28
  misc_feature: MA Experiment 20001559 PARAMETER Experiment Name: At_Drought_Soil_Dry_P Parameter: Organism Value: A. thaliana
  misc_feature: MA Experiment 20001559 PARAMETER Experiment Name: At_Drought_Soil_Dry_P Parameter: Plant Line Value: WS
  misc_feature: MA Experiment 20001559 PARAMETER Experiment Name: At_Drought_Soil_Dry_P Parameter: Post Timepoint (hr) Value: 29
  misc_feature: MA Experiment 20001559 PARAMETER Experiment Name: At_Drought_Soil_Dry_P Parameter: Post-Treatment Value: Re-Water vs. No Drought
  misc_feature: MA Experiment 20001559 PARAMETER Experiment Name: At_Drought_Soil_Dry_P Parameter: Timepoint (day) Value: 14
  misc_feature: MA Experiment 20001559 PARAMETER Experiment Name: At_Drought_Soil_Dry_P Parameter: Treatment Value: Drought vs. No Drought
  misc_feature: MA Experiment ID: 20001904 Result: Up-regulated in Transcription
  misc_feature: MA Experiment 20001904 PARAMETER Experiment Name: At_Drought_Reproduction_P Parameter: Age (day) Value: 37
  misc_feature: MA Experiment 20001904 PARAMETER Experiment Name: At_Drought_Reproduction_P Parameter: Organism Value: A. thaliana
  misc_feature: MA Experiment 20001904 PARAMETER Experiment Name: At_Drought_Reproduction_P Parameter: Plant Line Value: WS
  misc_feature: MA Experiment 20001904 PARAMETER Experiment Name: At_Drought_Reproduction_P Parameter: Timepoint (day) Value: 7
  misc_feature: MA Experiment 20001904 PARAMETER Experiment Name: At_Drought_Reproduction_P Parameter: Tissue Value: Rosettes
  misc_feature: MA Experiment 20001904 PARAMETER Experiment Name: At_Drought_Reproduction_P Parameter: Treatment Value: Drought vs. No Drought
  misc_feature: MA Experiment ID: 20001905 Result: Up-regulated in Transcription
  misc_feature: MA Experiment 20001905 PARAMETER Experiment Name: At_Drought_Reproduction_P Parameter: Age (day) Value: 40
  misc_feature: MA Experiment 20001905 PARAMETER Experiment Name: At_Drought_Reproduction_P Parameter: Organism Value: A. thaliana
  misc_feature: MA Experiment 20001905 PARAMETER Experiment Name: At_Drought_Reproduction_P Parameter: Plant Line Value: WS
  misc_feature: MA Experiment 20001905 PARAMETER Experiment Name: At_Drought_Reproduction_P Parameter: Timepoint (day) Value: 10
  misc_feature: MA Experiment 20001905 PARAMETER Experiment Name: At_Drought_Reproduction_P Parameter: Tissue Value: Rosettes
  misc_feature: MA Experiment 20001905 PARAMETER Experiment Name: At_Drought_Reproduction_P Parameter: Treatment Value: Drought vs. No Drought
  misc_feature: MA Experiment ID: 20001911 Result: Up-regulated in Transcription
  misc_feature: MA Experiment 20001911 PARAMETER Experiment Name: At_Drought_Reproduction_P Parameter: Age (day) Value: 40
  misc_feature: MA Experiment 20001911 PARAMETER Experiment Name: At_Drought_Reproduction_P Parameter: Organism Value: A. thaliana
  misc_feature: MA Experiment 20001911 PARAMETER Experiment Name: At_Drought_Reproduction_P Parameter: Plant Line Value: WS
  misc_feature: MA Experiment 20001911 PARAMETER Experiment Name: At_Drought_Reproduction_P Parameter: Timepoint (day) Value: 10
  misc_feature: MA Experiment 20001911 PARAMETER Experiment Name: At_Drought_Reproduction_P Parameter: Tissue Value: Flowers
  misc_feature: MA Experiment 20001911 PARAMETER Experiment Name: At_Drought_Reproduction_P Parameter: Treatment Value: Drought vs. No Drought
atttctgttcatttcacctttactaaaaagagaactcacatcaaagaaacagtccatcattcacatgatctagatgagcatcattactaattatcttgtaacgaatgatcactaatgtttttgactattctatgcagctctagtggcactcctaccacaggaacaccaactagtgggacaccaaccagtgggaccccgactaccggaactccgaccaccggaacccccaccactggaactccaaccagtgggactccaactagtggcttcccaaataccgggactccgaacacagggactaacactgggatgccaaattccaacgggatgccaacttcatcgtcatcttcggtgttcccggggactactcttggaccgactggtagcgggggactaggcgatccaaatgctggagagaagctgtctgttcgaactaacacattggtcttcttattaaccggtgtagcagcaatgcttgtcatatgagggcttagatgtcacacgcggttatggttgtaattgggtttgctgagagatcagatcttgcctacggctcatggttgatagagccatctttttttcactcgtctttctaggatttggacttaggttggccgagagacataatgctggtagtagctagtattttgggttatgtacaactttaactaagagctttacttttgtaaatccggaggatgagatgctcttttgtttcttatattctttttaatccttttactttgatctttcatcttttaatacgtaccatcattgtc

SEQ ID NO: 43504 - protein, 123 aa, Arabidopsis thaliana
  peptide (1)..(123): Ceres Seq. ID no. 12394521
  misc_feature (8)..(89): Pfam Name: Mucin-like glycoprotein Pfam Description: Mucin-like glycoprotein
  misc_feature (17)..(99): Homolog of NCBI NO: 18409239 NR Description: unknown protein
  misc_feature (17)..(99): Homolog of NCBI NO: 21553768 NR Description: unknown [Arabidopsis thaliana]
  misc_feature (7)..(120): Homolog of NCBI NO: 15222715 NR Description: glycosyl hydrolase family 17; protein id:
  misc_feature (10)..(101): Homolog of NCBI NO: 25404810 NR Description: unknown protein, 45065-49536 [imported] -
  misc_feature (10)..(101): Homolog of NCBI NO: 18409239 NR Description: unknown protein
  misc_feature (10)..(101): Homolog of NCBI NO: 21553768 NR Description: unknown [Arabidopsis thaliana]
  misc_feature (66)..(123): Homolog of NCBI NO: 26452143 NR Description: GPI-anchored protein [Arabidopsis thaliana]
  misc_feature (8)..(106): Homolog of NCBI NO: 25404810 NR Description: unknown protein, 45065-49536 [imported] -
  misc_feature (8)..(123): Homolog of NCBI NO: 18409239 NR Description: unknown protein
  misc_feature (8)..(123): Homolog of NCBI NO: 21553768 NR Description: unknown [Arabidopsis thaliana]
MFLTILCSSSGTPTTGTPTSGTPTSGTPTTGTPTTGTPTTGTPTSGTPTSGFPNTGTPNTGTNTGMPNSNGMPTSSSSSVFPGTTLGPTGSGGLGDPNAGEKLSVRTNTLVFLLTGVAAMLVI

SEQ ID NO: 43505 - DNA, 1777 bp, Arabidopsis thaliana; identical to SEQ ID NO: 24265
  misc_feature (1)..(1777): Ceres Seq. ID no. 13610497
  misc_feature: MA Experiment ID: 108561 Result: Up-regulated in Transcription
  misc_feature: MA Experiment 108561 PARAMETER Experiment Name: At_100uM_ABA_cDNA_P Parameter: Timepoint (hr) Value: 6
  misc_feature: MA Experiment 108561 PARAMETER Experiment Name: At_100uM_ABA_cDNA_P Parameter: Tissue Value: Aerial
  misc_feature: MA Experiment 108561 PARAMETER Experiment Name: At_100uM_ABA_cDNA_P Parameter: Treatment Value: 100uM ABA vs. No Treatment
  misc_feature: MA Experiment ID: 108569 Result: Up-regulated in Transcription
  misc_feature: MA Experiment 108569 PARAMETER Experiment Name: At_0.001%_MeJA__cDNA_P Parameter: Timepoint (hr) Value: 6
  misc_feature: MA Experiment 108569 PARAMETER Experiment Name: At_0.001%_MeJA__cDNA_P Parameter: Tissue Value: Aerial
  misc_feature: MA Experiment 108569 PARAMETER Experiment Name: At_0.001%_MeJA__cDNA_P Parameter: Treatment Value: 0.001% MeJA vs. No Treatment
  misc_feature: MA Experiment ID: 108572 Result: Up-regulated in Transcription
  misc_feature: MA Experiment 108572 PARAMETER Experiment Name: At_Drought_cDNA_P Parameter: Timepoint (hr) Value: 1
  misc_feature: MA Experiment 108572 PARAMETER Experiment Name: At_Drought_cDNA_P Parameter: Tissue Value: Aerial
  misc_feature: MA Experiment 108572 PARAMETER Experiment Name: At_Drought_cDNA_P Parameter: Treatment Value: Drought vs. No Drought
  misc_feature: MA Experiment ID: 108573 Result: Up-regulated in Transcription
  misc_feature: MA Experiment 108573 PARAMETER Experiment Name: At_Drought_cDNA_P Parameter: Timepoint (hr) Value: 6
  misc_feature: MA Experiment 108573 PARAMETER Experiment Name: At_Drought_cDNA_P Parameter: Tissue Value: Aerial
  misc_feature: MA Experiment 108573 PARAMETER Experiment Name: At_Drought_cDNA_P Parameter: Treatment Value: Drought vs. No Drought
  misc_feature: MA Experiment ID: 108579 Result: Down-regulated in Transcription
  misc_feature: MA Experiment 108579 PARAMETER Experiment Name: At_4deg_Cold_cDNA_P Parameter: Temperature (deg C) Value: 4 vs. 22
  misc_feature: MA Experiment 108579 PARAMETER Experiment Name: At_4deg_Cold_cDNA_P Parameter: Timepoint (hr) Value: 6
  misc_feature: MA Experiment 108579 PARAMETER Experiment Name: At_4deg_Cold_cDNA_P Parameter: Tissue Value: Aerial
  misc_feature: MA Experiment ID: 108585 Result: Up-regulated in Transcription
  misc_feature: MA Experiment 108585 PARAMETER Experiment Name: At_5mM_NaNP_cDNA_P Parameter: Timepoint (hr) Value: 6
  misc_feature: MA Experiment 108585 PARAMETER Experiment Name: At_5mM_NaNP_cDNA_P Parameter: Tissue Value: Aerial
  misc_feature: MA Experiment 108585 PARAMETER Experiment Name: At_5mM_NaNP_cDNA_P Parameter: Treatment Value: null
  misc_feature: MA Experiment ID: 108595 Result: Up-regulated in Transcription
  misc_feature: MA Experiment 108595 PARAMETER Experiment Name: At_Ler-pi_Ovule_cDNA_P Parameter: Plant Line Value: null
  misc_feature: MA Experiment ID: 108605 Result: Up-regulated in Transcription
  misc_feature: MA Experiment 108605 PARAMETER Experiment Name: At_100uM_ABA_cDNA_P Parameter: Timepoint (hr) Value: 6
  misc_feature: MA Experiment 108605 PARAMETER Experiment Name: At_100uM_ABA_cDNA_P Parameter: Tissue Value: Aerial
  misc_feature: MA Experiment 108605 PARAMETER Experiment Name: At_100uM_ABA_cDNA_P Parameter: Treatment Value: 100uM ABA vs. No Treatment
  misc_feature: MA Experiment ID: 108607 Result: Up-regulated in Transcription
  misc_feature: MA Experiment 108607 PARAMETER Experiment Name: At_100uM_ABA_cDNA_P Parameter: Timepoint (hr) Value: 4
  misc_feature: MA Experiment 108607 PARAMETER Experiment Name: At_100uM_ABA_cDNA_P Parameter: Tissue Value: Aerial
  misc_feature: MA Experiment 108607 PARAMETER Experiment Name: At_100uM_ABA_cDNA_P Parameter: Treatment Value: 100uM ABA vs. No Treatment
  misc_feature: MA Experiment ID: 108608 Result: Up-regulated in Transcription
  misc_feature: MA Experiment 108608 PARAMETER Experiment Name: At_100uM_ABA_cDNA_P Parameter: Timepoint (hr) Value: 1
  misc_feature: MA Experiment 108608 PARAMETER Experiment Name: At_100uM_ABA_cDNA_P Parameter: Tissue Value: Aerial
  misc_feature: MA Experiment 108608 PARAMETER Experiment Name: At_100uM_ABA_cDNA_P Parameter: Treatment Value: 100uM ABA vs. No Treatment
  misc_feature: MA Experiment ID: 108609 Result: Up-regulated in Transcription
  misc_feature: MA Experiment 108609 PARAMETER Experiment Name: At_100uM_ABA_cDNA_P Parameter: Timepoint (hr) Value: 24
  misc_feature: MA Experiment 108609 PARAMETER Experiment Name: At_100uM_ABA_cDNA_P Parameter: Tissue Value: Aerial
  misc_feature: MA Experiment 108609 PARAMETER Experiment Name: At_100uM_ABA_cDNA_P Parameter: Treatment Value: 100uM ABA vs. No Treatment
  misc_feature: MA Experiment ID: 108667 Result: Up-regulated in Transcription
  misc_feature: MA Experiment 108667 PARAMETER Experiment Name: At_2mM_SA_cDNA_P Parameter: Plant Line Value: WS
  misc_feature: MA Experiment 108667 PARAMETER Experiment Name: At_2mM_SA_cDNA_P Parameter: Timepoint (hr) Value: 1
  misc_feature: MA Experiment 108667 PARAMETER Experiment Name: At_2mM_SA_cDNA_P Parameter: Treatment Value: 2mM SA vs. No Treatment
  misc_feature: MA Experiment ID: 20000070 Result: Up-regulated in Transcription
  misc_feature: MA Experiment 20000070 PARAMETER Experiment Name: At_100uM_ABA_Mutants_cDNA_P Parameter: Plant Line Value: CS24
  misc_feature: MA Experiment 20000070 PARAMETER Experiment Name: At_100uM_ABA_Mutants_cDNA_P Parameter: Timepoint (hr) Value: 6
  misc_feature: MA Experiment 20000070 PARAMETER Experiment Name: At_100uM_ABA_Mutants_cDNA_P Parameter: Tissue Value: Aerial
  misc_feature: MA Experiment 20000070 PARAMETER Experiment Name: At_100uM_ABA_Mutants_cDNA_P Parameter: Treatment Value: 100uM ABA vs. No Treatment
  misc_feature: MA Experiment ID: 20000087 Result: Up-regulated in Transcription
  misc_feature: MA Experiment 20000087 PARAMETER Experiment Name: At_100uM_ABA_Mutants_cDNA_P Parameter: Plant Line Value: WS
  misc_feature: MA Experiment 20000087 PARAMETER Experiment Name: At_100uM_ABA_Mutants_cDNA_P Parameter: Timepoint (hr) Value: 6
  misc_feature: MA Experiment 20000087 PARAMETER Experiment Name: At_100uM_ABA_Mutants_cDNA_P Parameter: Tissue Value: Aerial
  misc_feature: MA Experiment 20000087 PARAMETER Experiment Name: At_100uM_ABA_Mutants_cDNA_P Parameter: Treatment Value: 100uM ABA vs. No Treatment
  misc_feature: MA Experiment ID: 20000088 Result: Up-regulated in Transcription
  misc_feature: MA Experiment 20000088 PARAMETER Experiment Name: At_100uM_ABA_Mutants_cDNA_P Parameter: Plant Line Value: Landsberg
  misc_feature: MA Experiment 20000088 PARAMETER Experiment Name: At_100uM_ABA_Mutants_cDNA_P Parameter: Timepoint (hr) Value: 6
  misc_feature: MA Experiment 20000088 PARAMETER Experiment Name: At_100uM_ABA_Mutants_cDNA_P Parameter: Tissue Value: Aerial
  misc_feature: MA Experiment 20000088 PARAMETER Experiment Name: At_100uM_ABA_Mutants_cDNA_P Parameter: Treatment Value: 100uM ABA vs. No Treatment
  misc_feature: MA Experiment ID: 20000089 Result: Up-regulated in Transcription
  misc_feature: MA Experiment ID: 20000117 Result: Up-regulated in Transcription
  misc_feature: MA Experiment 20000117 PARAMETER Experiment Name: At_100uM_ABA_Mutants_cDNA_P Parameter: Plant Line Value: Columbia
  misc_feature: MA Experiment 20000117 PARAMETER Experiment Name: At_100uM_ABA_Mutants_cDNA_P Parameter: Timepoint (hr) Value: 6
  misc_feature: MA Experiment 20000117 PARAMETER Experiment Name: At_100uM_ABA_Mutants_cDNA_P Parameter: Tissue Value: Aerial
  misc_feature: MA Experiment 20000117 PARAMETER Experiment Name: At_100uM_ABA_Mutants_cDNA_P Parameter: Treatment Value: 100uM ABA vs. No Treatment
  misc_feature: MA Experiment ID: 20000166 Result: Up-regulated in Transcription
  misc_feature: MA Experiment 20000166 PARAMETER Experiment Name: At_100uM_ABA_P Parameter: Age (day) Value: 14
  misc_feature: MA Experiment 20000166 PARAMETER Experiment Name: At_100uM_ABA_P Parameter: Organism Value: A. thaliana
  misc_feature: MA Experiment 20000166 PARAMETER Experiment Name: At_100uM_ABA_P Parameter: Plant Line Value: WS
  misc_feature: MA Experiment 20000166 PARAMETER Experiment Name: At_100uM_ABA_P Parameter: Timepoint (hr) Value: 1
  misc_feature: MA Experiment 20000166 PARAMETER Experiment Name: At_100uM_ABA_P Parameter: Tissue Value: Aerial
  misc_feature: MA Experiment 20000166 PARAMETER Experiment Name: At_100uM_ABA_P Parameter: Treatment Value: 100uM ABA vs. No Treatment
  misc_feature: MA Experiment ID: 20000169 Result: Up-regulated in Transcription
  misc_feature: MA Experiment 20000169 PARAMETER Experiment Name: At_100uM_ABA_P Parameter: Age (day) Value: 14
  misc_feature: MA Experiment 20000169 PARAMETER Experiment Name: At_100uM_ABA_P Parameter: Organism Value: A. thaliana
  misc_feature: MA Experiment 20000169 PARAMETER Experiment Name: At_100uM_ABA_P Parameter: Plant Line Value: WS
  misc_feature: MA Experiment 20000169 PARAMETER Experiment Name: At_100uM_ABA_P Parameter: Timepoint (hr) Value: 6
  misc_feature: MA Experiment 20000169 PARAMETER Experiment Name: At_100uM_ABA_P Parameter: Tissue Value: Aerial
  misc_feature: MA Experiment 20000169 PARAMETER Experiment Name: At_100uM_ABA_P Parameter: Treatment Value: 100uM ABA vs. No Treatment
  misc_feature: MA Experiment ID: 20000182 Result: Up-regulated in Transcription
  misc_feature: MA Experiment 20000182 PARAMETER Experiment Name: At_2mM_SA_P Parameter: Age (day) Value: 14
  misc_feature: MA Experiment 20000182 PARAMETER Experiment Name: At_2mM_SA_P Parameter: Organism Value: A. thaliana
  misc_feature: MA Experiment 20000182 PARAMETER Experiment Name: At_2mM_SA_P Parameter: Plant Line Value: WS
  misc_feature: MA Experiment 20000182 PARAMETER Experiment Name: At_2mM_SA_P Parameter: Timepoint (hr) Value: 6
  misc_feature: MA Experiment 20000182 PARAMETER Experiment Name: At_2mM_SA_P Parameter: Tissue Value: Aerial
  misc_feature: MA Experiment 20000182 PARAMETER Experiment Name: At_2mM_SA_P Parameter: Treatment Value: 2mM SA vs. No Treatment
  misc_feature: MA Experiment ID: 20000184 Result: Down-regulated in Transcription
  misc_feature: MA Experiment 20000184 PARAMETER Experiment Name: At_Shoots__P Parameter: Age (day) Value: 7
  misc_feature: MA Experiment 20000184 PARAMETER Experiment Name: At_Shoots__P Parameter: Tissue Value: Shoots vs. Whole Plant
  misc_feature: MA Experiment ID: 20000213 Result: Down-regulated in Transcription
  misc_feature: MA Experiment 20000213 PARAMETER Experiment Name: At_4deg_Cold_P Parameter: Timepoint (hr) Value: 2
  misc_feature: MA Experiment ID: 20000234 Result: Down-regulated in Transcription
  misc_feature: MA Experiment 20000234 PARAMETER Experiment Name: At_Siliques_P Parameter: Age (day) Value: 21
  misc_feature: MA Experiment 20000234 PARAMETER Experiment Name: At_Siliques_P Parameter: Organism Value: A. thaliana
  misc_feature: MA Experiment 20000234 PARAMETER Experiment Name: At_Siliques_P Parameter: Plant Line Value: WS
  misc_feature: MA Experiment 20000234 PARAMETER Experiment Name: At_Siliques_P Parameter: Tissue Value: Less Than 5mm Siliques vs. Whole Plant
  misc_feature: MA Experiment ID: 20000267 Result: Up-regulated in Transcription
  misc_feature: MA Experiment 20000267 PARAMETER Experiment Name: At_Drought_P Parameter: Age (day) Value: 7
  misc_feature: MA Experiment 20000267 PARAMETER Experiment Name: At_Drought_P Parameter: Organism Value: A. thaliana
  misc_feature: MA Experiment 20000267 PARAMETER Experiment Name: At_Drought_P Parameter: Plant Line Value: WS
  misc_feature: MA Experiment 20000267 PARAMETER Experiment Name: At_Drought_P Parameter: Timepoint (hr) Value: 6
  misc_feature: MA Experiment 20000267 PARAMETER Experiment Name: At_Drought_P Parameter: Tissue Value: Whole Plant
  misc_feature: MA Experiment 20000267 PARAMETER Experiment Name: At_Drought_P Parameter: Treatment Value: Drought vs. No Drought
  misc_feature: MA Experiment ID: 20000268 Result: Up-regulated in Transcription
  misc_feature: MA Experiment 20000268 PARAMETER Experiment Name: At_100mM_NaCl__P Parameter: Age (day) Value: 14
  misc_feature: MA Experiment 20000268 PARAMETER Experiment Name: At_100mM_NaCl__P Parameter: Organism Value: A. thaliana
  misc_feature: MA Experiment 20000268 PARAMETER Experiment Name: At_100mM_NaCl__P Parameter: Plant Line Value: WS
  misc_feature: MA Experiment 20000268 PARAMETER Experiment Name: At_100mM_NaCl__P Parameter: Timepoint (hr) Value: 6
  misc_feature: MA Experiment 20000268 PARAMETER Experiment Name: At_100mM_NaCl__P Parameter: Tissue Value: Whole Plant
  misc_feature: MA Experiment 20000268 PARAMETER Experiment Name: At_100mM_NaCl__P Parameter: Treatment Value: 100mM NaCl vs. No Treatment
  misc_feature: MA Experiment ID: 20000436 Result: Up-regulated in Transcription
  misc_feature: MA Experiment 20000436 PARAMETER Experiment Name: At_Drought_P Parameter: Age (day) Value: 7
  misc_feature: MA Experiment 20000436 PARAMETER Experiment Name: At_Drought_P Parameter: Organism Value: A. thaliana
  misc_feature: MA Experiment 20000436 PARAMETER Experiment Name: At_Drought_P Parameter: Plant Line Value: WS
  misc_feature: MA Experiment 20000436 PARAMETER Experiment Name: At_Drought_P Parameter: Timepoint (hr) Value: 12
  misc_feature: MA Experiment 20000436 PARAMETER Experiment Name: At_Drought_P Parameter: Tissue Value: Whole Plant
  misc_feature: MA Experiment 20000436 PARAMETER Experiment Name: At_Drought_P Parameter: Treatment Value: Drought vs. No Drought
  misc_feature: MA Experiment ID: 20000437 Result: Up-regulated in Transcription
  misc_feature: MA Experiment 20000437 PARAMETER Experiment Name: At_Drought_P Parameter: Age (day) Value: 8
  misc_feature: MA Experiment 20000437 PARAMETER Experiment Name: At_Drought_P Parameter: Organism Value: A. thaliana
  misc_feature: MA Experiment 20000437 PARAMETER Experiment Name: At_Drought_P Parameter: Plant Line Value: WS
  misc_feature: MA Experiment 20000437 PARAMETER Experiment Name: At_Drought_P Parameter: Timepoint (hr) Value: 24
  misc_feature: MA Experiment 20000437 PARAMETER Experiment Name: At_Drought_P Parameter: Tissue Value: Whole Plant
  misc_feature: MA Experiment 20000437 PARAMETER Experiment Name: At_Drought_P Parameter: Treatment Value: Drought vs. No Drought
  misc_feature: MA Experiment ID: 20000438 Result: Down-regulated in Transcription
  misc_feature: MA Experiment 20000438 PARAMETER Experiment Name: At_Shoots__P Parameter: Age (day) Value: 14
  misc_feature: MA Experiment 20000438 PARAMETER Experiment Name: At_Shoots__P Parameter: Tissue Value: Shoots vs. Whole Plant
  misc_feature: MA Experiment ID: 20000453 Result: Up-regulated in Transcription
  misc_feature: MA Experiment 20000453 PARAMETER Experiment Name: At_100uM_ABA_P Parameter: Age (day) Value: 15
  misc_feature: MA Experiment 20000453 PARAMETER Experiment Name: At_100uM_ABA_P Parameter: Organism Value: A. thaliana
  misc_feature: MA Experiment 20000453 PARAMETER Experiment Name: At_100uM_ABA_P Parameter: Plant Line Value: WS
  misc_feature: MA Experiment 20000453 PARAMETER Experiment Name: At_100uM_ABA_P Parameter: Timepoint (hr) Value: 24
  misc_feature: MA Experiment 20000453 PARAMETER Experiment Name: At_100uM_ABA_P Parameter: Tissue Value: Aerial
  misc_feature: MA Experiment 20000453 PARAMETER Experiment Name: At_100uM_ABA_P Parameter: Treatment Value: 100uM ABA vs. No Treatment
  misc_feature: MA Experiment ID: 20000455 Result: Up-regulated in Transcription
  misc_feature: MA Experiment 20000455 PARAMETER Experiment Name: At_100uM_ABA_P Parameter: Age (day) Value: 16
  misc_feature: MA Experiment 20000455 PARAMETER Experiment Name: At_100uM_ABA_P Parameter: Organism Value: A. thaliana
  misc_feature: MA Experiment 20000455 PARAMETER Experiment Name: At_100uM_ABA_P Parameter: Plant Line Value: WS
  misc_feature: MA Experiment 20000455 PARAMETER Experiment Name: At_100uM_ABA_P Parameter: Timepoint (hr) Value: 48
  misc_feature: MA Experiment 20000455 PARAMETER Experiment Name: At_100uM_ABA_P Parameter: Tissue Value: Aerial
  misc_feature: MA Experiment 20000455 PARAMETER Experiment Name: At_100uM_ABA_P Parameter: Treatment Value: 100uM ABA vs. No Treatment
  misc_feature: MA Experiment ID: 20000573 Result: Up-regulated in Transcription
  misc_feature: MA Experiment 20000573 PARAMETER Experiment Name: At_100uM_ABA_Mutants__P Parameter: Organism Value: A. thaliana
  misc_feature: MA Experiment 20000573 PARAMETER Experiment Name: At_100uM_ABA_Mutants__P Parameter: Plant Line Value: CS22 vs. Ler wt
  misc_feature: MA Experiment 20000573 PARAMETER Experiment Name: At_100uM_ABA_Mutants__P Parameter: Timepoint (hr) Value: N/A
  misc_feature: MA Experiment 20000573 PARAMETER Experiment Name: At_100uM_ABA_Mutants__P Parameter: Tissue Value: Whole Plant
  misc_feature: MA Experiment 20000573 PARAMETER Experiment Name: At_100uM_ABA_Mutants__P Parameter: Treatment Value: None
  misc_feature: MA Experiment ID: 20000574 Result: Up-regulated in Transcription
  misc_feature: MA Experiment 20000574 PARAMETER Experiment Name: At_100uM_ABA_Mutants__P Parameter: Organism Value: A. thaliana
  misc_feature: MA Experiment 20000574 PARAMETER Experiment Name: At_100uM_ABA_Mutants__P Parameter: Plant Line Value: CS23 vs. Ler wt
  misc_feature: MA Experiment 20000574 PARAMETER Experiment Name: At_100uM_ABA_Mutants__P Parameter: Timepoint (hr) Value: N/A
  misc_feature: MA Experiment 20000574 PARAMETER Experiment Name: At_100uM_ABA_Mutants__P Parameter: Tissue Value: Whole Plant
  misc_feature: MA Experiment 20000574 PARAMETER Experiment Name: At_100uM_ABA_Mutants__P Parameter: Treatment Value: None
  misc_feature: MA Experiment ID: 20000794 Result: Up-regulated in Transcription
  misc_feature: MA Experiment 20000794 PARAMETER Experiment Name: At_Petals_P Parameter: Age (day) Value: 23-25 days
  misc_feature: MA Experiment 20000794 PARAMETER Experiment Name: At_Petals_P Parameter: Plant Line Value: WS
  misc_feature: MA Experiment 20000794 PARAMETER Experiment Name: At_Petals_P Parameter: Tissue Value: Petals vs. Whole plant
  misc_feature: MA Experiment ID: 20001248 Result: Up-regulated in Transcription
  misc_feature: MA Experiment 20001248 PARAMETER Experiment Name: At_Far-red-induction_P Parameter: Age (day) Value: 7
  misc_feature: MA Experiment 20001248 PARAMETER Experiment Name: At_Far-red-induction_P Parameter: Light Value: Far-red vs. White
  misc_feature: MA Experiment 20001248 PARAMETER Experiment Name: At_Far-red-induction_P Parameter: Organism Value: A. thaliana
  misc_feature: MA Experiment 20001248 PARAMETER Experiment Name: At_Far-red-induction_P Parameter: Plant Line Value: Columbia
  misc_feature: MA Experiment 20001248 PARAMETER Experiment Name: At_Far-red-induction_P Parameter: Timepoint (hr) Value: 4
  misc_feature: MA Experiment 20001248 PARAMETER Experiment Name: At_Far-red-induction_P Parameter: Tissue Value: Whole Plant
  misc_feature: MA Experiment ID: 20001450 Result: Up-regulated in Transcription
  misc_feature: MA Experiment 20001450 PARAMETER Experiment Name: At_Far-red-induction_P Parameter: Age (day) Value: 7
  misc_feature: MA Experiment 20001450 PARAMETER Experiment Name: At_Far-red-induction_P Parameter: Light Value: Far-red vs. White
  misc_feature: MA Experiment 20001450 PARAMETER Experiment Name: At_Far-red-induction_P Parameter: Organism Value: A. thaliana
  misc_feature: MA Experiment 20001450 PARAMETER Experiment Name: At_Far-red-induction_P Parameter: Plant Line Value: Columbia
  misc_feature: MA Experiment 20001450 PARAMETER Experiment Name: At_Far-red-induction_P Parameter: Timepoint (hr) Value: 8
  misc_feature: MA Experiment 20001450 PARAMETER Experiment Name: At_Far-red-induction_P Parameter: Tissue Value: Whole Plant
  misc_feature: MA Experiment ID: 20001451 Result: Up-regulated in Transcription
  misc_feature: MA Experiment 20001451 PARAMETER Experiment Name: At_Far-red-induction_P Parameter: Age (day) Value: 7
  misc_feature: MA Experiment 20001451 PARAMETER Experiment Name: At_Far-red-induction_P Parameter: Light Value: Far-red vs. White
  misc_feature: MA Experiment 20001451 PARAMETER Experiment Name: At_Far-red-induction_P Parameter: Organism Value: A. thaliana
  misc_feature: MA Experiment 20001451 PARAMETER Experiment Name: At_Far-red-induction_P Parameter: Plant Line Value: Columbia
  misc_feature: MA Experiment 20001451 PARAMETER Experiment Name: At_Far-red-induction_P Parameter: Timepoint (hr) Value: 24
  misc_feature: MA Experiment 20001451 PARAMETER Experiment Name: At_Far-red-induction_P Parameter: Tissue Value: Whole Plant
  misc_feature: MA Experiment ID: 20001554 Result: Up-regulated in Transcription
  misc_feature: MA Experiment 20001554 PARAMETER Experiment Name: At_Drought_Soil_Dry_P Parameter: Age (day) Value: 21
  misc_feature: MA Experiment 20001554 PARAMETER Experiment Name: At_Drought_Soil_Dry_P Parameter: Organism Value: A. thaliana
  misc_feature: MA Experiment 20001554 PARAMETER Experiment Name: At_Drought_Soil_Dry_P Parameter: Plant Line Value: WS
  misc_feature: MA Experiment 20001554 PARAMETER Experiment Name: At_Drought_Soil_Dry_P Parameter: Post Timepoint (hr) Value: None
  misc_feature: MA Experiment 20001554 PARAMETER Experiment Name: At_Drought_Soil_Dry_P Parameter: Post-Treatment Value: None
  misc_feature: MA Experiment 20001554 PARAMETER Experiment Name: At_Drought_Soil_Dry_P Parameter: Timepoint (day) Value: 7
  misc_feature: MA Experiment 20001554 PARAMETER Experiment Name: At_Drought_Soil_Dry_P Parameter: Treatment Value: Drought vs. No Drought
  misc_feature: MA Experiment ID: 20001559 Result: Up-regulated in Transcription
  misc_feature: MA Experiment 20001559 PARAMETER Experiment Name: At_Drought_Soil_Dry_P Parameter: Age (day) Value: 28
  misc_feature: MA Experiment 20001559 PARAMETER Experiment Name: At_Drought_Soil_Dry_P Parameter: Organism Value: A. thaliana
  misc_feature: MA Experiment 20001559 PARAMETER Experiment Name: At_Drought_Soil_Dry_P Parameter: Plant Line Value: WS
  misc_feature: MA Experiment 20001559 PARAMETER Experiment Name: At_Drought_Soil_Dry_P Parameter: Post Timepoint (hr) Value: 29
  misc_feature: MA Experiment 20001559 PARAMETER Experiment Name: At_Drought_Soil_Dry_P Parameter: Post-Treatment Value: Re-Water vs. No Drought
  misc_feature: MA Experiment 20001559 PARAMETER Experiment Name: At_Drought_Soil_Dry_P Parameter: Timepoint (day) Value: 14
  misc_feature: MA Experiment 20001559 PARAMETER Experiment Name: At_Drought_Soil_Dry_P Parameter: Treatment Value: Drought vs. No Drought
  misc_feature: MA Experiment ID: 20001757 Result: Down-regulated in Transcription
  misc_feature: MA Experiment 20001757 PARAMETER Experiment Name: At_50mM_NH4NO3_L-to-H_P Parameter: Timepoint (hr) Value: 6
  misc_feature: MA Experiment 20001757 PARAMETER Experiment Name: At_50mM_NH4NO3_L-to-H_P Parameter: Tissue Value: Leaf
  misc_feature: MA Experiment 20001757 PARAMETER Experiment Name: At_50mM_NH4NO3_L-to-H_P Parameter: Treatment Value: 50mM NH4NO3 vs 100mM Mannitol
  misc_feature: MA Experiment ID: 20001904 Result: Up-regulated in Transcription
  misc_feature: MA Experiment 20001904 PARAMETER Experiment Name: At_Drought_Reproduction_P Parameter: Age (day) Value: 37
  misc_feature: MA Experiment 20001904 PARAMETER Experiment Name: At_Drought_Reproduction_P Parameter: Organism Value: A. thaliana
  misc_feature: MA Experiment 20001904 PARAMETER Experiment Name: At_Drought_Reproduction_P Parameter: Plant Line Value: WS
  misc_feature: MA Experiment 20001904 PARAMETER Experiment Name: At_Drought_Reproduction_P Parameter: Timepoint (day) Value: 7
  misc_feature: MA Experiment 20001904 PARAMETER Experiment Name: At_Drought_Reproduction_P Parameter: Tissue Value: Rosettes
  misc_feature: MA Experiment 20001904 PARAMETER Experiment Name: At_Drought_Reproduction_P Parameter: Treatment Value: Drought vs. No Drought
  misc_feature: MA Experiment ID: 20001905 Result: Up-regulated in Transcription
  misc_feature: MA Experiment 20001905 PARAMETER Experiment Name: At_Drought_Reproduction_P Parameter: Age (day) Value: 40
  misc_feature: MA Experiment 20001905 PARAMETER Experiment Name: At_Drought_Reproduction_P Parameter: Organism Value: A. thaliana
  misc_feature: MA Experiment 20001905 PARAMETER Experiment Name: At_Drought_Reproduction_P Parameter: Plant Line Value: WS
  misc_feature: MA Experiment 20001905 PARAMETER Experiment Name: At_Drought_Reproduction_P Parameter: Timepoint (day) Value: 10
  misc_feature: MA Experiment 20001905 PARAMETER Experiment Name: At_Drought_Reproduction_P Parameter: Tissue Value: Rosettes
  misc_feature: MA Experiment 20001905 PARAMETER Experiment Name: At_Drought_Reproduction_P Parameter: Treatment Value: Drought vs. No Drought
  misc_feature: MA Experiment ID: 20001906 Result: Up-regulated in Transcription
  misc_feature: MA Experiment 20001906 PARAMETER Experiment Name: At_Drought_Reproduction_P Parameter: Age (day) Value: 35
  misc_feature: MA Experiment 20001906 PARAMETER Experiment Name: At_Drought_Reproduction_P Parameter: Organism Value: A. thaliana
  misc_feature: MA Experiment 20001906 PARAMETER Experiment Name: At_Drought_Reproduction_P Parameter: Plant Line Value: WS
  misc_feature: MA Experiment 20001906 PARAMETER Experiment Name: At_Drought_Reproduction_P Parameter: Timepoint (day) Value: 5
  misc_feature: MA Experiment 20001906 PARAMETER Experiment Name: At_Drought_Reproduction_P Parameter: Tissue Value: Siliques
  misc_feature: MA Experiment 20001906 PARAMETER Experiment Name: At_Drought_Reproduction_P Parameter: Treatment Value: Drought vs. No Drought
  misc_feature: MA Experiment ID: 20001911 Result: Up-regulated in Transcription
  misc_feature: MA Experiment 20001911 PARAMETER Experiment Name: At_Drought_Reproduction_P Parameter: Age (day) Value: 40
  misc_feature: MA Experiment 20001911 PARAMETER Experiment Name: At_Drought_Reproduction_P Parameter: Organism Value: A. thaliana
  misc_feature: MA Experiment 20001911 PARAMETER Experiment Name: At_Drought_Reproduction_P Parameter: Plant Line Value: WS
  misc_feature: MA Experiment 20001911 PARAMETER Experiment Name: At_Drought_Reproduction_P Parameter: Timepoint (day) Value: 10
  misc_feature: MA Experiment 20001911 PARAMETER Experiment Name: At_Drought_Reproduction_P Parameter: Tissue Value: Flowers
  misc_feature: MA Experiment 20001911 PARAMETER Experiment Name: At_Drought_Reproduction_P Parameter: Treatment Value: Drought vs. No Drought

SEQ ID NO: 43506 - protein, 538 aa, Arabidopsis thaliana; identical to SEQ ID NO: 24266
  peptide (1)..(538): Ceres Seq. ID no. 13610498
  misc_feature (31)..(538): Homolog of NCBI NO: 11995457 NR Description: aldehyde dehydrogenase [Oryza sativa]
  misc_feature (31)..(538): Homolog of NCBI NO: 25090068 NR Description: Aldehyde dehydrogenase family 7 member A1
  misc_feature (31)..(538): Homolog of NCBI NO: 118514 NR Description: Aldehyde dehydrogenase family 7 member A1
  misc_feature (31)..(520): Homolog of NCBI NO: 25090053 NR Description: Aldehyde dehydrogenase family 7 member A1
  misc_feature (31)..(538): Homolog of NCBI NO: 15221042 NR Description: aldehyde dehydrogenase, putative (ALDH)
  misc_feature (31)..(538): Homolog of NCBI NO: 11995457 NR Description: aldehyde dehydrogenase [Oryza sativa]
  misc_feature (31)..(538): Homolog of NCBI NO: 25090068 NR Description: Aldehyde dehydrogenase family 7 member A1
  misc_feature (31)..(538): Homolog of NCBI NO: 118514 NR Description: Aldehyde dehydrogenase family 7 member A1
  misc_feature (31)..(520): Homolog of NCBI NO: 25090053 NR Description: Aldehyde dehydrogenase family 7 member A1
  misc_feature (31)..(538): Homolog of NCBI NO: 15221042 NR Description: aldehyde dehydrogenase, putative (ALDH)

SEQ ID NO: 43507 - protein, 508 aa, Arabidopsis thaliana; identical to SEQ ID NO: 24267
  peptide (1)..(508): Ceres Seq. ID no. 13610499
  misc_feature (1)..(508): Homolog of NCBI NO: 11995457 NR Description: aldehyde dehydrogenase [Oryza sativa]
  misc_feature (1)..(508): Homolog of NCBI NO: 25090068 NR Description: Aldehyde dehydrogenase family 7 member A1
  misc_feature (1)..(508): Homolog of NCBI NO: 118514 NR Description: Aldehyde dehydrogenase family 7 member A1
  misc_feature (1)..(490): Homolog of NCBI NO: 25090053 NR Description: Aldehyde dehydrogenase family 7 member A1
  misc_feature (1)..(508): Homolog of NCBI NO: 15221042 NR Description: aldehyde dehydrogenase, putative (ALDH)
  misc_feature (1)..(490): Homolog of NCBI NO: 25090053 NR Description: Aldehyde dehydrogenase family 7 member A1
  misc_feature (1)..(508): Homolog of NCBI NO: 15221042 NR Description: aldehyde dehydrogenase, putative (ALDH)
  misc_feature (1)..(508): Homolog of NCBI NO: 11995457 NR Description: aldehyde dehydrogenase [Oryza sativa]
  misc_feature (1)..(508): Homolog of NCBI NO: 25090068 NR Description: Aldehyde dehydrogenase family 7 member A1
  misc_feature (1)..(508): Homolog of NCBI NO: 118514 NR Description: Aldehyde dehydrogenase family 7 member A1

SEQ ID NO: 43508 - protein, 436 aa, Arabidopsis thaliana; identical to SEQ ID NO: 24268
  peptide (1)..(436): Ceres Seq. ID no. 13610500
  misc_feature (1)..(436): Homolog of NCBI NO: 11995457 NR Description: aldehyde dehydrogenase [Oryza sativa]
  misc_feature (1)..(436): Homolog of NCBI NO: 25090068 NR Description: Aldehyde dehydrogenase family 7 member A1
  misc_feature (1)..(436): Homolog of NCBI NO: 118514 NR Description: Aldehyde dehydrogenase family 7 member A1
  misc_feature (1)..(418): Homolog of NCBI NO: 25090053 NR Description: Aldehyde dehydrogenase family 7 member A1
  misc_feature (1)..(436): Homolog of NCBI NO: 15221042 NR Description: aldehyde dehydrogenase, putative (ALDH)
  misc_feature (1)..(436): Homolog of NCBI NO: 11995457 NR Description: aldehyde dehydrogenase [Oryza sativa]
  misc_feature (1)..(436): Homolog of NCBI NO: 25090068 NR Description: Aldehyde dehydrogenase family 7 member A1
  misc_feature (1)..(436): Homolog of NCBI NO: 118514 NR Description: Aldehyde dehydrogenase family 7 member A1
  misc_feature (1)..(418): Homolog of NCBI NO: 25090053 NR Description: Aldehyde dehydrogenase family 7 member A1
  misc_feature (1)..(436): Homolog of NCBI NO: 15221042 NR Description: aldehyde dehydrogenase, putative (ALDH)

SEQ ID NO: 43509 - DNA, 1928 bp, Arabidopsis thaliana
  misc_feature (1)..(1928): Ceres Seq. ID no. 12377270
  misc_feature: MA Experiment ID: 108462 Result: Down-regulated in Transcription
  misc_feature: MA Experiment 108462 PARAMETER Experiment Name: At_Germinating_Seeds_cDNA_P Parameter: Age (day) Value: 2 vs. 0
  misc_feature: MA Experiment 108462 PARAMETER Experiment Name: At_Germinating_Seeds_cDNA_P Parameter: Tissue Value: Germinating Seeds
  misc_feature: MA Experiment ID: 108463 Result: Down-regulated in Transcription
  misc_feature: MA Experiment 108463 PARAMETER Experiment Name: At_Germinating_Seeds_cDNA_P Parameter: Age (day) Value: 3 vs. 0
  misc_feature: MA Experiment 108463 PARAMETER Experiment Name: At_Germinating_Seeds_cDNA_P Parameter: Tissue Value: Germinating Seeds
  misc_feature: MA Experiment ID: 108464 Result: Down-regulated in Transcription
  misc_feature: MA Experiment 108464 PARAMETER Experiment Name: At_Germinating_Seeds_cDNA_P Parameter: Age (day) Value: 4 vs. 0
  misc_feature: MA Experiment 108464 PARAMETER Experiment Name: At_Germinating_Seeds_cDNA_P Parameter: Tissue Value: Germinating Seeds
  misc_feature: MA Experiment ID: 20000180 Result: Down-regulated in Transcription
  misc_feature: MA Experiment 20000180 PARAMETER Experiment Name: At_Germinating_Seeds_P Parameter: Age (hr) Value: 24 vs. 0
  misc_feature: MA Experiment 20000180 PARAMETER Experiment Name: At_Germinating_Seeds_P Parameter: Tissue Value: Germinating Seeds
  misc_feature: MA Experiment ID: 20000184 Result: Down-regulated in Transcription
  misc_feature: MA Experiment 20000184 PARAMETER Experiment Name: At_Shoots__P Parameter: Age (day) Value: 7
  misc_feature: MA Experiment 20000184 PARAMETER Experiment Name: At_Shoots__P Parameter: Tissue Value: Shoots vs. Whole Plant
actctcggcaaaaaaaaagttcctcagaagcaaacaaatcttcaattgttaaaccctaaacctacaaaagtcttgactttgtttgttgctcatcttcgttcttctctctcgattaaattcgttccgagaaagttaggtcccgtttctaaacaatgataactgcagtgtcatggataccaaaagggaatctaaaagctgttcctgatgttgctgagcctccgtcaaaggaagaacttaaagagctcattgagagtggtgcttttgcaagaaacgtggaaggtagtaacgaggatgaagaagaagagattgaagaagatggagaagagataagtgaagttgatcatgccaaggctgtagctgaagctttgggtaaatcttctaaaagcaaggctgtttcttcttcaatggaggttgatgaggtttctcaaggattgaaagaacttgacatggataattatgatgaagaggatgatgaaattgaacttttcagttctggaatgggggatctttattatccaagtaatgagatggatccatatctgaaagatgttgatgatgaagatgatgaagaggatattgatgacacgacagtcaagccgaccgattcggtgattatttgtgctaggaatgaagatgatgttagccatctagaggtttatttatacgaggaatcgtctggctctccaaacatgtatgttcatcatcacataattataccagaattcccattgtgtactgcatggcttgattgtcctcttaaaggaggggaaaaagggaattttgtagctattggttcaaaggatacaccgacaatcgagatatgggatcttgacgttagggacgaggtgctaccttgtatacaactaggaggaatagaggagatgatagtgagtaagaaaaagaagagcaagaaacagaaaccgaaattcaaagaaggtagccatactgagtcagtacttggtcttgcttggaacaaggagtttcggaacatacttgctagtgctagtgccgacaaaaaagttaaggtctgggatgtggctactgggacgtgtaagattactatggagcatcacacaaaggaggttcaagcggttgcttggaaccattatgctccagaagtgcttctcagtgggtcgtttgatcaaactgttgtcatgaaagacggaagacaaccttcacactcgggtttcaaatggtctgtcatgtctgatgtcgaaagcttagcctgggatcctcattgcgaacactcctttgtggtaagtcttgaagatggaaccgtgaagggttttgatatacgtgctgcacagtcaggttcagattctgatttaaacccaacttacactatccaagcacatgcccaagacagaggagtctcctccatctcatacaacatttctacacccaatcttttggctacggggtctatggataaatcggtaaagctttgggatctttcaaacaatgaaccttcatgcattgctacacaccaaccaaatgctggagctgtgttttccatttcctttgcggtggacaaccctttcttgcttgctattggtggctcaaagggagagctacatgtttgggatacactgttggatgctaatgtcgctcgcaaatatgggagcaatagatcttgaaaagacccgcaaggataacttgtctctttgaagctgtgatggttgttagattcgatcacactcatgccaaattttgcgctttcttttcttctttttctttaggcttgttttatctctcatatgattatggttatatcgtgtaagggtgtgtgagcttatatgttgaaatcctaaaactactgggagagcctttttcaacttatcatgaatctatagctgttgtgctttaaataaacatttatcaaattgtattcatcttttaactccgcaaagtgatataaaattcttctt

SEQ ID NO: 43510 - protein, 494 aa, Arabidopsis thaliana
  peptide (1)..(494): Ceres Seq. ID no. 12377271
  misc_feature (394)..(478): Pfam Name: WD domain, G-beta repeat Pfam Description: WD domain, G-beta repeat
  misc_feature (47)..(490): Homolog of NCBI NO: 20161737 NR Description: B1033B05.3 [Oryza sativa (japonica
  misc_feature (50)..(241): Homolog of NCBI NO: 15236974 NR Description: putative protein; protein id: At4g35370.1
  misc_feature (266)..(457): Homolog of NCBI NO: 15236974 NR Description: putative protein; protein id: At4g35370.1
  misc_feature (21)..(491): Homolog of NCBI NO: 18415193 NR Description: putative protein; protein id: At4g18900.1
  misc_feature (21)..(108): Homolog of NCBI NO: 7485426 NR Description: hypothetical protein F13C5.70 - Arabidopsis
  misc_feature (447)..(494): Homolog of NCBI NO: 7485426 NR Description: hypothetical protein F13C5.70 - Arabidopsis
  misc_feature (1)..(107): Homolog of NCBI NO: 7485426 NR Description: hypothetical protein F13C5.70 - Arabidopsis
  misc_feature (278)..(418): Homolog of NCBI NO: 7485426 NR Description: hypothetical protein F13C5.70 - Arabidopsis
  misc_feature (107)..(267): Homolog of NCBI NO: 7485426 NR Description: hypothetical protein F13C5.70 - Arabidopsis
  misc_feature (1)..(494): Homolog of NCBI NO: 18415195 NR Description: Expressed protein
MITAVSWIPKGNLKAVPDVAEPPSKEELKELIESGAFARNVEGSNEDEEEEIEEDGEEISEVDHAKAVAEALGKSSKSKAVSSSMEVDEVSQGLKELDMDNYDEEDDEIELFSSGMGDLYYPSNEMDPYLKDVDDEDDEEDIDDTTVKPTDSVIICARNEDDVSHLEVYLYEESSGSPNMYVHHHIIIPEFPLCTAWLDCPLKGGEKGNFVAIGSKDTPTIEIWDLDVRDEVLPCIQLGGIEEMIVSKKKKSKKQKPKFKEGSHTESVLGLAWNKEFRNILASASADKKVKVWDVATGTCKITMEHHTKEVQAVAWNHYAPEVLLSGSFDQTVVMKDGRQPSHSGFKWSVMSDVESLAWDPHCEHSFVVSLEDGTVKGFDIRAAQSGSDSDLNPTYTIQAHAQDRGVSSISYNISTPNLLATGSMDKSVKLWDLSNNEPSCIATHQPNAGAVFSISFAVDNPFLLAIGGSKGELHVWDTLLDANVARKYGSNRS

SEQ ID NO: 43511 - protein, 410 aa, Arabidopsis thaliana
  peptide (1)..(410): Ceres Seq. ID no. 12377272
  misc_feature (310)..(394): Pfam Name: WD domain, G-beta repeat Pfam Description: WD domain, G-beta repeat
  misc_feature (1)..(406): Homolog of NCBI NO: 20161737 NR Description: B1033B05.3 [Oryza sativa (japonica
  misc_feature (1)..(157): Homolog of NCBI NO: 15236974 NR Description: putative protein; protein id: At4g35370.1
  misc_feature (182)..(373): Homolog of NCBI NO: 15236974 NR Description: putative protein; protein id: At4g35370.1
  misc_feature (1)..(407): Homolog of NCBI NO: 18415193 NR Description: putative protein; protein id: At4g18900.1
  misc_feature (1)..(24): Homolog of NCBI NO: 7485426 NR Description: hypothetical protein F13C5.70 - Arabidopsis
  misc_feature (363)..(410): Homolog of NCBI NO: 7485426 NR Description: hypothetical protein F13C5.70 - Arabidopsis
  misc_feature (1)..(23): Homolog of NCBI NO: 7485426 NR Description: hypothetical protein F13C5.70 - Arabidopsis
  misc_feature (194)..(334): Homolog of NCBI NO: 7485426 NR Description: hypothetical protein F13C5.70 - Arabidopsis
  misc_feature (23)..(183): Homolog of NCBI NO: 7485426 NR Description: hypothetical protein F13C5.70 - Arabidopsis
  misc_feature (1)..(410): Homolog of NCBI NO: 18415195 NR Description: Expressed protein
MEVDEVSQGLKELDMDNYDEEDDEIELFSSGMGDLYYPSNEMDPYLKDVDDEDDEEDIDDTTVKPTDSVIICARNEDDVSHLEVYLYEESSGSPNMYVHHHIIIPEFPLCTAWLDCPLKGGEKGNFVAIGSKDTPTIEIWDLDVRDEVLPCIQLGGIEEMIVSKKKKSKKQKPKFKEGSHTESVLGLAWNKEFRNILASASADKKVKVWDVATGTCKITMEHHTKEVQAVAWNHYAPEVLLSGSFDQTVVMKDGRQPSHSGFKWSVMSDVESLAWDPHCEHSFVVSLEDGTVKGFDIRAAQSGSDSDLNPTYTIQAHAQDRGVSSISYNISTPNLLATGSMDKSVKLWDLSNNEPSCIATHQPNAGAVFSISFAVDNPFLLAIGGSKGELHVWDTLLDANVARKYGSNRS

SEQ ID NO: 43512 - protein, 396 aa, Arabidopsis thaliana
  peptide (1)..(396): Ceres Seq. ID no. 12377273
  misc_feature (296)..(380): Pfam Name: WD domain, G-beta repeat Pfam Description: WD domain, G-beta repeat
  misc_feature (1)..(393): Homolog of NCBI NO: 40746560 NR Description: hypothetical protein AN0310.2 [Aspergillus
  misc_feature (1)..(273): Homolog of NCBI NO: 7485426 NR Description: hypothetical protein F13C5.70 - Arabidopsis
  misc_feature (1)..(392): Homolog of NCBI NO: 20161737 NR Description: B1033B05.3 [Oryza sativa (japonica
  misc_feature (1)..(143): Homolog of NCBI NO: 15236974 NR Description: putative protein; protein id: At4g35370.1
  misc_feature (168)..(359): Homolog of NCBI NO: 15236974 NR Description: putative protein; protein id: At4g35370.1
  misc_feature (1)..(393): Homolog of NCBI NO: 18415193 NR Description: putative protein; protein id: At4g18900.1
  misc_feature (349)..(396): Homolog of NCBI NO: 7485426 NR Description: hypothetical protein F13C5.70 - Arabidopsis
  misc_feature (180)..(320): Homolog of NCBI NO: 7485426 NR Description: hypothetical protein F13C5.70 - Arabidopsis
  misc_feature (9)..(169): Homolog of NCBI NO: 7485426 NR Description: hypothetical protein F13C5.70 - Arabidopsis
  misc_feature (1)..(396): Homolog of NCBI NO: 18415195 NR Description: Expressed protein
MDNYDEEDDEIELFSSGMGDLYYPSNEMDPYLKDVDDEDDEEDIDDTTVKPTDSVIICARNEDDVSHLEVYLYEESSGSPNMYVHHHIIIPEFPLCTAWLDCPLKGGEKGNFVAIGSKDTPTIEIWDLDVRDEVLPCIQLGGIEEMIVSKKKKSKKQKPKFKEGSHTESVLGLAWNKEFRNILASASADKKVKVWDVATGTCKITMEHHTKEVQAVAWNHYAPEVLLSGSFDQTVVMKDGRQPSHSGFKWSVMSDVESLAWDPHCEHSFVVSLEDGTVKGFDIRAAQSGSDSDLNPTYTIQAHAQDRGVSSISYNISTPNLLATGSMDKSVKLWDLSNNEPSCIATHQPNAGAVFSISFAVDNPFLLAIGGSKGELHVWDTLLDANVARKYGSNRS

SEQ ID NO: 43513 - DNA, 809 bp, Arabidopsis thaliana
  misc_feature (1)..(809): Ceres Seq. ID no. 12602864
  misc_feature: MA Experiment ID: 20000171 Result: Down-regulated in Transcription
  misc_feature: MA Experiment 20000171 PARAMETER Experiment Name: At_42deg_Heat_P Parameter: Age (day) Value: 14
  misc_feature: MA Experiment 20000171 PARAMETER Experiment Name: At_42deg_Heat_P Parameter: Organism Value: A. thaliana
  misc_feature: MA Experiment 20000171 PARAMETER Experiment Name: At_42deg_Heat_P Parameter: Plant Line Value: WS
  misc_feature: MA Experiment 20000171 PARAMETER Experiment Name: At_42deg_Heat_P Parameter: Temperature (deg C) Value: 42 vs. 22
  misc_feature: MA Experiment 20000171 PARAMETER Experiment Name: At_42deg_Heat_P Parameter: Timepoint (hr) Value: 1
  misc_feature: MA Experiment 20000171 PARAMETER Experiment Name: At_42deg_Heat_P Parameter: Tissue Value: Aerial
  misc_feature: MA Experiment ID: 20000179 Result: Down-regulated in Transcription
  misc_feature: MA Experiment 20000179 PARAMETER Experiment Name: At_Germinating_Seeds_P Parameter: Age (hr) Value: 6 vs. 0
  misc_feature: MA Experiment 20000179 PARAMETER Experiment Name: At_Germinating_Seeds_P Parameter: Tissue Value: Germinating Seeds
  misc_feature: MA Experiment ID: 20000182 Result: Up-regulated in Transcription
  misc_feature: MA Experiment 20000182 PARAMETER Experiment Name: At_2mM_SA_P Parameter: Age (day) Value: 14
  misc_feature: MA Experiment 20000182 PARAMETER Experiment Name: At_2mM_SA_P Parameter: Organism Value: A. thaliana
  misc_feature: MA Experiment 20000182 PARAMETER Experiment Name: At_2mM_SA_P Parameter: Plant Line Value: WS
  misc_feature: MA Experiment 20000182 PARAMETER Experiment Name: At_2mM_SA_P Parameter: Timepoint (hr) Value: 6
  misc_feature: MA Experiment 20000182 PARAMETER Experiment Name: At_2mM_SA_P Parameter: Tissue Value: Aerial
  misc_feature: MA Experiment 20000182 PARAMETER Experiment Name: At_2mM_SA_P Parameter: Treatment Value: 2mM SA vs. No Treatment
  misc_feature: MA Experiment ID: 20000185 Result: Down-regulated in Transcription
  misc_feature: MA Experiment 20000185 PARAMETER Experiment Name: At_Roots__P Parameter: Age (day) Value: 7 vs. 21
  misc_feature: MA Experiment 20000185 PARAMETER Experiment Name: At_Roots__P Parameter: Organism Value: A. thaliana
  misc_feature: MA Experiment 20000185 PARAMETER Experiment Name: At_Roots__P Parameter: Tissue Value: Roots vs. Whole Plant
  misc_feature: MA Experiment ID: 20000227 Result: Down-regulated in Transcription
  misc_feature: MA Experiment 20000227 PARAMETER Experiment Name: At_Root-Tips-vs-Tops_P Parameter: Tissue Value: Root Tips vs. Root Tops
  misc_feature: MA Experiment ID: 20000234 Result: Down-regulated in Transcription
  misc_feature: MA Experiment 20000234 PARAMETER Experiment Name: At_Siliques_P Parameter: Age (day) Value: 21
  misc_feature: MA Experiment 20000234 PARAMETER Experiment Name: At_Siliques_P Parameter: Organism Value: A. thaliana
  misc_feature: MA Experiment 20000234 PARAMETER Experiment Name: At_Siliques_P Parameter: Plant Line Value: WS
  misc_feature: MA Experiment 20000234 PARAMETER Experiment Name: At_Siliques_P Parameter: Tissue Value: Less Than 5mm Siliques vs. Whole Plant
  misc_feature: MA Experiment ID: 20000235 Result: Down-regulated in Transcription
  misc_feature: MA Experiment 20000235 PARAMETER Experiment Name: At_Siliques_P Parameter: Age (day) Value: 21
  misc_feature: MA Experiment 20000235 PARAMETER Experiment Name: At_Siliques_P Parameter: Organism Value: A. thaliana
  misc_feature: MA Experiment 20000235 PARAMETER Experiment Name: At_Siliques_P Parameter: Plant Line Value: WS
  misc_feature: MA Experiment 20000235 PARAMETER Experiment Name: At_Siliques_P Parameter: Tissue Value: 5-10mm Siliques vs. Whole Plant
  misc_feature: MA Experiment ID: 20000264 Result: Down-regulated in Transcription
  misc_feature: MA Experiment 20000264 PARAMETER Experiment Name: At_Open_Flower_P Parameter: Age (day) Value: 21
  misc_feature: MA Experiment 20000264 PARAMETER Experiment Name: At_Open_Flower_P Parameter: Plant Line Value: WS
  misc_feature: MA Experiment 20000264 PARAMETER Experiment Name: At_Open_Flower_P Parameter: Tissue Value: Open Flower vs. Whole Plant
  misc_feature: MA Experiment ID: 20000265 Result: Down-regulated in Transcription
  misc_feature: MA Experiment 20000265 PARAMETER Experiment Name: At_Open_Flower_P Parameter: Age (day) Value: 21
  misc_feature: MA Experiment 20000265 PARAMETER Experiment Name: At_Open_Flower_P Parameter: Plant Line Value: WS
  misc_feature: MA Experiment 20000265 PARAMETER Experiment Name: At_Open_Flower_P Parameter: Tissue Value: Closed Flower vs. Whole Plant
  misc_feature: MA Experiment ID: 20000286 Result: Down-regulated in Transcription
  misc_feature: MA Experiment 20000286 PARAMETER Experiment Name: At_Open_Flower_P Parameter: Age (day) Value: 21
  misc_feature: MA Experiment 20000286 PARAMETER Experiment Name: At_Open_Flower_P Parameter: Plant Line Value: WS
  misc_feature: MA Experiment 20000286 PARAMETER Experiment Name: At_Open_Flower_P Parameter: Tissue Value: Half Open vs. Whole Plant
  misc_feature: MA Experiment ID: 20000436 Result: Down-regulated in Transcription
  misc_feature: MA Experiment 20000436 PARAMETER Experiment Name: At_Drought_P Parameter: Age (day) Value: 7
  misc_feature: MA Experiment 20000436 PARAMETER Experiment Name: At_Drought_P Parameter: Organism Value: A. thaliana
  misc_feature: MA Experiment 20000436 PARAMETER Experiment Name: At_Drought_P Parameter: Plant Line Value: WS
  misc_feature: MA Experiment 20000436 PARAMETER Experiment Name: At_Drought_P Parameter: Timepoint (hr) Value: 12
  misc_feature: MA Experiment 20000436 PARAMETER Experiment Name: At_Drought_P Parameter: Tissue Value: Whole Plant
  misc_feature: MA Experiment 20000436 PARAMETER Experiment Name: At_Drought_P Parameter: Treatment Value: Drought vs. No Drought
  misc_feature: MA Experiment ID: 20000437 Result: Down-regulated in Transcription
  misc_feature: MA Experiment 20000437 PARAMETER Experiment Name: At_Drought_P Parameter: Age (day) Value: 8
  misc_feature: MA Experiment 20000437 PARAMETER Experiment Name: At_Drought_P Parameter: Organism Value: A. thaliana
  misc_feature: MA Experiment 20000437 PARAMETER Experiment Name: At_Drought_P Parameter: Plant Line Value: WS
  misc_feature: MA Experiment 20000437 PARAMETER Experiment Name: At_Drought_P Parameter: Timepoint (hr) Value: 24
  misc_feature: MA Experiment 20000437 PARAMETER Experiment Name: At_Drought_P Parameter: Tissue Value: Whole Plant
  misc_feature: MA Experiment 20000437 PARAMETER Experiment Name: At_Drought_P Parameter: Treatment Value: Drought vs. No Drought
  misc_feature: MA Experiment ID: 20000438 Result: Down-regulated in Transcription
  misc_feature: MA Experiment 20000438 PARAMETER Experiment Name: At_Shoots__P Parameter: Age (day) Value: 14
  misc_feature: MA Experiment 20000438 PARAMETER Experiment Name: At_Shoots__P Parameter: Tissue Value: Shoots vs. Whole Plant
  misc_feature: MA Experiment ID: 20000439 Result: Down-regulated in Transcription
  misc_feature: MA Experiment 20000439 PARAMETER Experiment Name: At_Roots__P Parameter: Age (day) Value: 14 vs. 21
  misc_feature: MA Experiment 20000439 PARAMETER Experiment Name: At_Roots__P Parameter: Organism Value: A. thaliana
  misc_feature: MA Experiment 20000439 PARAMETER Experiment Name: At_Roots__P Parameter: Tissue Value: Roots vs. Whole Plant
  misc_feature: MA Experiment ID: 20000441 Result: Up-regulated in Transcription
  misc_feature: MA Experiment 20000441 PARAMETER Experiment Name: At_1uM_BR-BRZ__P Parameter: Tissue Value: Shoot Apices
  misc_feature: MA Experiment 20000441 PARAMETER Experiment Name: At_1uM_BR-BRZ__P Parameter: Treatment Value: 1uM BR vs. No Treatment
  misc_feature: MA Experiment ID: 20000443 Result: Up-regulated in Transcription
  misc_feature: MA Experiment 20000443 PARAMETER Experiment Name: At_1uM_BR-BRZ__P Parameter: Tissue Value: Shoot Apices
  misc_feature: MA Experiment 20000443 PARAMETER Experiment Name: At_1uM_BR-BRZ__P Parameter: Treatment Value: 1uM BRZ vs. No Treatment
  misc_feature: MA Experiment ID: 20000460 Result: Up-regulated in Transcription
  misc_feature: MA Experiment 20000460 PARAMETER Experiment Name: At_10percent_PEG_P Parameter: Age (day) Value: 12
  misc_feature: MA Experiment 20000460 PARAMETER Experiment Name: At_10percent_PEG_P Parameter: Organism Value: A. thaliana
  misc_feature: MA Experiment 20000460 PARAMETER Experiment Name: At_10percent_PEG_P Parameter: Plant Line Value: WS
  misc_feature: MA Experiment 20000460 PARAMETER Experiment Name: At_10percent_PEG_P Parameter: Timepoint (day) Value: 12
  misc_feature: MA Experiment 20000460 PARAMETER Experiment Name: At_10percent_PEG_P Parameter: Tissue Value: Whole Plant
  misc_feature: MA Experiment 20000460 PARAMETER Experiment Name: At_10percent_PEG_P Parameter: Treatment Value: 10percent PEG vs. No Treatment
  misc_feature: MA Experiment ID: 20000573 Result: Down-regulated in Transcription
  misc_feature: MA Experiment 20000573 PARAMETER Experiment Name: At_100uM_ABA_Mutants__P Parameter: Organism Value: A. thaliana
  misc_feature: MA Experiment 20000573 PARAMETER Experiment Name: At_100uM_ABA_Mutants__P Parameter: Plant Line Value: CS22 vs. Ler wt
  misc_feature: MA Experiment 20000573 PARAMETER Experiment Name: At_100uM_ABA_Mutants__P Parameter: Timepoint (hr) Value: N/A
  misc_feature: MA Experiment 20000573 PARAMETER Experiment Name: At_100uM_ABA_Mutants__P Parameter: Tissue Value: Whole Plant
  misc_feature: MA Experiment 20000573 PARAMETER Experiment Name: At_100uM_ABA_Mutants__P Parameter: Treatment Value: None
  misc_feature: MA Experiment ID: 20000574 Result: Down-regulated in Transcription
  misc_feature: MA Experiment 20000574 PARAMETER Experiment Name: At_100uM_ABA_Mutants__P Parameter: Organism Value: A. thaliana
  misc_feature: MA Experiment 20000574 PARAMETER Experiment Name: At_100uM_ABA_Mutants__P Parameter: Plant Line Value: CS23 vs. Ler wt
  misc_feature: MA Experiment 20000574 PARAMETER Experiment Name: At_100uM_ABA_Mutants__P Parameter: Timepoint (hr) Value: N/A
  misc_feature: MA Experiment 20000574 PARAMETER Experiment Name: At_100uM_ABA_Mutants__P Parameter: Tissue Value: Whole Plant
  misc_feature: MA Experiment 20000574 PARAMETER Experiment Name: At_100uM_ABA_Mutants__P Parameter: Treatment Value: None
  misc_feature: MA Experiment ID: 20000576 Result: Down-regulated in Transcription
  misc_feature: MA Experiment 20000576 PARAMETER Experiment Name: At_100uM_ABA_Mutants__P Parameter: Organism Value: A. thaliana
  misc_feature: MA Experiment 20000576 PARAMETER Experiment Name: At_100uM_ABA_Mutants__P Parameter: Plant Line Value: CS23
  misc_feature: MA Experiment 20000576 PARAMETER Experiment Name: At_100uM_ABA_Mutants__P Parameter: Timepoint (hr) Value: 6
  misc_feature: MA Experiment 20000576 PARAMETER Experiment Name: At_100uM_ABA_Mutants__P Parameter: Tissue Value: Whole Plant
  misc_feature: MA Experiment 20000576 PARAMETER Experiment Name: At_100uM_ABA_Mutants__P Parameter: Treatment Value: 1uM ABA vs. No Treatment
  misc_feature: MA Experiment ID: 20000709 Result: Up-regulated in Transcription
  misc_feature: MA Experiment 20000709 PARAMETER Experiment Name: At_15mM_NH4NO3_L-to-H_P Parameter: Age (hr) Value: 14
  misc_feature: MA Experiment 20000709 PARAMETER Experiment Name: At_15mM_NH4NO3_L-to-H_P Parameter: Organism Value: A. thaliana
  misc_feature: MA Experiment 20000709 PARAMETER Experiment Name: At_15mM_NH4NO3_L-to-H_P Parameter: Plant Line Value: WS
  misc_feature: MA Experiment 20000709 PARAMETER Experiment Name: At_15mM_NH4NO3_L-to-H_P Parameter: Timepoint (hr) Value: 4
  misc_feature: MA Experiment 20000709 PARAMETER Experiment Name: At_15mM_NH4NO3_L-to-H_P Parameter: Tissue Value: Aerial
  misc_feature: MA Experiment 20000709 PARAMETER Experiment Name: At_15mM_NH4NO3_L-to-H_P Parameter: Treatment Value: 15mM NH4NO3 vs. 30mM Mannitol
  misc_feature: MA Experiment ID: 20000794 Result: Down-regulated in Transcription
  misc_feature: MA Experiment 20000794 PARAMETER Experiment Name: At_Petals_P Parameter: Age (day) Value: 23-25 days
  misc_feature: MA Experiment 20000794 PARAMETER Experiment Name: At_Petals_P Parameter: Plant Line Value: WS
  misc_feature: MA Experiment 20000794 PARAMETER Experiment Name: At_Petals_P Parameter: Tissue Value: Petals vs. Whole plant
  misc_feature: MA Experiment ID: 20001556 Result: Down-regulated in Transcription
  misc_feature: MA Experiment 20001556 PARAMETER Experiment Name: At_Drought_Soil_Dry_P Parameter: Age (day) Value: 26
  misc_feature: MA Experiment 20001556 PARAMETER Experiment Name: At_Drought_Soil_Dry_P Parameter: Organism Value: A. thaliana
  misc_feature: MA Experiment 20001556 PARAMETER Experiment Name: At_Drought_Soil_Dry_P Parameter: Plant Line Value: WS
  misc_feature: MA Experiment 20001556 PARAMETER Experiment Name: At_Drought_Soil_Dry_P Parameter: Post Timepoint (hr) Value: None
  misc_feature: MA Experiment 20001556 PARAMETER Experiment Name: At_Drought_Soil_Dry_P Parameter: Post-Treatment Value: None
  misc_feature: MA Experiment 20001556 PARAMETER Experiment Name: At_Drought_Soil_Dry_P Parameter: Timepoint (day) Value: 12
  misc_feature: MA Experiment 20001556 PARAMETER Experiment Name: At_Drought_Soil_Dry_P Parameter: Treatment Value: Drought vs. No Drought
  misc_feature: MA Experiment ID: 20001904 Result: Down-regulated in Transcription
  misc_feature: MA Experiment 20001904 PARAMETER Experiment Name: At_Drought_Reproduction_P Parameter: Age (day) Value: 37
  misc_feature: MA Experiment 20001904 PARAMETER Experiment Name: At_Drought_Reproduction_P Parameter: Organism Value: A. thaliana
  misc_feature: MA Experiment 20001904 PARAMETER Experiment Name: At_Drought_Reproduction_P Parameter: Plant Line Value: WS
  misc_feature: MA Experiment 20001904 PARAMETER Experiment Name: At_Drought_Reproduction_P Parameter: Timepoint (day) Value: 7
  misc_feature: MA Experiment 20001904 PARAMETER Experiment Name: At_Drought_Reproduction_P Parameter: Tissue Value: Rosettes
  misc_feature: MA Experiment 20001904 PARAMETER Experiment Name: At_Drought_Reproduction_P Parameter: Treatment Value: Drought vs. No Drought
aataaacgaatttttttattaacgttcttcttttttgaagaatcatataatcatccaacaaagaaaaatcaaaattataaaaccaataaacagtcgccacgtgccacttcaacaacctcgcacttcaccgagagctggggagatttgccgttgaaagaaaacgattctgaggatatgttagtttacggtatcctcaacgacgcctttcacggcggttgggagccgtcttcttcgtcttccgacgaagatcgtagctctttcccgagtgttaagatcgagactccggagagtttcgcggcggtggattctgttccggtcaagaaggagaagacgagtcctgtttcggcggcggtgacggcggcgaagggaaagcattatagaggagtgagacaaaggccgtgggggaaatttgcggcggagattagagacccggcgaagaacggagctagggtttggttagggacgtttgagacggcggaggacgcggcgttggcttacgacagagctgctttcaggatgcgtggttcccgcgctttgttgaattttccgttgagagttaattcaggagaacccgacccggttcggattaagtccaagagatcttcttttccttcttctaacgagaacggagctccgaagaagaggagaacggtggccgccggtggtggaatggataaggggttgacggtgaagtgcgaggttgttgaagtggcacgtggcgatcatttattggttttataattttgatttttctttgttggattatatgattcttcaaaaaagaagaacgttaataaaaaaattcgttt

SEQ ID NO: 43514 - protein, 246 aa, Arabidopsis thaliana
  peptide (1)..(246): Ceres Seq. ID no. 12602865
  misc_feature (123)..(188): Pfam Name: AP2 domain Pfam Description: AP2 domain
  misc_feature (43)..(246): Homolog of NCBI NO: 7489077 NR Description: transcription factor Pti4 - tomato (fragment)
  misc_feature (43)..(220): Homolog of NCBI NO: 28274828 NR Description: ethylene response factor 1 [Lycopersicon
  misc_feature (43)..(245): Homolog of NCBI NO: 7489113 NR Description: DNA binding protein EREBP-2 - common tobacco
  misc_feature (43)..(216): Homolog of NCBI NO: 7528276 NR Description: AP2-related transcription factor
  misc_feature (36)..(245): Homolog of NCBI NO: 21592595 NR Description: ethylene responsive element binding factor 2
  misc_feature (36)..(245): Homolog of NCBI NO: 15238041 NR Description: ethylene responsive element binding factor 2
  misc_feature (59)..(246): Homolog of NCBI NO: 18414897 NR Description: ethylene responsive element binding factor 1
  misc_feature (42)..(246): Homolog of NCBI NO: 25350258 NR Description: ethylene responsive element binding factor 1
  misc_feature (42)..(246): Homolog of NCBI NO: 25350257 NR Description: EREBP-2 protein [imported] - Arabidopsis thaliana
  misc_feature (42)..(246): Homolog of NCBI NO: 21264420 NR Description: Ethylene responsive element binding factor 1
NKRIFLLTFFFFEESYNHPTKKNQNYKTNKQSPRATSTTSHFTESWGDLPLKENDSEDMLVYGILNDAFHGGWEPSSSSSDEDRSSFPSVKIETPESFAAVDSVPVKKEKTSPVSAAVTAAKGKHYRGVRQRPWGKFAAEIRDPAKNGARVWLGTFETAEDAALAYDRAAFRMRGSRALLNFPLRVNSGEPDPVRIKSKRSSFPSSNENGAPKKRRTVAAGGGMDKGLTVKCEVVEVARGDHLLVL

SEQ ID NO: 43515 - protein, 188 aa, Arabidopsis thaliana
  peptide (1)..(188): Ceres Seq. ID no. 12602866
  misc_feature (65)..(130): Pfam Name: AP2 domain Pfam Description: AP2 domain
  misc_feature (1)..(188): Homolog of NCBI NO: 7489077 NR Description: transcription factor Pti4 - tomato (fragment)
  misc_feature (1)..(162): Homolog of NCBI NO: 28274828 NR Description: ethylene response factor 1 [Lycopersicon
  misc_feature (1)..(187): Homolog of NCBI NO: 7489113 NR Description: DNA binding protein EREBP-2 - common tobacco
  misc_feature (1)..(158): Homolog of NCBI NO: 7528276 NR Description: AP2-related transcription factor
  misc_feature (1)..(187): Homolog of NCBI NO: 21592595 NR Description: ethylene responsive element binding factor 2
  misc_feature (1)..(187): Homolog of NCBI NO: 15238041 NR Description: ethylene responsive element binding factor 2
  misc_feature (1)..(188): Homolog of NCBI NO: 18414897 NR Description: ethylene responsive element binding factor 1
  misc_feature (1)..(188): Homolog of NCBI NO: 25350258 NR Description: ethylene responsive element binding factor 1
  misc_feature (1)..(188): Homolog of NCBI NO: 25350257 NR Description: EREBP-2 protein [imported] - Arabidopsis thaliana
  misc_feature (1)..(188): Homolog of NCBI NO: 21264420 NR Description: Ethylene responsive element binding factor 1
MLVYGILNDAFHGGWEPSSSSSDEDRSSFPSVKIETPESFAAVDSVPVKKEKTSPVSAAVTAAKGKHYRGVRQRPWGKFAAEIRDPAKNGARVWLGTFETAEDAALAYDRAAFRMRGSRALLNFPLRVNSGEPDPVRIKSKRSSFPSSNENGAPKKRRTVAAGGGMDKGLTVKCEVVEVARGDHLLVL

SEQ ID NO: 43516 - DNA, 1051 bp, Arabidopsis thaliana
  misc_feature (1)..(1051): Ceres Seq. ID no. 12602869
  misc_feature: MA Experiment ID: 20000166 Result: Up-regulated in Transcription
  misc_feature: MA Experiment 20000166 PARAMETER Experiment Name: At_100uM_ABA_P Parameter: Age (day) Value: 14
  misc_feature: MA Experiment 20000166 PARAMETER Experiment Name: At_100uM_ABA_P Parameter: Organism Value: A. thaliana
  misc_feature: MA Experiment 20000166 PARAMETER Experiment Name: At_100uM_ABA_P Parameter: Plant Line Value: WS
  misc_feature: MA Experiment 20000166 PARAMETER Experiment Name: At_100uM_ABA_P Parameter: Timepoint (hr) Value: 1
  misc_feature: MA Experiment 20000166 PARAMETER Experiment Name: At_100uM_ABA_P Parameter: Tissue Value: Aerial
  misc_feature: MA Experiment 20000166 PARAMETER Experiment Name: At_100uM_ABA_P Parameter: Treatment Value: 100uM ABA vs. No Treatment
  misc_feature: MA Experiment ID: 20000173 Result: Up-regulated in Transcription
  misc_feature: MA Experiment 20000173 PARAMETER Experiment Name: At_42deg_Heat_P Parameter: Age (day) Value: 14
  misc_feature: MA Experiment 20000173 PARAMETER Experiment Name: At_42deg_Heat_P Parameter: Organism Value: A. thaliana
  misc_feature: MA Experiment 20000173 PARAMETER Experiment Name: At_42deg_Heat_P Parameter: Plant Line Value: WS
  misc_feature: MA Experiment 20000173 PARAMETER Experiment Name: At_42deg_Heat_P Parameter: Temperature (deg C) Value: 42 vs. 22
  misc_feature: MA Experiment 20000173 PARAMETER Experiment Name: At_42deg_Heat_P Parameter: Timepoint (hr) Value: 6
  misc_feature: MA Experiment 20000173 PARAMETER Experiment Name: At_42deg_Heat_P Parameter: Tissue Value: Aerial
  misc_feature: MA Experiment ID: 20000182 Result: Up-regulated in Transcription
  misc_feature: MA Experiment 20000182 PARAMETER Experiment Name: At_2mM_SA_P Parameter: Age (day) Value: 14
  misc_feature: MA Experiment 20000182 PARAMETER Experiment Name: At_2mM_SA_P Parameter: Organism Value: A. thaliana
  misc_feature: MA Experiment 20000182 PARAMETER Experiment Name: At_2mM_SA_P Parameter: Plant Line Value: WS
  misc_feature: MA Experiment 20000182 PARAMETER Experiment Name: At_2mM_SA_P Parameter: Timepoint (hr) Value: 6
  misc_feature: MA Experiment 20000182 PARAMETER Experiment Name: At_2mM_SA_P Parameter: Tissue Value: Aerial
  misc_feature: MA Experiment 20000182 PARAMETER Experiment Name: At_2mM_SA_P Parameter: Treatment Value: 2mM SA vs. No Treatment
  misc_feature: MA Experiment ID: 20000227 Result: Down-regulated in Transcription
  misc_feature: MA Experiment 20000227 PARAMETER Experiment Name: At_Root-Tips-vs-Tops_P Parameter: Tissue Value: Root Tips vs. Root Tops
  misc_feature: MA Experiment ID: 20000264 Result: Up-regulated in Transcription
  misc_feature: MA Experiment 20000264 PARAMETER Experiment Name: At_Open_Flower_P Parameter: Age (day) Value: 21
  misc_feature: MA Experiment 20000264 PARAMETER Experiment Name: At_Open_Flower_P Parameter: Plant Line Value: WS
  misc_feature: MA Experiment 20000264 PARAMETER Experiment Name: At_Open_Flower_P Parameter: Tissue Value: Open Flower vs. Whole Plant
  misc_feature: MA Experiment ID: 20000286 Result: Up-regulated in Transcription
  misc_feature: MA Experiment 20000286 PARAMETER Experiment Name: At_Open_Flower_P Parameter: Age (day) Value: 21
  misc_feature: MA Experiment 20000286 PARAMETER Experiment Name: At_Open_Flower_P Parameter: Plant Line Value: WS
  misc_feature: MA Experiment 20000286 PARAMETER Experiment Name: At_Open_Flower_P Parameter: Tissue Value: Half Open vs. Whole Plant
  misc_feature: MA Experiment ID: 20000437 Result: Up-regulated in Transcription
  misc_feature: MA Experiment 20000437 PARAMETER Experiment Name: At_Drought_P Parameter: Age (day) Value: 8
  misc_feature: MA Experiment 20000437 PARAMETER Experiment Name: At_Drought_P Parameter: Organism Value: A. thaliana
  misc_feature: MA Experiment 20000437 PARAMETER Experiment Name: At_Drought_P Parameter: Plant Line Value: WS
  misc_feature: MA Experiment 20000437 PARAMETER Experiment Name: At_Drought_P Parameter: Timepoint (hr) Value: 24
  misc_feature: MA Experiment 20000437 PARAMETER Experiment Name: At_Drought_P Parameter: Tissue Value: Whole Plant
  misc_feature: MA Experiment 20000437 PARAMETER Experiment Name: At_Drought_P Parameter: Treatment Value: Drought vs. No Drought
  misc_feature: MA Experiment ID: 20000453 Result: Up-regulated in Transcription
  misc_feature: MA Experiment 20000453 PARAMETER Experiment Name: At_100uM_ABA_P Parameter: Age (day) Value: 15
  misc_feature: MA Experiment 20000453 PARAMETER Experiment Name: At_100uM_ABA_P Parameter: Organism Value: A. thaliana
  misc_feature: MA Experiment 20000453 PARAMETER Experiment Name: At_100uM_ABA_P Parameter: Plant Line Value: WS
  misc_feature: MA Experiment 20000453 PARAMETER Experiment Name: At_100uM_ABA_P Parameter: Timepoint (hr) Value: 24
  misc_feature: MA Experiment 20000453 PARAMETER Experiment Name: At_100uM_ABA_P Parameter: Tissue Value: Aerial
  misc_feature: MA Experiment 20000453 PARAMETER Experiment Name: At_100uM_ABA_P Parameter: Treatment Value: 100uM ABA vs. No Treatment
  misc_feature: MA Experiment ID: 20000574 Result: Up-regulated in Transcription
  misc_feature: MA Experiment 20000574 PARAMETER Experiment Name: At_100uM_ABA_Mutants__P Parameter: Organism Value: A. thaliana
  misc_feature: MA Experiment 20000574 PARAMETER Experiment Name: At_100uM_ABA_Mutants__P Parameter: Plant Line Value: CS23 vs. Ler wt
  misc_feature: MA Experiment 20000574 PARAMETER Experiment Name: At_100uM_ABA_Mutants__P Parameter: Timepoint (hr) Value: N/A
  misc_feature: MA Experiment 20000574 PARAMETER Experiment Name: At_100uM_ABA_Mutants__P Parameter: Tissue Value: Whole Plant
  misc_feature: MA Experiment 20000574 PARAMETER Experiment Name: At_100uM_ABA_Mutants__P Parameter: Treatment Value: None
  misc_feature: MA Experiment ID: 20000794 Result: Up-regulated in Transcription
  misc_feature: MA Experiment 20000794 PARAMETER Experiment Name: At_Petals_P Parameter: Age (day) Value: 23-25 days
  misc_feature: MA Experiment 20000794 PARAMETER Experiment Name: At_Petals_P Parameter: Plant Line Value: WS
  misc_feature: MA Experiment 20000794 PARAMETER Experiment Name: At_Petals_P Parameter: Tissue Value: Petals vs. Whole plant
  misc_feature: MA Experiment ID: 20001560 Result: Down-regulated in Transcription
  misc_feature: MA Experiment 20001560 PARAMETER Experiment Name: At_Drought_Soil_Dry_P Parameter: Age (day) Value: 28
  misc_feature: MA Experiment 20001560 PARAMETER Experiment Name: At_Drought_Soil_Dry_P Parameter: Organism Value: A. thaliana
  misc_feature: MA Experiment 20001560 PARAMETER Experiment Name: At_Drought_Soil_Dry_P Parameter: Plant Line Value: WS
  misc_feature: MA Experiment 20001560 PARAMETER Experiment Name: At_Drought_Soil_Dry_P Parameter: Post Timepoint (hr) Value: None
  misc_feature: MA Experiment 20001560 PARAMETER Experiment Name: At_Drought_Soil_Dry_P Parameter: Post-Treatment Value: None
  misc_feature: MA Experiment 20001560 PARAMETER Experiment Name: At_Drought_Soil_Dry_P Parameter: Timepoint (day) Value: 14
  misc_feature: MA Experiment 20001560 PARAMETER Experiment Name: At_Drought_Soil_Dry_P Parameter: Treatment Value: Drought vs. No Drought
  misc_feature: MA Experiment ID: 20001905 Result: Up-regulated in Transcription
  misc_feature: MA Experiment 20001905 PARAMETER Experiment Name: At_Drought_Reproduction_P Parameter: Age (day) Value: 40
  misc_feature: MA Experiment 20001905 PARAMETER Experiment Name: At_Drought_Reproduction_P Parameter: Organism Value: A. thaliana
  misc_feature: MA Experiment 20001905 PARAMETER Experiment Name: At_Drought_Reproduction_P Parameter: Plant Line Value: WS
  misc_feature: MA Experiment 20001905 PARAMETER Experiment Name: At_Drought_Reproduction_P Parameter: Timepoint (day) Value: 10
  misc_feature: MA Experiment 20001905 PARAMETER Experiment Name: At_Drought_Reproduction_P Parameter: Tissue Value: Rosettes
  misc_feature: MA Experiment 20001905 PARAMETER Experiment Name: At_Drought_Reproduction_P Parameter: Treatment Value: Drought vs. No Drought
  misc_feature: MA Experiment ID: 20001906 Result: Up-regulated in Transcription
  misc_feature: MA Experiment 20001906 PARAMETER Experiment Name: At_Drought_Reproduction_P Parameter: Age (day) Value: 35
  misc_feature: MA Experiment 20001906 PARAMETER Experiment Name: At_Drought_Reproduction_P Parameter: Organism Value: A. thaliana
  misc_feature: MA Experiment 20001906 PARAMETER Experiment Name: At_Drought_Reproduction_P Parameter: Plant Line Value: WS
  misc_feature: MA Experiment 20001906 PARAMETER Experiment Name: At_Drought_Reproduction_P Parameter: Timepoint (day) Value: 5
  misc_feature: MA Experiment 20001906 PARAMETER Experiment Name: At_Drought_Reproduction_P Parameter: Tissue Value: Siliques
  misc_feature: MA Experiment 20001906 PARAMETER Experiment Name: At_Drought_Reproduction_P Parameter: Treatment Value: Drought vs. No Drought
  misc_feature: MA Experiment ID: 20001911 Result: Up-regulated in Transcription
  misc_feature: MA Experiment 20001911 PARAMETER Experiment Name: At_Drought_Reproduction_P Parameter: Age (day) Value: 40
  misc_feature: MA Experiment 20001911 PARAMETER Experiment Name: At_Drought_Reproduction_P Parameter: Organism Value: A. thaliana
  misc_feature: MA Experiment 20001911 PARAMETER Experiment Name: At_Drought_Reproduction_P Parameter: Plant Line Value: WS
  misc_feature: MA Experiment 20001911 PARAMETER Experiment Name: At_Drought_Reproduction_P Parameter: Timepoint (day) Value: 10
  misc_feature: MA Experiment 20001911 PARAMETER Experiment Name: At_Drought_Reproduction_P Parameter: Tissue Value: Flowers
  misc_feature: MA Experiment 20001911 PARAMETER Experiment Name: At_Drought_Reproduction_P Parameter: Treatment Value: Drought vs. No Drought
aaaaaaaaccaaagttcaacacaatccatcacatccatttcaatagaagacgaagaacgtttcagaatcatcaaccaaattcagaaaatttcagccatgacaggatcacaagaagaccaacctaagatcatcattgatcaagagcaacccaaaactctagaaacagagcaccaaccagaaccttcttcatcgtctccggatcagaagaaatggggtactcacgtgatgggagctccggcagctccagttgctcatcccgataaccaacaggcggcggcgtgggtcgctggagataaccagcagacgcagtaccaaccgtacgtcatctactctcctgtcgaacatccaacaactaacaaccctctcgagccagtcatcggaatgttccatacctggagtcgcaaggcagaaaccgtcgcacgtaacctctggcacaatctgaagacaggaccgtctatgtcggaaacggcgtgggggaaggttaatttgacggccaaagcgataacaaaaggaggattcgagtcgcttttcagacagattttcggaacagagccaaacgagacgctgaagaaaactttcgcttgttatctctcgacgacgacaggtcctgttgctggaactgtctatctttcgaatgctcgtgtcgctttttgtagcgatcgtcctctgtacttcacagcaccttctggtcaagaatcttggagctactacagggtggttgtacctttggcgaatgtagcgacggtgaatccggtggtggtgaaagagactccacctgagaagtatattcagttgacgacggtggatggtcatgacttctggttcatgggttttgtgaattatgagaaggctacgcatcatctgctgaccagtgtctccgattttcaaaccgcacacggctctgtgtctggttaaaacatactattcctctaatgtttttctttagttgtgtggttggtttctgctgcttctcatgtttctatatgtttatgtaaattatataccagagctggacttttgtgtgttgattcagagttggtttcacttattc

SEQ ID NO: 43517 - protein, 304 aa, Arabidopsis thaliana
  peptide (1)..(304): Ceres Seq. ID no. 12602870
  misc_feature (175)..(253): Pfam Name: GRAM domain Pfam Description: GRAM domain
  misc_feature (72)..(296): Homolog of NCBI NO: 38344445 NR Description: OSJNBa0038O10.17 [Oryza sativa (japonica
  misc_feature (74)..(288): Homolog of NCBI NO: 29788871 NR Description: putative ABA-responsive protein
  misc_feature (60)..(292): Homolog of NCBI NO: 15217869 NR Description: FH protein interacting protein FIP1
  misc_feature (125)..(292): Homolog of NCBI NO: 34906818 NR Description: contains EST C91668(E31216)~similar to FH protein
  misc_feature (106)..(296): Homolog of NCBI NO: 34902414 NR Description: Putative FH protein interacting protein FIP1
  misc_feature (31)..(292): Homolog of NCBI NO: 26452129 NR Description: unknown protein [Arabidopsis thaliana]
  misc_feature (31)..(292): Homolog of NCBI NO: 21592789 NR Description: unknown [Arabidopsis thaliana]
  misc_feature (31)..(292): Homolog of NCBI NO: 18399985 NR Description: Expressed protein
  misc_feature (50)..(272): Homolog of NCBI NO: 11281146 NR Description: ABA-responsive protein - barley
  misc_feature (33)..(304): Homolog of NCBI NO: 15240044 NR Description: ABA-responsive protein - like; protein id:
KKNQSSTQSITSISIEDEERFRIINQIQKISAMTGSQEDQPKIIIDQEQPKTLETEHQPEPSSSSPDQKKWGTHVMGAPAAPVAHPDNQQAAAWVAGDNQQTQYQPYVIYSPVEHPTTNNPLEPVIGMFHTWSRKAETVARNLWHNLKTGPSMSETAWGKVNLTAKAITKGGFESLFRQIFGTEPNETLKKTFACYLSTTTGPVAGTVYLSNARVAFCSDRPLYFTAPSGQESWSYYRVVVPLANVATVNPVVVKETPPEKYIQLTTVDGHDFWFMGFVNYEKATHHLLTSVSDFQTAHGSVSG

SEQ ID NO: 43518 - protein, 272 aa, Arabidopsis thaliana
  peptide (1)..(272): Ceres Seq. ID no. 12602871
  misc_feature (143)..(221): Pfam Name: GRAM domain Pfam Description: GRAM domain
  misc_feature (40)..(264): Homolog of NCBI NO: 38344445 NR Description: OSJNBa0038O10.17 [Oryza sativa (japonica
  misc_feature (42)..(256): Homolog of NCBI NO: 29788871 NR Description: putative ABA-responsive protein
  misc_feature (28)..(260): Homolog of NCBI NO: 15217869 NR Description: FH protein interacting protein FIP1
  misc_feature (93)..(260): Homolog of NCBI NO: 34906818 NR Description: contains EST C91668(E31216)~similar to FH protein
  misc_feature (74)..(264): Homolog of NCBI NO: 34902414 NR Description: Putative FH protein interacting protein FIP1
  misc_feature (1)..(260): Homolog of NCBI NO: 26452129 NR Description: unknown protein [Arabidopsis thaliana]
  misc_feature (1)..(260): Homolog of NCBI NO: 21592789 NR Description: unknown [Arabidopsis thaliana]
  misc_feature (1)..(260): Homolog of NCBI NO: 18399985 NR Description: Expressed protein
  misc_feature (18)..(240): Homolog of NCBI NO: 11281146 NR Description: ABA-responsive protein - barley
  misc_feature (1)..(272): Homolog of NCBI NO: 15240044 NR Description: ABA-responsive protein - like; protein id:
MTGSQEDQPKIIIDQEQPKTLETEHQPEPSSSSPDQKKWGTHVMGAPAAPVAHPDNQQAAAWVAGDNQQTQYQPYVIYSPVEHPTTNNPLEPVIGMFHTWSRKAETVARNLWHNLKTGPSMSETAWGKVNLTAKAITKGGFESLFRQIFGTEPNETLKKTFACYLSTTTGPVAGTVYLSNARVAFCSDRPLYFTAPSGQESWSYYRVVVPLANVATVNPVVVKETPPEKYIQLTTVDGHDFWFMGFVNYEKATHHLLTSVSDFQTAHGSVSG

SEQ ID NO: 43519 - protein, 229 aa, Arabidopsis thaliana
  peptide (1)..(229): Ceres Seq. ID no. 12602872
  misc_feature (100)..(178): Pfam Name: GRAM domain Pfam Description: GRAM domain
  misc_feature (1)..(221): Homolog of NCBI NO: 38344445 NR Description: OSJNBa0038O10.17 [Oryza sativa (japonica
  misc_feature (1)..(213): Homolog of NCBI NO: 29788871 NR Description: putative ABA-responsive protein
  misc_feature (1)..(217): Homolog of NCBI NO: 15217869 NR Description: FH protein interacting protein FIP1
  misc_feature (50)..(217): Homolog of NCBI NO: 34906818 NR Description: contains EST C91668(E31216)~similar to FH protein
  misc_feature (31)..(221): Homolog of NCBI NO: 34902414 NR Description: Putative FH protein interacting protein FIP1
  misc_feature (1)..(217): Homolog of NCBI NO: 26452129 NR Description: unknown protein [Arabidopsis thaliana]
  misc_feature (1)..(217): Homolog of NCBI NO: 21592789 NR Description: unknown [Arabidopsis thaliana]
  misc_feature (1)..(217): Homolog of NCBI NO: 18399985 NR Description: Expressed protein
  misc_feature (1)..(197): Homolog of NCBI NO: 11281146 NR Description: ABA-responsive protein - barley
  misc_feature (1)..(229): Homolog of NCBI NO: 15240044 NR Description: ABA-responsive protein - like; protein id:
MGAPAAPVAHPDNQQAAAWVAGDNQQTQYQPYVIYSPVEHPTTNNPLEPVIGMFHTWSRKAETVARNLWHNLKTGPSMSETAWGKVNLTAKAITKGGFESLFRQIFGTEPNETLKKTFACYLSTTTGPVAGTVYLSNARVAFCSDRPLYFTAPSGQESWSYYRVVVPLANVATVNPVVVKETPPEKYIQLTTVDGHDFWFMGFVNYEKATHHLLTSVSDFQTAHGSVSG

SEQ ID NO: 43520 - DNA, 871 bp, Arabidopsis thaliana
  misc_feature (1)..(871): Ceres Seq. ID no. 13592792
  misc_feature: MA Experiment ID: 20000173 Result: Down-regulated in Transcription
  misc_feature: MA Experiment 20000173 PARAMETER Experiment Name: At_42deg_Heat_P Parameter: Age (day) Value: 14
  misc_feature: MA Experiment 20000173 PARAMETER Experiment Name: At_42deg_Heat_P Parameter: Organism Value: A. thaliana
  misc_feature: MA Experiment 20000173 PARAMETER Experiment Name: At_42deg_Heat_P Parameter: Plant Line Value: WS
  misc_feature: MA Experiment 20000173 PARAMETER Experiment Name: At_42deg_Heat_P Parameter: Temperature (deg C) Value: 42 vs. 22
  misc_feature: MA Experiment 20000173 PARAMETER Experiment Name: At_42deg_Heat_P Parameter: Timepoint (hr) Value: 6
  misc_feature: MA Experiment 20000173 PARAMETER Experiment Name: At_42deg_Heat_P Parameter: Tissue Value: Aerial
  misc_feature: MA Experiment ID: 20000184 Result: Down-regulated in Transcription
  misc_feature: MA Experiment 20000184 PARAMETER Experiment Name: At_Shoots__P Parameter: Age (day) Value: 7
  misc_feature: MA Experiment 20000184 PARAMETER Experiment Name: At_Shoots__P Parameter: Tissue Value: Shoots vs. Whole Plant
  misc_feature: MA Experiment ID: 20000234 Result: Down-regulated in Transcription
  misc_feature: MA Experiment 20000234 PARAMETER Experiment Name: At_Siliques_P Parameter: Age (day) Value: 21
  misc_feature: MA Experiment 20000234 PARAMETER Experiment Name: At_Siliques_P Parameter: Organism Value: A. thaliana
  misc_feature: MA Experiment 20000234 PARAMETER Experiment Name: At_Siliques_P Parameter: Plant Line Value: WS
  misc_feature: MA Experiment 20000234 PARAMETER Experiment Name: At_Siliques_P Parameter: Tissue Value: Less Than 5mm Siliques vs. Whole Plant
  misc_feature: MA Experiment ID: 20000264 Result: Down-regulated in Transcription
  misc_feature: MA Experiment 20000264 PARAMETER Experiment Name: At_Open_Flower_P Parameter: Age (day) Value: 21
  misc_feature: MA Experiment 20000264 PARAMETER Experiment Name: At_Open_Flower_P Parameter: Plant Line Value: WS
  misc_feature: MA Experiment 20000264 PARAMETER Experiment Name: At_Open_Flower_P Parameter: Tissue Value: Open Flower vs. Whole Plant
  misc_feature: MA Experiment ID: 20000495 Result: Down-regulated in Transcription
  misc_feature: MA Experiment 20000495 PARAMETER Experiment Name: At_Guard_Cells_P Parameter: Harvest Date Value: 8/2/2002
  misc_feature: MA Experiment 20000495 PARAMETER Experiment Name: At_Guard_Cells_P Parameter: Organism Value: A. thaliana
  misc_feature: MA Experiment 20000495 PARAMETER Experiment Name: At_Guard_Cells_P Parameter: Tissue Value: Guard Cells vs. Leaves
  misc_feature: MA Experiment ID: 20000496 Result: Down-regulated in Transcription
  misc_feature: MA Experiment 20000496 PARAMETER Experiment Name: At_Guard_Cells_P Parameter: Harvest Date Value: 7/19/2002
  misc_feature: MA Experiment 20000496 PARAMETER Experiment Name: At_Guard_Cells_P Parameter: Organism Value: Canola
  misc_feature: MA Experiment 20000496 PARAMETER Experiment Name: At_Guard_Cells_P Parameter: Tissue Value: Guard Cells vs. Leaves
  misc_feature: MA Experiment ID: 20001451 Result: Down-regulated in Transcription
  misc_feature: MA Experiment 20001451 PARAMETER Experiment Name: At_Far-red-induction_P Parameter: Age (day) Value: 7
  misc_feature: MA Experiment 20001451 PARAMETER Experiment Name: At_Far-red-induction_P Parameter: Light Value: Far-red vs. White
  misc_feature: MA Experiment 20001451 PARAMETER Experiment Name: At_Far-red-induction_P Parameter: Organism Value: A. thaliana
  misc_feature: MA Experiment 20001451 PARAMETER Experiment Name: At_Far-red-induction_P Parameter: Plant Line Value: Columbia
  misc_feature: MA Experiment 20001451 PARAMETER Experiment Name: At_Far-red-induction_P Parameter: Timepoint (hr) Value: 24
  misc_feature: MA Experiment 20001451 PARAMETER Experiment Name: At_Far-red-induction_P Parameter: Tissue Value: Whole Plant
  misc_feature: MA Experiment ID: 20001560 Result: Down-regulated in Transcription
  misc_feature: MA Experiment 20001560 PARAMETER Experiment Name: At_Drought_Soil_Dry_P Parameter: Age (day) Value: 28
  misc_feature: MA Experiment 20001560 PARAMETER Experiment Name: At_Drought_Soil_Dry_P Parameter: Organism Value: A. thaliana
  misc_feature: MA Experiment 20001560 PARAMETER Experiment Name: At_Drought_Soil_Dry_P Parameter: Plant Line Value: WS
  misc_feature: MA Experiment 20001560 PARAMETER Experiment Name: At_Drought_Soil_Dry_P Parameter: Post Timepoint (hr) Value: None
  misc_feature: MA Experiment 20001560 PARAMETER Experiment Name: At_Drought_Soil_Dry_P Parameter: Post-Treatment Value: None
  misc_feature: MA Experiment 20001560 PARAMETER Experiment Name: At_Drought_Soil_Dry_P Parameter: Timepoint (day) Value: 14
  misc_feature: MA Experiment 20001560 PARAMETER Experiment Name: At_Drought_Soil_Dry_P Parameter: Treatment Value: Drought vs. No Drought
atcgcatttcagttgttcaacttcttcgtcgtcgtcttcttcctttgctccgtcgtcgagatctcgtcgatcctcaaatctcaaatctcctgtaaccagatcgtctaattatccgatctgcgtttcgaatctcagatcgaagatgccggtggctgcttccgccatctattttctgaatctccgtggcgatgtactcataaatcgcacctaccgagatgacgtcgggggaaacatggtggatgcatttcgtacgcatataatgcagacgaaagagttagggaattgtcctgtgcgtcagattggtggctgctcctttgtttatatgcgaatcagcaatgtctacattgtcattgttgtcagtagcaatgctaacgttgcttgtggattcaaattcgttgttgaggctgttgctttgttcaaatcatactttggtggagcttttgatgaagacgctattagaaataactttgttctgatttatgaattgttggacgagattatggactttggctatccacaaaatctctcccctgaaattttgaaactttatatcactcaggaaggtgtacggtcaccattttcatcgaagccaaaggacaagcctgttccaaatgcaacattacaagttacgggtgctgttggttggagaagagagggccttgcttataaaaagaatgaggtgtttctggatattgtggaaagtgtaaaccttctgatgtcctctaaaggcaacgttcttcggtgtgatgtgaccgggaaagttttaatgaaatgtttcctttcgggaatgcctgatttgaagttggggttgaatgataaaattggtcttgagaaggaatcagaaatgaaatctcgcccagctaagagtggt

SEQ ID NO: 43521 - protein, 290 aa, Arabidopsis thaliana
  peptide (1)..(290): Ceres Seq. ID no. 13592793
  misc_feature (55)..(289): Pfam Name: Adaptor complexes medium subunit family Pfam Description: Adaptor complexes medium subunit family
  misc_feature (55)..(289): Homolog of NCBI NO: 15489411 NR Description: Unknown (protein for MGC:9329) [Homo sapiens]
  misc_feature (55)..(281): Homolog of NCBI NO: 38174423 NR Description: Unknown (protein for MGC:75936) [Silurana
  misc_feature (55)..(281): Homolog of NCBI NO: 28839636 NR Description: Unknown (protein for MGC:53076) [Xenopus laevis]
  misc_feature (55)..(289): Homolog of NCBI NO: 7448828 NR Description: assembly protein 50 - human
  misc_feature (55)..(289): Homolog of NCBI NO: 40788880 NR Description: KIAA0109 [Homo sapiens]
  misc_feature (55)..(289): Homolog of NCBI NO: 22219429 NR Description: Chain M, Ap2 Clathrin Adaptor Core
  misc_feature (55)..(289): Homolog of NCBI NO: 6753074 NR Description: adaptor protein complex AP-2, mu1
  misc_feature (53)..(289): Homolog of NCBI NO: 1703328 NR Description: CLATHRIN COAT ASSEMBLY PROTEIN AP50 (CLATHRIN ASSOCIATED PROTEIN AP50) (PLASMA MEMBRANE ADAPTOR AP-2 50 KD (HA2 50 KD SUBUNIT) (CLATHRIN ASSEMBLY PROTEIN COMPLEX 2 MEDIUM
  misc_feature (47)..(289): Homolog of NCBI NO: 28828638 NR Description: similar to Dictyostelium discoideum (Slime mold). coat assembly protein AP50 (Clathrin coat associated protein (Plasma membrane adaptor AP-2 50 kDa protein) (HA2 50 kDa
  misc_feature (48)..(289): Homolog of NCBI NO: 15237475 NR Description: AP47/50p (gb|AAB88283.1) [Arabidopsis thaliana]
SHFSCSTSSSSSSSFAPSSRSRRSSNLKSPVTRSSNYPICVSNLRSKMPVAASAIYFLNLRGDVLINRTYRDDVGGNMVDAFRTHIMQTKELGNCPVRQIGGCSFVYMRISNVYIVIVVSSNANVACGFKFVVEAVALFKSYFGGAFDEDAIRNNFVLIYELLDEIMDFGYPQNLSPEILKLYITQEGVRSPFSSKPKDKPVPNATLQVTGAVGWRREGLAYKKNEVFLDIVESVNLLMSSKGNVLRCDVTGKVLMKCFLSGMPDLKLGLNDKIGLEKESEMKSRPAKSG

SEQ ID NO: 43522 - protein, 243 aa, Arabidopsis thaliana
  peptide (1)..(243): Ceres Seq. ID no. 13592794
  misc_feature (8)..(242): Pfam Name: Adaptor complexes medium subunit family Pfam Description: Adaptor complexes medium subunit family
  misc_feature (8)..(242): Homolog of NCBI NO: 15489411 NR Description: Unknown (protein for MGC:9329) [Homo sapiens]
  misc_feature (8)..(234): Homolog of NCBI NO: 38174423 NR Description: Unknown (protein for MGC:75936) [Silurana
  misc_feature (8)..(234): Homolog of NCBI NO: 28839636 NR Description: Unknown (protein for MGC:53076) [Xenopus laevis]
  misc_feature (8)..(242): Homolog of NCBI NO: 7448828 NR Description: assembly protein 50 - human
  misc_feature (8)..(242): Homolog of NCBI NO: 40788880 NR Description: KIAA0109 [Homo sapiens]
  misc_feature (8)..(242): Homolog of NCBI NO: 22219429 NR Description: Chain M, Ap2 Clathrin Adaptor Core
  misc_feature (8)..(242): Homolog of NCBI NO: 6753074 NR Description: adaptor protein complex AP-2, mu1
  misc_feature (6)..(242): Homolog of NCBI NO: 1703328 NR Description: CLATHRIN COAT ASSEMBLY PROTEIN AP50 (CLATHRIN ASSOCIATED PROTEIN AP50) (PLASMA MEMBRANE ADAPTOR AP-2 50 KD (HA2 50 KD SUBUNIT) (CLATHRIN ASSEMBLY PROTEIN COMPLEX 2 MEDIUM
  misc_feature (1)..(242): Homolog of NCBI NO: 28828638 NR Description: similar to Dictyostelium discoideum (Slime mold). coat assembly protein AP50 (Clathrin coat associated protein (Plasma membrane adaptor AP-2 50 kDa protein) (HA2 50 kDa
  misc_feature (1)..(242): Homolog of NCBI NO: 15237475 NR Description: AP47/50p (gb|AAB88283.1) [Arabidopsis thaliana]
MPVAASAIYFLNLRGDVLINRTYRDDVGGNMVDAFRTHIMQTKELGNCPVRQIGGCSFVYMRISNVYIVIVVSSNANVACGFKFVVEAVALFKSYFGGAFDEDAIRNNFVLIYELLDEIMDFGYPQNLSPEILKLYITQEGVRSPFSSKPKDKPVPNATLQVTGAVGWRREGLAYKKNEVFLDIVESVNLLMSSKGNVLRCDVTGKVLMKCFLSGMPDLKLGLNDKIGLEKESEMKSRPAKSG

SEQ ID NO: 43523 - protein, 213 aa, Arabidopsis thaliana
  peptide (1)..(213): Ceres Seq. ID no. 13592795
  misc_feature (1)..(212): Pfam Name: Adaptor complexes medium subunit family Pfam Description: Adaptor complexes medium subunit family
  misc_feature (1)..(212): Homolog of NCBI NO: 15489411 NR Description: Unknown (protein for MGC:9329) [Homo sapiens]
  misc_feature (1)..(204): Homolog of NCBI NO: 38174423 NR Description: Unknown (protein for MGC:75936) [Silurana
  misc_feature (1)..(204): Homolog of NCBI NO: 28839636 NR Description: Unknown (protein for MGC:53076) [Xenopus laevis]
  misc_feature (1)..(212): Homolog of NCBI NO: 7448828 NR Description: assembly protein 50 - human
  misc_feature (1)..(212): Homolog of NCBI NO: 40788880 NR Description: KIAA0109 [Homo sapiens]
  misc_feature (1)..(212): Homolog of NCBI NO: 22219429 NR Description: Chain M, Ap2 Clathrin Adaptor Core
  misc_feature (1)..(212): Homolog of NCBI NO: 6753074 NR Description: adaptor protein complex AP-2, mu1
  misc_feature (1)..(212): Homolog of NCBI NO: 1703328 NR Description: CLATHRIN COAT ASSEMBLY PROTEIN AP50 (CLATHRIN ASSOCIATED PROTEIN AP50) (PLASMA MEMBRANE ADAPTOR AP-2 50 KD (HA2 50 KD SUBUNIT) (CLATHRIN ASSEMBLY PROTEIN COMPLEX 2 MEDIUM
  misc_feature (1)..(212): Homolog of NCBI NO: 28828638 NR Description: similar to Dictyostelium discoideum (Slime mold). coat assembly protein AP50 (Clathrin coat associated protein (Plasma membrane adaptor AP-2 50 kDa protein) (HA2 50 kDa
  misc_feature (1)..(212): Homolog of NCBI NO: 15237475 NR Description: AP47/50p (gb|AAB88283.1) [Arabidopsis thaliana]
MVDAFRTHIMQTKELGNCPVRQIGGCSFVYMRISNVYIVIVVSSNANVACGFKFVVEAVALFKSYFGGAFDEDAIRNNFVLIYELLDEIMDFGYPQNLSPEILKLYITQEGVRSPFSSKPKDKPVPNATLQVTGAVGWRREGLAYKKNEVFLDIVESVNLLMSSKGNVLRCDVTGKVLMKCFLSGMPDLKLGLNDKIGLEKESEMKSRPAKSG

SEQ ID NO: 43524 - DNA, 2004 bp, Arabidopsis thaliana
  misc_feature (1)..(2004): Ceres Seq. ID no. 12482910
  misc_feature: MA Experiment ID: 108434 Result: Down-regulated in Transcription
  misc_feature: MA Experiment 108434 PARAMETER Experiment Name: At_Root_Tips_cDNA_P Parameter: Tissue Value: Root Tips
  misc_feature: MA Experiment ID: 108573 Result: Up-regulated in Transcription
  misc_feature: MA Experiment 108573 PARAMETER Experiment Name: At_Drought_cDNA_P Parameter: Timepoint (hr) Value: 6
  misc_feature: MA Experiment 108573 PARAMETER Experiment Name: At_Drought_cDNA_P Parameter: Tissue Value: Aerial
  misc_feature: MA Experiment 108573 PARAMETER Experiment Name: At_Drought_cDNA_P Parameter: Treatment Value: Drought vs. No Drought
  misc_feature: MA Experiment ID: 108585 Result: Up-regulated in Transcription
  misc_feature: MA Experiment 108585 PARAMETER Experiment Name: At_5mM_NaNP_cDNA_P Parameter: Timepoint (hr) Value: 6
  misc_feature: MA Experiment 108585 PARAMETER Experiment Name: At_5mM_NaNP_cDNA_P Parameter: Tissue Value: Aerial
  misc_feature: MA Experiment 108585 PARAMETER Experiment Name: At_5mM_NaNP_cDNA_P Parameter: Treatment Value: null
  misc_feature: MA Experiment ID: 20000113 Result: Down-regulated in Transcription
  misc_feature: MA Experiment 20000113 PARAMETER Experiment Name: At_42deg_Heat_cDNA_P Parameter: Temperature (deg C) Value: 42 vs. 22
  misc_feature: MA Experiment 20000113 PARAMETER Experiment Name: At_42deg_Heat_cDNA_P Parameter: Timepoint (hr) Value: 8
  misc_feature: MA Experiment 20000113 PARAMETER Experiment Name: At_42deg_Heat_cDNA_P Parameter: Tissue Value: Aerial
  misc_feature: MA Experiment ID: 20000171 Result: Down-regulated in Transcription
  misc_feature: MA Experiment 20000171 PARAMETER Experiment Name: At_42deg_Heat_P Parameter: Age (day) Value: 14
  misc_feature: MA Experiment 20000171 PARAMETER Experiment Name: At_42deg_Heat_P Parameter: Organism Value: A. thaliana
  misc_feature: MA Experiment 20000171 PARAMETER Experiment Name: At_42deg_Heat_P Parameter: Plant Line Value: WS
  misc_feature: MA Experiment 20000171 PARAMETER Experiment Name: At_42deg_Heat_P Parameter: Temperature (deg C) Value: 42 vs. 22
  misc_feature: MA Experiment 20000171 PARAMETER Experiment Name: At_42deg_Heat_P Parameter: Timepoint (hr) Value: 1
  misc_feature: MA Experiment 20000171 PARAMETER Experiment Name: At_42deg_Heat_P Parameter: Tissue Value: Aerial
  misc_feature: MA Experiment ID: 20000173 Result: Down-regulated in Transcription
  misc_feature: MA Experiment 20000173 PARAMETER Experiment Name: At_42deg_Heat_P Parameter: Age (day) Value: 14
  misc_feature: MA Experiment 20000173 PARAMETER Experiment Name: At_42deg_Heat_P Parameter: Organism Value: A. thaliana
  misc_feature: MA Experiment 20000173 PARAMETER Experiment Name: At_42deg_Heat_P Parameter: Plant Line Value: WS
  misc_feature: MA Experiment 20000173 PARAMETER Experiment Name: At_42deg_Heat_P Parameter: Temperature (deg C) Value: 42 vs. 22
  misc_feature: MA Experiment 20000173 PARAMETER Experiment Name: At_42deg_Heat_P Parameter: Timepoint (hr) Value: 6
  misc_feature: MA Experiment 20000173 PARAMETER Experiment Name: At_42deg_Heat_P Parameter: Tissue Value: Aerial
  misc_feature: MA Experiment ID: 20000437 Result: Up-regulated in Transcription
  misc_feature: MA Experiment 20000437 PARAMETER Experiment Name: At_Drought_P Parameter: Age (day) Value: 8
  misc_feature: MA Experiment 20000437 PARAMETER Experiment Name: At_Drought_P Parameter: Organism Value: A. thaliana
  misc_feature: MA Experiment 20000437 PARAMETER Experiment Name: At_Drought_P Parameter: Plant Line Value: WS
  misc_feature: MA Experiment 20000437 PARAMETER Experiment Name: At_Drought_P Parameter: Timepoint (hr) Value: 24
  misc_feature: MA Experiment 20000437 PARAMETER Experiment Name: At_Drought_P Parameter: Tissue Value: Whole Plant
  misc_feature: MA Experiment 20000437 PARAMETER Experiment Name: At_Drought_P Parameter: Treatment Value: Drought vs. No Drought
  misc_feature: MA Experiment ID: 20000794 Result: Up-regulated in Transcription
  misc_feature: MA Experiment 20000794 PARAMETER Experiment Name: At_Petals_P Parameter: Age (day) Value: 23-25 days
  misc_feature: MA Experiment 20000794 PARAMETER Experiment Name: At_Petals_P Parameter: Plant Line Value: WS
  misc_feature: MA Experiment 20000794 PARAMETER Experiment Name: At_Petals_P Parameter: Tissue Value: Petals vs. Whole plant
  misc_feature: MA Experiment ID: 20001248 Result: Up-regulated in Transcription
  misc_feature: MA Experiment 20001248 PARAMETER Experiment Name: At_Far-red-induction_P Parameter: Age (day) Value: 7
  misc_feature: MA Experiment 20001248 PARAMETER Experiment Name: At_Far-red-induction_P Parameter: Light Value: Far-red vs. White
  misc_feature: MA Experiment 20001248 PARAMETER Experiment Name: At_Far-red-induction_P Parameter: Organism Value: A. thaliana
  misc_feature: MA Experiment 20001248 PARAMETER Experiment Name: At_Far-red-induction_P Parameter: Plant Line Value: Columbia
  misc_feature: MA Experiment 20001248 PARAMETER Experiment Name: At_Far-red-induction_P Parameter: Timepoint (hr) Value: 4
  misc_feature: MA Experiment 20001248 PARAMETER Experiment Name: At_Far-red-induction_P Parameter: Tissue Value: Whole Plant
  misc_feature: MA Experiment ID: 20001911 Result: Up-regulated in Transcription
  misc_feature: MA Experiment 20001911 PARAMETER Experiment Name: At_Drought_Reproduction_P Parameter: Age (day) Value: 40
  misc_feature: MA Experiment 20001911 PARAMETER Experiment Name: At_Drought_Reproduction_P Parameter: Organism Value: A. thaliana
  misc_feature: MA Experiment 20001911 PARAMETER Experiment Name: At_Drought_Reproduction_P Parameter: Plant Line Value: WS
  misc_feature: MA Experiment 20001911 PARAMETER Experiment Name: At_Drought_Reproduction_P Parameter: Timepoint (day) Value: 10
  misc_feature: MA Experiment 20001911 PARAMETER Experiment Name: At_Drought_Reproduction_P Parameter: Tissue Value: Flowers
  misc_feature: MA Experiment 20001911 PARAMETER Experiment Name: At_Drought_Reproduction_P Parameter: Treatment Value: Drought vs. No Drought
atttttcttcattactcttctttttattttccggagatttttctctttgcctttgttatttgctgcttttgctgcttttgctgcagctacagtagaatcttgtgtttttgtggtggggaggtgagatttcttatgacggggaagcgatcaaagactaattgcagatctgcttctcacaagctcttcaaggataaggctaagaaccgtgttgatgatttgcaaggcatgcttttggatcttcagtttgcgaggaaagagagtaggcctactgatgttactcttcttgaggagcaagtgaatcagatgcttcgtgagtggaaatctgagctcaatgagccttctccagcttcatccttgcaacaaggtggtactctggggtctttctcatcagacatttgtcggctgctgcagctctgtgatgaggaagatgatgctaccagcaaattagctgcccccaagcccgagcctgctgatcagaatctcgaagctggcaaagctgctgtcttccaaaggggatacaatttggttcaggggaagtcagaacatggattaccattggttgataattgcaaagatttgtccttagcagctggtaacaatttcgatggaacggctcctttggagtatcatcagcagtatgatctgcaacaagagtttgaaccaaacttcaatggtggtttcaacaattgtcccagttatggtgtagtagagggtcctatacatatctctaattttatcccgactatttgtcctccaccctctgcattcttgggtccaaaatgtgctctttgggattgccctaggccagctcagggatttgattggttccaggattactgcagcagcttccacgctgcactggctttcaatgaagggccaccaggtatgaatccggtggtgcgtcctggaggtatcggcctaaaagacggtctgctttttgctgctcttagtgcaaaggctggagggaaagatgttggtattcccgaatgtgaaggagctgcaactgctaaatctccatggaatgctccagagctctttgatctcacggttctggagagtgagacactaagggagtggctattctttgacaagccaaggagggcctttgagagcgggaacagaaagcaaagatctttaccagactacaatggtcgtggttggcacgagtcacgtaaacagatcatggtcgagtttggagggctgaagagatcttactacatggatccacagcctctgcaccatttcgaatggcatctttacgaatatgagatcaacaagtgtgatgcttgtgccttgtacaggctcgagctcaagcttgttgacgggaagaagacttcaaaaggcaaagtctcaaacgactcagtggctgatctgcagaagcagatgggaagactcacagctgagttccctccagaaaacaataccactaacaccaccaacaacaacaaacgctgcatcaaaggaagaccaaaagtgagcacaaaagtcgccaccgggaatgttcagaacacagtagagcaggcaaatgactatggagtaggtgaagagtttaactatctggtcggaaatctaagcgactattatatcccctgagacgaatgtggaaaaactcaggtttgaaaagctgtttgcttaccatttaattaggcagcagcagaagaagcttctacatatcgtagggcaaagtaatggattttcatgactcgtatcttttttttctcttatataatagttctctgtctatctatggagattatgtatatataacaagaagtggatgctgaagactgtcctggagttaggaatagtaaatgtgacgaaggagactgctttttaagattcagtctatggaggtgaagacatatttactgacattccggtttatatattttgatgcattttcgactctcttctgcgatataatgcagatgacaaattatgtaaccgatggggaaatacggttttgagtatcagtgttgttcttatagaatcaggaccttgttc

SEQ ID NO: 43525 - protein, 530 aa, Arabidopsis thaliana
  peptide (1)..(530): Ceres Seq. ID no. 12482911
  misc_feature (67)..(119): Homolog of NCBI NO: 25370817 NR Description: hypothetical protein At2g42400 [imported] -
  misc_feature (204)..(464): Homolog of NCBI NO: 25370817 NR Description: hypothetical protein At2g42400 [imported] -
  misc_feature (344)..(530): Homolog of NCBI NO: 6691215 NR Description: F1K23.24 [Arabidopsis thaliana]
  misc_feature (67)..(156): Homolog of NCBI NO: 18405962 NR Description: expressed protein
  misc_feature (204)..(464): Homolog of NCBI NO: 18405962 NR Description: expressed protein
  misc_feature (48)..(164): Homolog of NCBI NO: 34909602 NR Description: P0435B05.21 [Oryza sativa (japonica
  misc_feature (199)..(524): Homolog of NCBI NO: 34909602 NR Description: P0435B05.21 [Oryza sativa (japonica
  misc_feature (45)..(530): Homolog of NCBI NO: 15218694 NR Description: unknown protein; protein id: At1g28520.1
IFLHYSSFYFPEIFLFAFVICCFCCFCCSYSRILCFCGGEVRFLMTGKRSKTNCRSASHKLFKDKAKNRVDDLQGMLLDLQFARKESRPTDVTLLEEQVNQMLREWKSELNEPSPASSLQQGGTLGSFSSDICRLLQLCDEEDDATSKLAAPKPEPADQNLEAGKAAVFQRGYNLVQGKSEHGLPLVDNCKDLSLAAGNNFDGTAPLEYHQQYDLQQEFEPNFNGGFNNCPSYGVVEGPIHISNFIPTICPPPSAFLGPKCALWDCPRPAQGFDWFQDYCSSFHAALAFNEGPPGMNPVVRPGGIGLKDGLLFAALSAKAGGKDVGIPECEGAATAKSPWNAPELFDLTVLESETLREWLFFDKPRRAFESGNRKQRSLPDYNGRGWHESRKQIMVEFGGLKRSYYMDPQPLHHFEWHLYEYEINKCDACALYRLELKLVDGKKTSKGKVSNDSVADLQKQMGRLTAEFPPENNTTNTTNNNKRCIKGRPKVSTKVATGNVQNTVEQANDYGVGEEFNYLVGNLSDYYIP

SEQ ID NO: 43526 - protein, 486 aa, Arabidopsis thaliana; identical to SEQ ID NO: 22584
  peptide (1)..(486): Ceres Seq. ID no. 12482912
  misc_feature (23)..(75): Homolog of NCBI NO: 25370817 NR Description: hypothetical protein At2g42400 [imported] -
  misc_feature (160)..(420): Homolog of NCBI NO: 25370817 NR Description: hypothetical protein At2g42400 [imported] -
  misc_feature (300)..(486): Homolog of NCBI NO: 6691215 NR Description: F1K23.24 [Arabidopsis thaliana]
  misc_feature (23)..(112): Homolog of NCBI NO: 18405962 NR Description: expressed protein
  misc_feature (160)..(420): Homolog of NCBI NO: 18405962 NR Description: expressed protein
  misc_feature (4)..(120): Homolog of NCBI NO: 34909602 NR Description: P0435B05.21 [Oryza sativa (japonica
  misc_feature (155)..(480): Homolog of NCBI NO: 34909602 NR Description: P0435B05.21 [Oryza sativa (japonica
  misc_feature (1)..(486): Homolog of NCBI NO: 15218694 NR Description: unknown protein; protein id: At1g28520.1

SEQ ID NO: 43527 - protein, 455 aa, Arabidopsis thaliana; identical to SEQ ID NO: 22585
  peptide (1)..(455): Ceres Seq. ID no. 12482913
  misc_feature (1)..(44): Homolog of NCBI NO: 25370817 NR Description: hypothetical protein At2g42400 [imported] -
  misc_feature (129)..(389): Homolog of NCBI NO: 25370817 NR Description: hypothetical protein At2g42400 [imported] -
  misc_feature (269)..(455): Homolog of NCBI NO: 6691215 NR Description: F1K23.24 [Arabidopsis thaliana]
  misc_feature (1)..(81): Homolog of NCBI NO: 18405962 NR Description: expressed protein
  misc_feature (129)..(389): Homolog of NCBI NO: 18405962 NR Description: expressed protein
  misc_feature (1)..(89): Homolog of NCBI NO: 34909602 NR Description: P0435B05.21 [Oryza sativa (japonica
  misc_feature (124)..(449): Homolog of NCBI NO: 34909602 NR Description: P0435B05.21 [Oryza sativa (japonica
  misc_feature (1)..(455): Homolog of NCBI NO: 15218694 NR Description: unknown protein; protein id: At1g28520.1

SEQ ID NO: 43528 - DNA, 1112 bp, Arabidopsis thaliana; identical to SEQ ID NO: 24790
  misc_feature (1)..(1112): Ceres Seq. ID no. 12329914
  misc_feature: MA Experiment ID: 20000184 Result: Down-regulated in Transcription
  misc_feature: MA Experiment 20000184 PARAMETER Experiment Name: At_Shoots__P Parameter: Age (day) Value: 7
  misc_feature: MA Experiment 20000184 PARAMETER Experiment Name: At_Shoots__P Parameter: Tissue Value: Shoots vs. Whole Plant
  misc_feature: MA Experiment ID: 20000234 Result: Down-regulated in Transcription
  misc_feature: MA Experiment 20000234 PARAMETER Experiment Name: At_Siliques_P Parameter: Age (day) Value: 21
  misc_feature: MA Experiment 20000234 PARAMETER Experiment Name: At_Siliques_P Parameter: Organism Value: A. thaliana
  misc_feature: MA Experiment 20000234 PARAMETER Experiment Name: At_Siliques_P Parameter: Plant Line Value: WS
  misc_feature: MA Experiment 20000234 PARAMETER Experiment Name: At_Siliques_P Parameter: Tissue Value: Less Than 5mm Siliques vs. Whole Plant
  misc_feature: MA Experiment ID: 20000235 Result: Down-regulated in Transcription
  misc_feature: MA Experiment 20000235 PARAMETER Experiment Name: At_Siliques_P Parameter: Age (day) Value: 21
  misc_feature: MA Experiment 20000235 PARAMETER Experiment Name: At_Siliques_P Parameter: Organism Value: A. thaliana
  misc_feature: MA Experiment 20000235 PARAMETER Experiment Name: At_Siliques_P Parameter: Plant Line Value: WS
  misc_feature: MA Experiment 20000235 PARAMETER Experiment Name: At_Siliques_P Parameter: Tissue Value: 5-10mm Siliques vs. Whole Plant
  misc_feature: MA Experiment ID: 20000441 Result: Up-regulated in Transcription
  misc_feature: MA Experiment 20000441 PARAMETER Experiment Name: At_1uM_BR-BRZ__P Parameter: Tissue Value: Shoot Apices
  misc_feature: MA Experiment 20000441 PARAMETER Experiment Name: At_1uM_BR-BRZ__P Parameter: Treatment Value: 1uM BR vs. No Treatment
  misc_feature: MA Experiment ID: 20000794 Result: Up-regulated in Transcription
  misc_feature: MA Experiment 20000794 PARAMETER Experiment Name: At_Petals_P Parameter: Age (day) Value: 23-25 days
  misc_feature: MA Experiment 20000794 PARAMETER Experiment Name: At_Petals_P Parameter: Plant Line Value: WS
  misc_feature: MA Experiment 20000794 PARAMETER Experiment Name: At_Petals_P Parameter: Tissue Value: Petals vs. Whole plant
  misc_feature: MA Experiment ID: 20001248 Result: Up-regulated in Transcription
  misc_feature: MA Experiment 20001248 PARAMETER Experiment Name: At_Far-red-induction_P Parameter: Age (day) Value: 7
  misc_feature: MA Experiment 20001248 PARAMETER Experiment Name: At_Far-red-induction_P Parameter: Light Value: Far-red vs. White
  misc_feature: MA Experiment 20001248 PARAMETER Experiment Name: At_Far-red-induction_P Parameter: Organism Value: A. thaliana
  misc_feature: MA Experiment 20001248 PARAMETER Experiment Name: At_Far-red-induction_P Parameter: Plant Line Value: Columbia
  misc_feature: MA Experiment 20001248 PARAMETER Experiment Name: At_Far-red-induction_P Parameter: Timepoint (hr) Value: 4
  misc_feature: MA Experiment 20001248 PARAMETER Experiment Name: At_Far-red-induction_P Parameter: Tissue Value: Whole Plant
  misc_feature: MA Experiment ID: 20001450 Result: Up-regulated in Transcription
  misc_feature: MA Experiment 20001450 PARAMETER Experiment Name: At_Far-red-induction_P Parameter: Age (day) Value: 7
  misc_feature: MA Experiment 20001450 PARAMETER Experiment Name: At_Far-red-induction_P Parameter: Light Value: Far-red vs. White
  misc_feature: MA Experiment 20001450 PARAMETER Experiment Name: At_Far-red-induction_P Parameter: Organism Value: A. thaliana
  misc_feature: MA Experiment 20001450 PARAMETER Experiment Name: At_Far-red-induction_P Parameter: Plant Line Value: Columbia
  misc_feature: MA Experiment 20001450 PARAMETER Experiment Name: At_Far-red-induction_P Parameter: Timepoint (hr) Value: 8
  misc_feature: MA Experiment 20001450 PARAMETER Experiment Name: At_Far-red-induction_P Parameter: Tissue Value: Whole Plant
  misc_feature: MA Experiment ID: 20001556 Result: Down-regulated in Transcription
  misc_feature: MA Experiment 20001556 PARAMETER Experiment Name: At_Drought_Soil_Dry_P Parameter: Age (day) Value: 26
  misc_feature: MA Experiment 20001556 PARAMETER Experiment Name: At_Drought_Soil_Dry_P Parameter: Organism Value: A. thaliana
  misc_feature: MA Experiment 20001556 PARAMETER Experiment Name: At_Drought_Soil_Dry_P Parameter: Plant Line Value: WS
  misc_feature: MA Experiment 20001556 PARAMETER Experiment Name: At_Drought_Soil_Dry_P Parameter: Post Timepoint (hr) Value: None
  misc_feature: MA Experiment 20001556 PARAMETER Experiment Name: At_Drought_Soil_Dry_P Parameter: Post-Treatment Value: None
  misc_feature: MA Experiment 20001556 PARAMETER Experiment Name: At_Drought_Soil_Dry_P Parameter: Timepoint (day) Value: 12
  misc_feature: MA Experiment 20001556 PARAMETER Experiment Name: At_Drought_Soil_Dry_P Parameter: Treatment Value: Drought vs. No Drought
  misc_feature: MA Experiment ID: 20001557 Result: Down-regulated in Transcription
  misc_feature: MA Experiment 20001557 PARAMETER Experiment Name: At_Drought_Soil_Dry_P Parameter: Age (day) Value: 27
  misc_feature: MA Experiment 20001557 PARAMETER Experiment Name: At_Drought_Soil_Dry_P Parameter: Organism Value: A. thaliana
  misc_feature: MA Experiment 20001557 PARAMETER Experiment Name: At_Drought_Soil_Dry_P Parameter: Plant Line Value: WS
  misc_feature: MA Experiment 20001557 PARAMETER Experiment Name: At_Drought_Soil_Dry_P Parameter: Post Timepoint (hr) Value: 3
  misc_feature: MA Experiment 20001557 PARAMETER Experiment Name: At_Drought_Soil_Dry_P Parameter: Post-Treatment Value: Re-Water vs. No Drought
  misc_feature: MA Experiment 20001557 PARAMETER Experiment Name: At_Drought_Soil_Dry_P Parameter: Timepoint (day) Value: 13
  misc_feature: MA Experiment 20001557 PARAMETER Experiment Name: At_Drought_Soil_Dry_P Parameter: Treatment Value: Drought vs. No Drought
  misc_feature: MA Experiment ID: 20001558 Result: Down-regulated in Transcription
  misc_feature: MA Experiment 20001558 PARAMETER Experiment Name: At_Drought_Soil_Dry_P Parameter: Age (day) Value: 27
  misc_feature: MA Experiment 20001558 PARAMETER Experiment Name: At_Drought_Soil_Dry_P Parameter: Organism Value: A. thaliana
  misc_feature: MA Experiment 20001558 PARAMETER Experiment Name: At_Drought_Soil_Dry_P Parameter: Plant Line Value: WS
  misc_feature: MA Experiment 20001558 PARAMETER Experiment Name: At_Drought_Soil_Dry_P Parameter: Post Timepoint (hr) Value: 6
  misc_feature: MA Experiment 20001558 PARAMETER Experiment Name: At_Drought_Soil_Dry_P Parameter: Post-Treatment Value: Re-Water vs. No Drought
  misc_feature: MA Experiment 20001558 PARAMETER Experiment Name: At_Drought_Soil_Dry_P Parameter: Timepoint (day) Value: 13
  misc_feature: MA Experiment 20001558 PARAMETER Experiment Name: At_Drought_Soil_Dry_P Parameter: Treatment Value: Drought vs. No Drought
  misc_feature: MA Experiment ID: 20001559 Result: Down-regulated in Transcription
  misc_feature: MA Experiment 20001559 PARAMETER Experiment Name: At_Drought_Soil_Dry_P Parameter: Age (day) Value: 28
  misc_feature: MA Experiment 20001559 PARAMETER Experiment Name: At_Drought_Soil_Dry_P Parameter: Organism Value: A. thaliana
  misc_feature: MA Experiment 20001559 PARAMETER Experiment Name: At_Drought_Soil_Dry_P Parameter: Plant Line Value: WS
  misc_feature: MA Experiment 20001559 PARAMETER Experiment Name: At_Drought_Soil_Dry_P Parameter: Post Timepoint (hr) Value: 29
  misc_feature: MA Experiment 20001559 PARAMETER Experiment Name: At_Drought_Soil_Dry_P Parameter: Post-Treatment Value: Re-Water vs. No Drought
  misc_feature: MA Experiment 20001559 PARAMETER Experiment Name: At_Drought_Soil_Dry_P Parameter: Timepoint (day) Value: 14
  misc_feature: MA Experiment 20001559 PARAMETER Experiment Name: At_Drought_Soil_Dry_P Parameter: Treatment Value: Drought vs. No Drought
  misc_feature: MA Experiment ID: 20001560 Result: Down-regulated in Transcription
  misc_feature: MA Experiment 20001560 PARAMETER Experiment Name: At_Drought_Soil_Dry_P Parameter: Age (day) Value: 28
  misc_feature: MA Experiment 20001560 PARAMETER Experiment Name: At_Drought_Soil_Dry_P Parameter: Organism Value: A. thaliana
  misc_feature: MA Experiment 20001560 PARAMETER Experiment Name: At_Drought_Soil_Dry_P Parameter: Plant Line Value: WS
  misc_feature: MA Experiment 20001560 PARAMETER Experiment Name: At_Drought_Soil_Dry_P Parameter: Post Timepoint (hr) Value: None
  misc_feature: MA Experiment 20001560 PARAMETER Experiment Name: At_Drought_Soil_Dry_P Parameter: Post-Treatment Value: None
  misc_feature: MA Experiment 20001560 PARAMETER Experiment Name: At_Drought_Soil_Dry_P Parameter: Timepoint (day) Value: 14
  misc_feature: MA Experiment 20001560 PARAMETER Experiment Name: At_Drought_Soil_Dry_P Parameter: Treatment Value: Drought vs. No Drought

SEQ ID NO: 43529 - protein, 213 aa, Arabidopsis thaliana; identical to SEQ ID NO: 24791
  peptide (1)..(213): Ceres Seq. ID no. 12329915
  misc_feature (9)..(200): Pfam Name: Protein of unknown function, DUF597 Pfam Description: Protein of unknown function, DUF597
  misc_feature (9)..(200): Pfam Name: Protein of unknown function, DUF597 Pfam Description: Protein of unknown function, DUF597
  misc_feature (4)..(143): Homolog of NCBI NO: 25337907 NR Description: hypothetical protein F9H16.1 - Arabidopsis
  misc_feature (4)..(143): Homolog of NCBI NO: 18394936 NR Description: expressed protein
  misc_feature (1)..(206): Homolog of NCBI NO: 15237491 NR Description: putative protein
  misc_feature (4)..(213): Homolog of NCBI NO: 37537092 NR Description: unknown protein [Oryza sativa (japonica
  misc_feature (2)..(213): Homolog of NCBI NO: 38346725 NR Description: OSJNBa0086O06.23 [Oryza sativa (japonica
  misc_feature (4)..(143): Homolog of NCBI NO: 25337907 NR Description: hypothetical protein F9H16.1 - Arabidopsis
  misc_feature (1)..(206): Homolog of NCBI NO: 15237491 NR Description: putative protein
  misc_feature (2)..(213): Homolog of NCBI NO: 38346725 NR Description: OSJNBa0086O06.23 [Oryza sativa (japonica
  misc_feature (1)..(213): Homolog of NCBI NO: 6714272 NR Description: F6N18.8 [Arabidopsis thaliana]
  misc_feature (1)..(213): Homolog of NCBI NO: 21554139 NR Description: unknown [Arabidopsis thaliana]
  misc_feature (1)..(213): Homolog of NCBI NO: 18398555 NR Description: expressed protein
  misc_feature (1)..(137): Homolog of NCBI NO: 15236696 NR Description: putative protein; protein id: At4g17900.1
  misc_feature (137)..(207): Homolog of NCBI NO: 15236696 NR Description: putative protein; protein id: At4g17900.1
  misc_feature (4)..(213): Homolog of NCBI NO: 37537092 NR Description: unknown protein [Oryza sativa (japonica
  misc_feature (4)..(143): Homolog of NCBI NO: 18394936 NR Description: expressed protein
  misc_feature (137)..(207): Homolog of NCBI NO: 15236696 NR Description: putative protein; protein id: At4g17900.1
  misc_feature (1)..(137): Homolog of NCBI NO: 15236696 NR Description: putative protein; protein id: At4g17900.1
  misc_feature (1)..(213): Homolog of NCBI NO: 18398555 NR Description: expressed protein
  misc_feature (1)..(213): Homolog of NCBI NO: 21554139 NR Description: unknown [Arabidopsis thaliana]
  misc_feature (1)..(213): Homolog of NCBI NO: 6714272 NR Description: F6N18.8 [Arabidopsis thaliana]

SEQ ID NO: 43530 - protein, 174 aa, Arabidopsis thaliana; identical to SEQ ID NO: 24792
  peptide (1)..(174): Ceres Seq. ID no. 12329916
  misc_feature (1)..(161): Pfam Name: Protein of unknown function, DUF597 Pfam Description: Protein of unknown function, DUF597
  misc_feature (1)..(161): Pfam Name: Protein of unknown function, DUF597 Pfam Description: Protein of unknown function, DUF597
  misc_feature (1)..(104): Homolog of NCBI NO: 25337907 NR Description: hypothetical protein F9H16.1 - Arabidopsis
  misc_feature (1)..(104): Homolog of NCBI NO: 18394936 NR Description: expressed protein
  misc_feature (1)..(167): Homolog of NCBI NO: 15237491 NR Description: putative protein
  misc_feature (1)..(174): Homolog of NCBI NO: 37537092 NR Description: unknown protein [Oryza sativa (japonica
  misc_feature (1)..(174): Homolog of NCBI NO: 38346725 NR Description: OSJNBa0086O06.23 [Oryza sativa (japonica
  misc_feature (1)..(104): Homolog of NCBI NO: 25337907 NR Description: hypothetical protein F9H16.1 - Arabidopsis
  misc_feature (1)..(167): Homolog of NCBI NO: 15237491 NR Description: putative protein
  misc_feature (1)..(174): Homolog of NCBI NO: 38346725 NR Description: OSJNBa0086O06.23 [Oryza sativa (japonica
  misc_feature (1)..(174): Homolog of NCBI NO: 6714272 NR Description: F6N18.8 [Arabidopsis thaliana]
  misc_feature (1)..(174): Homolog of NCBI NO: 21554139 NR Description: unknown [Arabidopsis thaliana]
  misc_feature (1)..(174): Homolog of NCBI NO: 18398555 NR Description: expressed protein
  misc_feature (1)..(98): Homolog of NCBI NO: 15236696 NR Description: putative protein; protein id: At4g17900.1
  misc_feature (98)..(168): Homolog of NCBI NO: 15236696 NR Description: putative protein; protein id: At4g17900.1
  misc_feature (1)..(174): Homolog of NCBI NO: 37537092 NR Description: unknown protein [Oryza sativa (japonica
  misc_feature (1)..(104): Homolog of NCBI NO: 18394936 NR Description: expressed protein
  misc_feature (98)..(168): Homolog of NCBI NO: 15236696 NR Description: putative protein; protein id: At4g17900.1
  misc_feature (1)..(98): Homolog of NCBI NO: 15236696 NR Description: putative protein; protein id: At4g17900.1
  misc_feature (1)..(174): Homolog of NCBI NO: 18398555 NR Description: expressed protein
  misc_feature (1)..(174): Homolog of NCBI NO: 21554139 NR Description: unknown [Arabidopsis thaliana]
  misc_feature (1)..(174): Homolog of NCBI NO: 6714272 NR Description: F6N18.8 [Arabidopsis thaliana]

SEQ ID NO: 43531 - DNA, 1412 bp, Arabidopsis thaliana
  misc_feature (1)..(1412): Ceres Seq. ID no. 12394654
  misc_feature: MA Experiment ID: 108434 Result: Up-regulated in Transcription
  misc_feature: MA Experiment 108434 PARAMETER Experiment Name: At_Root_Tips_cDNA_P Parameter: Tissue Value: Root Tips
  misc_feature: MA Experiment ID: 108461 Result: Up-regulated in Transcription
  misc_feature: MA Experiment 108461 PARAMETER Experiment Name: At_Germinating_Seeds_cDNA_P Parameter: Age (day) Value: 1 vs. 0
  misc_feature: MA Experiment 108461 PARAMETER Experiment Name: At_Germinating_Seeds_cDNA_P Parameter: Tissue Value: Germinating Seeds
  misc_feature: MA Experiment ID: 108462 Result: Up-regulated in Transcription
  misc_feature: MA Experiment 108462 PARAMETER Experiment Name: At_Germinating_Seeds_cDNA_P Parameter: Age (day) Value: 2 vs. 0
  misc_feature: MA Experiment 108462 PARAMETER Experiment Name: At_Germinating_Seeds_cDNA_P Parameter: Tissue Value: Germinating Seeds
  misc_feature: MA Experiment ID: 108463 Result: Up-regulated in Transcription
  misc_feature: MA Experiment 108463 PARAMETER Experiment Name: At_Germinating_Seeds_cDNA_P Parameter: Age (day) Value: 3 vs. 0
  misc_feature: MA Experiment 108463 PARAMETER Experiment Name: At_Germinating_Seeds_cDNA_P Parameter: Tissue Value: Germinating Seeds
  misc_feature: MA Experiment ID: 108464 Result: Up-regulated in Transcription
  misc_feature: MA Experiment 108464 PARAMETER Experiment Name: At_Germinating_Seeds_cDNA_P Parameter: Age (day) Value: 4 vs. 0
  misc_feature: MA Experiment 108464 PARAMETER Experiment Name: At_Germinating_Seeds_cDNA_P Parameter: Tissue Value: Germinating Seeds
  misc_feature: MA Experiment ID: 108576 Result: Down-regulated in Transcription
  misc_feature: MA Experiment 108576 PARAMETER Experiment Name: At_42deg_Heat_cDNA_P Parameter: Temperature (deg C) Value: 42 vs. 22
  misc_feature: MA Experiment 108576 PARAMETER Experiment Name: At_42deg_Heat_cDNA_P Parameter: Timepoint (hr) Value: 1
  misc_feature: MA Experiment 108576 PARAMETER Experiment Name: At_42deg_Heat_cDNA_P Parameter: Tissue Value: Aerial
  misc_feature: MA Experiment ID: 108577 Result: Down-regulated in Transcription
  misc_feature: MA Experiment 108577 PARAMETER Experiment Name: At_42deg_Heat_cDNA_P Parameter: Temperature (deg C) Value: 42 vs. 22
  misc_feature: MA Experiment 108577 PARAMETER Experiment Name: At_42deg_Heat_cDNA_P Parameter: Timepoint (hr) Value: 6
  misc_feature: MA Experiment 108577 PARAMETER Experiment Name: At_42deg_Heat_cDNA_P Parameter: Tissue Value: Aerial
  misc_feature: MA Experiment ID: 108585 Result: Up-regulated in Transcription
  misc_feature: MA Experiment 108585 PARAMETER Experiment Name: At_5mM_NaNP_cDNA_P Parameter: Timepoint (hr) Value: 6
  misc_feature: MA Experiment 108585 PARAMETER Experiment Name: At_5mM_NaNP_cDNA_P Parameter: Tissue Value: Aerial
  misc_feature: MA Experiment 108585 PARAMETER Experiment Name: At_5mM_NaNP_cDNA_P Parameter: Treatment Value: null
  misc_feature: MA Experiment ID: 108594 Result: Up-regulated in Transcription
  misc_feature: MA Experiment 108594 PARAMETER Experiment Name: At_Ler-rhl_Root_cDNA_P Parameter: Plant Line Value: null
  misc_feature: MA Experiment ID: 108668 Result: Down-regulated in Transcription
  misc_feature: MA Experiment 108668 PARAMETER Experiment Name: At_2mM_SA_cDNA_P Parameter: Plant Line Value: WS
  misc_feature: MA Experiment 108668 PARAMETER Experiment Name: At_2mM_SA_cDNA_P Parameter: Timepoint (hr) Value: 6
  misc_feature: MA Experiment 108668 PARAMETER Experiment Name: At_2mM_SA_cDNA_P Parameter: Treatment Value: 2mM SA vs. No Treatment
  misc_feature: MA Experiment ID: 20000069 Result: Down-regulated in Transcription
  misc_feature: MA Experiment 20000069 PARAMETER Experiment Name: At_100uM_ABA_Mutants_cDNA_P Parameter: Plant Line Value: CS23
  misc_feature: MA Experiment 20000069 PARAMETER Experiment Name: At_100uM_ABA_Mutants_cDNA_P Parameter: Timepoint (hr) Value: 6
  misc_feature: MA Experiment 20000069 PARAMETER Experiment Name: At_100uM_ABA_Mutants_cDNA_P Parameter: Tissue Value: Aerial
  misc_feature: MA Experiment 20000069 PARAMETER Experiment Name: At_100uM_ABA_Mutants_cDNA_P Parameter: Treatment Value: 100uM ABA vs. No Treatment
  misc_feature: MA Experiment ID: 20000112 Result: Down-regulated in Transcription
  misc_feature: MA Experiment 20000112 PARAMETER Experiment Name: At_42deg_Heat_cDNA_P Parameter: Temperature (deg C) Value: 42 vs. 22
  misc_feature: MA Experiment 20000112 PARAMETER Experiment Name: At_42deg_Heat_cDNA_P Parameter: Timepoint (hr) Value: 2
  misc_feature: MA Experiment 20000112 PARAMETER Experiment Name: At_42deg_Heat_cDNA_P Parameter: Tissue Value: Aerial
  misc_feature: MA Experiment ID: 20000113 Result: Down-regulated in Transcription
  misc_feature: MA Experiment 20000113 PARAMETER Experiment Name: At_42deg_Heat_cDNA_P Parameter: Temperature (deg C) Value: 42 vs. 22
  misc_feature: MA Experiment 20000113 PARAMETER Experiment Name: At_42deg_Heat_cDNA_P Parameter: Timepoint (hr) Value: 8
  misc_feature: MA Experiment 20000113 PARAMETER Experiment Name: At_42deg_Heat_cDNA_P Parameter: Tissue Value: Aerial
  misc_feature: MA Experiment ID: 20000117 Result: Down-regulated in Transcription
  misc_feature: MA Experiment 20000117 PARAMETER Experiment Name: At_100uM_ABA_Mutants_cDNA_P Parameter: Plant Line Value: Columbia
  misc_feature: MA Experiment 20000117 PARAMETER Experiment Name: At_100uM_ABA_Mutants_cDNA_P Parameter: Timepoint (hr) Value: 6
  misc_feature: MA Experiment 20000117 PARAMETER Experiment Name: At_100uM_ABA_Mutants_cDNA_P Parameter: Tissue Value: Aerial
  misc_feature: MA Experiment 20000117 PARAMETER Experiment Name: At_100uM_ABA_Mutants_cDNA_P Parameter: Treatment Value: 100uM ABA vs. No Treatment
  misc_feature: MA Experiment ID: 20000144 Result: Down-regulated in Transcription
  misc_feature: MA Experiment 20000144 PARAMETER Experiment Name: At_42deg_Heat_cDNA_P Parameter: Temperature (deg C) Value: 42 vs. 22
  misc_feature: MA Experiment 20000144 PARAMETER Experiment Name: At_42deg_Heat_cDNA_P Parameter: Timepoint (hr) Value: 1
  misc_feature: MA Experiment 20000144 PARAMETER Experiment Name: At_42deg_Heat_cDNA_P Parameter: Tissue Value: Aerial
  misc_feature: MA Experiment ID: 20000224 Result: Up-regulated in Transcription
  misc_feature: MA Experiment ID: 20000234 Result: Up-regulated in Transcription
  misc_feature: MA Experiment 20000234 PARAMETER Experiment Name: At_Siliques_P Parameter: Age (day) Value: 21
  misc_feature: MA Experiment 20000234 PARAMETER Experiment Name: At_Siliques_P Parameter: Organism Value: A. thaliana
  misc_feature: MA Experiment 20000234 PARAMETER Experiment Name: At_Siliques_P Parameter: Plant Line Value: WS
  misc_feature: MA Experiment 20000234 PARAMETER Experiment Name: At_Siliques_P Parameter: Tissue Value: Less Than 5mm Siliques vs. Whole Plant
  misc_feature: MA Experiment ID: 20000235 Result: Up-regulated in Transcription
  misc_feature: MA Experiment 20000235 PARAMETER Experiment Name: At_Siliques_P Parameter: Age (day) Value: 21
  misc_feature: MA Experiment 20000235 PARAMETER Experiment Name: At_Siliques_P Parameter: Organism Value: A. thaliana
  misc_feature: MA Experiment 20000235 PARAMETER Experiment Name: At_Siliques_P Parameter: Plant Line Value: WS
  misc_feature: MA Experiment 20000235 PARAMETER Experiment Name: At_Siliques_P Parameter: Tissue Value: 5-10mm Siliques vs. Whole Plant
  misc_feature: MA Experiment ID: 20000264 Result: Up-regulated in Transcription
  misc_feature: MA Experiment 20000264 PARAMETER Experiment Name: At_Open_Flower_P Parameter: Age (day) Value: 21
  misc_feature: MA Experiment 20000264 PARAMETER Experiment Name: At_Open_Flower_P Parameter: Plant Line Value: WS
  misc_feature: MA Experiment 20000264 PARAMETER Experiment Name: At_Open_Flower_P Parameter: Tissue Value: Open Flower vs. Whole Plant
  misc_feature: MA Experiment ID: 20000265 Result: Up-regulated in Transcription
  misc_feature: MA Experiment 20000265 PARAMETER Experiment Name: At_Open_Flower_P Parameter: Age (day) Value: 21
  misc_feature: MA Experiment 20000265 PARAMETER Experiment Name: At_Open_Flower_P Parameter: Plant Line Value: WS
  misc_feature: MA Experiment 20000265 PARAMETER Experiment Name: At_Open_Flower_P Parameter: Tissue Value: Closed Flower vs. Whole Plant
  misc_feature: MA Experiment ID: 20000286 Result: Up-regulated in Transcription
  misc_feature: MA Experiment 20000286 PARAMETER Experiment Name: At_Open_Flower_P Parameter: Age (day) Value: 21
  misc_feature: MA Experiment 20000286 PARAMETER Experiment Name: At_Open_Flower_P Parameter: Plant Line Value: WS
  misc_feature: MA Experiment 20000286 PARAMETER Experiment Name: At_Open_Flower_P Parameter: Tissue Value: Half Open vs. Whole Plant
  misc_feature: MA Experiment ID: 20000438 Result: Up-regulated in Transcription
  misc_feature: MA Experiment 20000438 PARAMETER Experiment Name: At_Shoots__P Parameter: Age (day) Value: 14
  misc_feature: MA Experiment 20000438 PARAMETER Experiment Name: At_Shoots__P Parameter: Tissue Value: Shoots vs. Whole Plant
  misc_feature: MA Experiment ID: 20000495 Result: Up-regulated in Transcription
  misc_feature: MA Experiment 20000495 PARAMETER Experiment Name: At_Guard_Cells_P Parameter: Harvest Date Value: 8/2/2002
  misc_feature: MA Experiment 20000495 PARAMETER Experiment Name: At_Guard_Cells_P Parameter: Organism Value: A. thaliana
  misc_feature: MA Experiment 20000495 PARAMETER Experiment Name: At_Guard_Cells_P Parameter: Tissue Value: Guard Cells vs. Leaves
  misc_feature: MA Experiment ID: 20001450 Result: Down-regulated in Transcription
  misc_feature: MA Experiment 20001450 PARAMETER Experiment Name: At_Far-red-induction_P Parameter: Age (day) Value: 7
  misc_feature: MA Experiment 20001450 PARAMETER Experiment Name: At_Far-red-induction_P Parameter: Light Value: Far-red vs. White
  misc_feature: MA Experiment 20001450 PARAMETER Experiment Name: At_Far-red-induction_P Parameter: Organism Value: A. thaliana
  misc_feature: MA Experiment 20001450 PARAMETER Experiment Name: At_Far-red-induction_P Parameter: Plant Line Value: Columbia
  misc_feature: MA Experiment 20001450 PARAMETER Experiment Name: At_Far-red-induction_P Parameter: Timepoint (hr) Value: 8
  misc_feature: MA Experiment 20001450 PARAMETER Experiment Name: At_Far-red-induction_P Parameter: Tissue Value: Whole Plant
  misc_feature: MA Experiment ID: 20001451 Result: Down-regulated in Transcription
  misc_feature: MA Experiment 20001451 PARAMETER Experiment Name: At_Far-red-induction_P Parameter: Age (day) Value: 7
  misc_feature: MA Experiment 20001451 PARAMETER Experiment Name: At_Far-red-induction_P Parameter: Light Value: Far-red vs. White
  misc_feature: MA Experiment 20001451 PARAMETER Experiment Name: At_Far-red-induction_P Parameter: Organism Value: A. thaliana
  misc_feature: MA Experiment 20001451 PARAMETER Experiment Name: At_Far-red-induction_P Parameter: Plant Line Value: Columbia
  misc_feature: MA Experiment 20001451 PARAMETER Experiment Name: At_Far-red-induction_P Parameter: Timepoint (hr) Value: 24
  misc_feature: MA Experiment 20001451 PARAMETER Experiment Name: At_Far-red-induction_P Parameter: Tissue Value: Whole Plant
  misc_feature: MA Experiment ID: 20001906 Result: Down-regulated in Transcription
  misc_feature: MA Experiment 20001906 PARAMETER Experiment Name: At_Drought_Reproduction_P Parameter: Age (day) Value: 35
  misc_feature: MA Experiment 20001906 PARAMETER Experiment Name: At_Drought_Reproduction_P Parameter: Organism Value: A. thaliana
  misc_feature: MA Experiment 20001906 PARAMETER Experiment Name: At_Drought_Reproduction_P Parameter: Plant Line Value: WS
  misc_feature: MA Experiment 20001906 PARAMETER Experiment Name: At_Drought_Reproduction_P Parameter: Timepoint (day) Value: 5
  misc_feature: MA Experiment 20001906 PARAMETER Experiment Name: At_Drought_Reproduction_P Parameter: Tissue Value: Siliques
  misc_feature: MA Experiment 20001906 PARAMETER Experiment Name: At_Drought_Reproduction_P Parameter: Treatment Value: Drought vs. No Drought
  misc_feature: MA Experiment ID: 20001908 Result: Down-regulated in Transcription
  misc_feature: MA Experiment 20001908 PARAMETER Experiment Name: At_Drought_Reproduction_P Parameter: Age (day) Value: 40
  misc_feature: MA Experiment 20001908 PARAMETER Experiment Name: At_Drought_Reproduction_P Parameter: Organism Value: A. thaliana
  misc_feature: MA Experiment 20001908 PARAMETER Experiment Name: At_Drought_Reproduction_P Parameter: Plant Line Value: WS
  misc_feature: MA Experiment 20001908 PARAMETER Experiment Name: At_Drought_Reproduction_P Parameter: Timepoint (day) Value: 10
  misc_feature: MA Experiment 20001908 PARAMETER Experiment Name: At_Drought_Reproduction_P Parameter: Tissue Value: Siliques
  misc_feature: MA Experiment 20001908 PARAMETER Experiment Name: At_Drought_Reproduction_P Parameter: Treatment Value: Drought vs. No Drought
actccgagcgtttcctttctcacaagccaatggcgcaatttactaattccatcaattatctcttttctgtttctctcttattatttgtatcgttccactgcttatgttttcgtttttcattggttgcagcttgttcaaactccaccgacgaccaacagattcaacaccatcaccaccggaaatgggttggtccctcaggccacaaagtcatcaccgttctcacttaacggccacgctcagtttcgctccgtccaagacgctgtggattccataccaaagaacaataacaagagcatcacaatcaagattgctcccggattttacagagagaaagtggtggttccagctacaaaaccgtacataacgttcaaaggagctggtagggatgtgaccgctatagagtggcacgaccgtgcgtccgaccttggcgctaacggtcaacagttacgtacctatcaaaccgcttccgtcaccgtctacgctaattatttcaccgctagaaacattagcttcacggtactctattcaattctaacgcaattatatatatagggaaactttcacaaaaatgcgagtctttctttattttattttaaattgtgaagaatactgcgccggctccattgccggggatgcaagggtggcaagcggtggcgtttaggatctccggcgacaaagctttcttttccggctgcgggttttacggtgcacaagacactttatgcgacgatgctggccgtcattacttcaaggagtgttacattgaaggctctatcgactttatctttggtaatggccgctccatgtataaagattgtgagttgcattcgatagcgtcaagattcgggtcgatagcggcgcatggtaggacatgcccggaagagaaaacgggtttcgcgttcgtgggttgtcgggtaacaggtacgggtccattgtacgtgggccgggccatgggaccaatactcacgtatcgtttacgcctacacttactttgatgctctcgtcgctcacggtggttgggacgattgggaccacaaatccaacaaaagcaagacggcatttttcggagtgtacaattgctatgggccaggagcagcagcgacgagaggcgtgtcttgggctagagctttggactatgaatcggcccatccatttatcgctaagagcttcgttaatgggagacattggatcgctcctcgagatgcttaaccaacttcaaaccttggcggggtttcttttcctaattcctcggttcctcccagtcccaagtcctaaaagcttactatatttttatcattcgtttatttcttttattgtttattttttccaatttatttatacattgtgtgatagtacaacaaagtattgcttcttcttcatctgtatccatttcagttaaatgttttgagctt

SEQ ID NO: 43532 - protein, 183 aa, Arabidopsis thaliana
  peptide (1)..(183): Ceres Seq. ID no. 12394655
  misc_feature (74)..(172): Pfam Name: Pectinesterase Pfam Description: Pectinesterase
  misc_feature (62)..(169): Homolog of NCBI NO: 25404855 NR Description: probable pectin methylesterase T17F3.3
  misc_feature (76)..(167): Homolog of NCBI NO: 15226598 NR Description: pectinesterase family; protein id: At2g21610.1
  misc_feature (75)..(171): Homolog of NCBI NO: 27754550 NR Description: putative pectinesterase family protein
  misc_feature (75)..(171): Homolog of NCBI NO: 15228023 NR Description: pectinesterase family; protein id: At2g36710.1
  misc_feature (76)..(171): Homolog of NCBI NO: 15240544 NR Description: pectinesterase family; protein id: At5g55590.1
  misc_feature (61)..(171): Homolog of NCBI NO: 15241163 NR Description: pectinesterase family
  misc_feature (81)..(171): Homolog of NCBI NO: 34909402 NR Description: putative pectin methylesterase
  misc_feature (76)..(171): Homolog of NCBI NO: 38345478 NR Description: OSJNBa0010H02.16 [Oryza sativa (japonica
  misc_feature (65)..(172): Homolog of NCBI NO: 9758778 NR Description: pectin methylesterase-like [Arabidopsis thaliana]
  misc_feature (65)..(172): Homolog of NCBI NO: 15238111 NR Description: pectinesterase family
TPSVSFLTSQWRNLLIPSIISFLFLSYYLYRSTAYVFVFHWLQLVQTPPTTNRFNTITTGNGLVPQATKSSPFSLNGHAQFRSVQDAVDSIPKNNNKSITIKIAPGFYREKVVVPATKPYITFKGAGRDVTAIEWHDRASDLGANGQQLRTYQTASVTVYANYFTARNISFTVLYSILTQLYI

SEQ ID NO: 43533 - protein, 175 aa, Arabidopsis thaliana
  peptide (1)..(175): Ceres Seq. ID no. 12394656
MPGRENGFRVRGLSGNRYGSIVRGPGHGTNTHVSFTPTLTLMLSSLTVVGTIGTTNPTKARRHFSECTIAMGQEQQRREACLGLELWTMNRPIHLSLRASLMGDIGSLLEMLNQLQTLAGFLFLIPRFLPVPSPKSLLYFYHSFISFIVYFFQFIYTLCDSTTKYCFFFICIHFS

SEQ ID NO: 43534 - protein, 134 aa, Arabidopsis thaliana
  peptide (1)..(134): Ceres Seq. ID no. 12394657
MLSSLTVVGTIGTTNPTKARRHFSECTIAMGQEQQRREACLGLELWTMNRPIHLSLRASLMGDIGSLLEMLNQLQTLAGFLFLIPRFLPVPSPKSLLYFYHSFISFIVYFFQFIYTLCDSTTKYCFFFICIHFS

SEQ ID NO: 43535 - DNA, 1505 bp, Arabidopsis thaliana
  misc_feature (1)..(1505): Ceres Seq. ID no. 15179699
  misc_feature: MA Experiment ID: 20000171 Result: Down-regulated in Transcription
  misc_feature: MA Experiment 20000171 PARAMETER Experiment Name: At_42deg_Heat_P Parameter: Age (day) Value: 14
  misc_feature: MA Experiment 20000171 PARAMETER Experiment Name: At_42deg_Heat_P Parameter: Organism Value: A. thaliana
  misc_feature: MA Experiment 20000171 PARAMETER Experiment Name: At_42deg_Heat_P Parameter: Plant Line Value: WS
  misc_feature: MA Experiment 20000171 PARAMETER Experiment Name: At_42deg_Heat_P Parameter: Temperature (deg C) Value: 42 vs. 22
  misc_feature: MA Experiment 20000171 PARAMETER Experiment Name: At_42deg_Heat_P Parameter: Timepoint (hr) Value: 1
  misc_feature: MA Experiment 20000171 PARAMETER Experiment Name: At_42deg_Heat_P Parameter: Tissue Value: Aerial
  misc_feature: MA Experiment ID: 20000173 Result: Down-regulated in Transcription
  misc_feature: MA Experiment 20000173 PARAMETER Experiment Name: At_42deg_Heat_P Parameter: Age (day) Value: 14
  misc_feature: MA Experiment 20000173 PARAMETER Experiment Name: At_42deg_Heat_P Parameter: Organism Value: A. thaliana
  misc_feature: MA Experiment 20000173 PARAMETER Experiment Name: At_42deg_Heat_P Parameter: Plant Line Value: WS
  misc_feature: MA Experiment 20000173 PARAMETER Experiment Name: At_42deg_Heat_P Parameter: Temperature (deg C) Value: 42 vs. 22
  misc_feature: MA Experiment 20000173 PARAMETER Experiment Name: At_42deg_Heat_P Parameter: Timepoint (hr) Value: 6
  misc_feature: MA Experiment 20000173 PARAMETER Experiment Name: At_42deg_Heat_P Parameter: Tissue Value: Aerial
  misc_feature: MA Experiment ID: 20000182 Result: Down-regulated in Transcription
  misc_feature: MA Experiment 20000182 PARAMETER Experiment Name: At_2mM_SA_P Parameter: Age (day) Value: 14
  misc_feature: MA Experiment 20000182 PARAMETER Experiment Name: At_2mM_SA_P Parameter: Organism Value: A. thaliana
  misc_feature: MA Experiment 20000182 PARAMETER Experiment Name: At_2mM_SA_P Parameter: Plant Line Value: WS
  misc_feature: MA Experiment 20000182 PARAMETER Experiment Name: At_2mM_SA_P Parameter: Timepoint (hr) Value: 6
  misc_feature: MA Experiment 20000182 PARAMETER Experiment Name: At_2mM_SA_P Parameter: Tissue Value: Aerial
  misc_feature: MA Experiment 20000182 PARAMETER Experiment Name: At_2mM_SA_P Parameter: Treatment Value: 2mM SA vs. No Treatment
  misc_feature: MA Experiment ID: 20000184 Result: Up-regulated in Transcription
  misc_feature: MA Experiment 20000184 PARAMETER Experiment Name: At_Shoots__P Parameter: Age (day) Value: 7
  misc_feature: MA Experiment 20000184 PARAMETER Experiment Name: At_Shoots__P Parameter: Tissue Value: Shoots vs. Whole Plant
  misc_feature: MA Experiment ID: 20000185 Result: Up-regulated in Transcription
  misc_feature: MA Experiment 20000185 PARAMETER Experiment Name: At_Roots__P Parameter: Age (day) Value: 7 vs. 21
  misc_feature: MA Experiment 20000185 PARAMETER Experiment Name: At_Roots__P Parameter: Organism Value: A. thaliana
  misc_feature: MA Experiment 20000185 PARAMETER Experiment Name: At_Roots__P Parameter: Tissue Value: Roots vs. Whole Plant
  misc_feature: MA Experiment ID: 20000227 Result: Down-regulated in Transcription
  misc_feature: MA Experiment 20000227 PARAMETER Experiment Name: At_Root-Tips-vs-Tops_P Parameter: Tissue Value: Root Tips vs. Root Tops
  misc_feature: MA Experiment ID: 20000234 Result: Up-regulated in Transcription
  misc_feature: MA Experiment 20000234 PARAMETER Experiment Name: At_Siliques_P Parameter: Age (day) Value: 21
  misc_feature: MA Experiment 20000234 PARAMETER Experiment Name: At_Siliques_P Parameter: Organism Value: A. thaliana
  misc_feature: MA Experiment 20000234 PARAMETER Experiment Name: At_Siliques_P Parameter: Plant Line Value: WS
  misc_feature: MA Experiment 20000234 PARAMETER Experiment Name: At_Siliques_P Parameter: Tissue Value: Less Than 5mm Siliques vs. Whole Plant
  misc_feature: MA Experiment ID: 20000235 Result: Up-regulated in Transcription
  misc_feature: MA Experiment 20000235 PARAMETER Experiment Name: At_Siliques_P Parameter: Age (day) Value: 21
  misc_feature: MA Experiment 20000235 PARAMETER Experiment Name: At_Siliques_P Parameter: Organism Value: A. thaliana
  misc_feature: MA Experiment 20000235 PARAMETER Experiment Name: At_Siliques_P Parameter: Plant Line Value: WS
  misc_feature: MA Experiment 20000235 PARAMETER Experiment Name: At_Siliques_P Parameter: Tissue Value: 5-10mm Siliques vs. Whole Plant
  misc_feature: MA Experiment ID: 20000264 Result: Up-regulated in Transcription
  misc_feature: MA Experiment 20000264 PARAMETER Experiment Name: At_Open_Flower_P Parameter: Age (day) Value: 21
  misc_feature: MA Experiment 20000264 PARAMETER Experiment Name: At_Open_Flower_P Parameter: Plant Line Value: WS
  misc_feature: MA Experiment 20000264 PARAMETER Experiment Name: At_Open_Flower_P Parameter: Tissue Value: Open Flower vs. Whole Plant
  misc_feature: MA Experiment ID: 20000437 Result: Down-regulated in Transcription
  misc_feature: MA Experiment 20000437 PARAMETER Experiment Name: At_Drought_P Parameter: Age (day) Value: 8
  misc_feature: MA Experiment 20000437 PARAMETER Experiment Name: At_Drought_P Parameter: Organism Value: A. thaliana
  misc_feature: MA Experiment 20000437 PARAMETER Experiment Name: At_Drought_P Parameter: Plant Line Value: WS
  misc_feature: MA Experiment 20000437 PARAMETER Experiment Name: At_Drought_P Parameter: Timepoint (hr) Value: 24
  misc_feature: MA Experiment 20000437 PARAMETER Experiment Name: At_Drought_P Parameter: Tissue Value: Whole Plant
  misc_feature: MA Experiment 20000437 PARAMETER Experiment Name: At_Drought_P Parameter: Treatment Value: Drought vs. No Drought
  misc_feature: MA Experiment ID: 20000438 Result: Up-regulated in Transcription
  misc_feature: MA Experiment 20000438 PARAMETER Experiment Name: At_Shoots__P Parameter: Age (day) Value: 14
  misc_feature: MA Experiment 20000438 PARAMETER Experiment Name: At_Shoots__P Parameter: Tissue Value: Shoots vs. Whole Plant
  misc_feature: MA Experiment ID: 20000439 Result: Up-regulated in Transcription
  misc_feature: MA Experiment 20000439 PARAMETER Experiment Name: At_Roots__P Parameter: Age (day) Value: 14 vs. 21
  misc_feature: MA Experiment 20000439 PARAMETER Experiment Name: At_Roots__P Parameter: Organism Value: A. thaliana
  misc_feature: MA Experiment 20000439 PARAMETER Experiment Name: At_Roots__P Parameter: Tissue Value: Roots vs. Whole Plant
  misc_feature: MA Experiment ID: 20001248 Result: Down-regulated in Transcription
  misc_feature: MA Experiment 20001248 PARAMETER Experiment Name: At_Far-red-induction_P Parameter: Age (day) Value: 7
  misc_feature: MA Experiment 20001248 PARAMETER Experiment Name: At_Far-red-induction_P Parameter: Light Value: Far-red vs. White
  misc_feature: MA Experiment 20001248 PARAMETER Experiment Name: At_Far-red-induction_P Parameter: Organism Value: A. thaliana
  misc_feature: MA Experiment 20001248 PARAMETER Experiment Name: At_Far-red-induction_P Parameter: Plant Line Value: Columbia
  misc_feature: MA Experiment 20001248 PARAMETER Experiment Name: At_Far-red-induction_P Parameter: Timepoint (hr) Value: 4
  misc_feature: MA Experiment 20001248 PARAMETER Experiment Name: At_Far-red-induction_P Parameter: Tissue Value: Whole Plant
  misc_feature: MA Experiment ID: 20001450 Result: Down-regulated in Transcription
  misc_feature: MA Experiment 20001450 PARAMETER Experiment Name: At_Far-red-induction_P Parameter: Age (day) Value: 7
  misc_feature: MA Experiment 20001450 PARAMETER Experiment Name: At_Far-red-induction_P Parameter: Light Value: Far-red vs. White
  misc_feature: MA Experiment 20001450 PARAMETER Experiment Name: At_Far-red-induction_P Parameter: Organism Value: A. thaliana
  misc_feature: MA Experiment 20001450 PARAMETER Experiment Name: At_Far-red-induction_P Parameter: Plant Line Value: Columbia
  misc_feature: MA Experiment 20001450 PARAMETER Experiment Name: At_Far-red-induction_P Parameter: Timepoint (hr) Value: 8
  misc_feature: MA Experiment 20001450 PARAMETER Experiment Name: At_Far-red-induction_P Parameter: Tissue Value: Whole Plant
  misc_feature: MA Experiment ID: 20001911 Result: Down-regulated in Transcription
  misc_feature: MA Experiment 20001911 PARAMETER Experiment Name: At_Drought_Reproduction_P Parameter: Age (day) Value: 40
  misc_feature: MA Experiment 20001911 PARAMETER Experiment Name: At_Drought_Reproduction_P Parameter: Organism Value: A. thaliana
  misc_feature: MA Experiment 20001911 PARAMETER Experiment Name: At_Drought_Reproduction_P Parameter: Plant Line Value: WS
  misc_feature: MA Experiment 20001911 PARAMETER Experiment Name: At_Drought_Reproduction_P Parameter: Timepoint (day) Value: 10
  misc_feature: MA Experiment 20001911 PARAMETER Experiment Name: At_Drought_Reproduction_P Parameter: Tissue Value: Flowers
  misc_feature: MA Experiment 20001911 PARAMETER Experiment Name: At_Drought_Reproduction_P Parameter: Treatment Value: Drought vs. No Drought
atctctgaatcactcataaaccctttcttcttccttgttcaaatccactcactcttggagagagacgactcaaacgcatagtctctcctctgtatttactcgttatcgtcactgtgagagagagagagagagagagcgcgcgcattcccccaattaaagcctctctgctccaaaccgtgatatactctttacgtactttgtttttgcctttatccttccctagttgtgtataattttgttcttttcttatggagatggatctcagcaaggttactcttgacattttcacaaagcttgaacagaaatggctctctcactgcgactcctcccggaagactcgtatccttagcatcgacggtggcggtaccactggcattgtcgccgctgcttctattctccacctcgagcaccagatccgccttcaaaccggcgaccctcacgctcacatctctgatttcttcgacattgtcgccggaactggcatcggaggcattctcgccgccctccttgtcgccgacgacggctccggcaggccgatgttcactgccagagacgcggttaagtttgtcgcggagaagaactcggagctcttcgagatcaggtacaccggagttttcaggaggaacaagagatactcggggaagagcatggagagggttttggagacggcgtttaggagagaggacggtaaggtgttgacgatgaaggacacgtgtaagcctctccttgttccttgctacgacctcaaaacctctgctcctttcgttttctcacgcgccggcgcgtctgagtctccgagcttcgacttcgagctgtggaaagtctgccgtgccacgtcagcaacaccaagcctcttcaagccgttcagtgtagtgtcggtggacgggaaaacctcatgctcagccgtagacggcggtttggtgatgaacaatccaacagcagctgccgtcacgcacgtgctacacaacaaacgagatttcccgtcagtaaacggcgtagatgacttgcttgtactgtcgttgggaaacggtccgtcgaccatgtcatcatcaccagggaggaaactccgtcgtaacggagactgttcgacgtcaagtgtggtggacatagtggttgacggcgtttccgataccgtcgatcagatgctggggaacgctttctgctggaaccgtactgattacgttagaatccaggcgaacggtttgacgagcggcggagcggaggagttgctgaaagagagaggtgtggaaacggcgccgtttggggtaaaacggatactaacggagagtaacggagaaagaatagagggtttcgtgcaacgtcttgttgcgtcaggaaagtcaagtctacctccaagtccttgcaaggaatctgccgttaaccctctcgctgacggccgttaagtttcctttattattataaccctccccgtccgtgatgtaagaagtttgtaaccaaacccctgggttaattttttaaccccagccagcatcttcgagttaatt

SEQ ID NO: 43536 - protein, 384 aa, Arabidopsis thaliana
  peptide (1)..(384): Ceres Seq. ID no. 15179700
  misc_feature (33)..(234): Pfam Name: Patatin-like phospholipase Pfam Description: Patatin-like phospholipase
  misc_feature (324)..(371): Homolog of NCBI NO: 7486230 NR Description: hypothetical protein F27B13.40 - Arabidopsis
  misc_feature (32)..(322): Homolog of NCBI NO: 7486230 NR Description: hypothetical protein F27B13.40 - Arabidopsis
  misc_feature (324)..(371): Homolog of NCBI NO: 30688454 NR Description: patatin-related [Arabidopsis thaliana]
  misc_feature (32)..(322): Homolog of NCBI NO: 30688454 NR Description: patatin-related [Arabidopsis thaliana]
  misc_feature (322)..(360): Homolog of NCBI NO: 15233136 NR Description: patatin-related [Arabidopsis thaliana]
  misc_feature (3)..(322): Homolog of NCBI NO: 15233136 NR Description: patatin-related [Arabidopsis thaliana]
  misc_feature (309)..(360): Homolog of NCBI NO: 15225054 NR Description: patatin family [Arabidopsis thaliana]
  misc_feature (29)..(322): Homolog of NCBI NO: 15225054 NR Description: patatin family [Arabidopsis thaliana]
  misc_feature (3)..(384): Homolog of NCBI NO: 11357489 NR Description: hypothetical protein F16M2.50 - Arabidopsis
  misc_feature (1)..(384): Homolog of NCBI NO: 18412659 NR Description: patatin-related [Arabidopsis thaliana]
MEMDLSKVTLDIFTKLEQKWLSHCDSSRKTRILSIDGGGTTGIVAAASILHLEHQIRLQTGDPHAHISDFFDIVAGTGIGGILAALLVADDGSGRPMFTARDAVKFVAEKNSELFEIRYTGVFRRNKRYSGKSMERVLETAFRREDGKVLTMKDTCKPLLVPCYDLKTSAPFVFSRAGASESPSFDFELWKVCRATSATPSLFKPFSVVSVDGKTSCSAVDGGLVMNNPTAAAVTHVLHNKRDFPSVNGVDDLLVLSLGNGPSTMSSSPGRKLRRNGDCSTSSVVDIVVDGVSDTVDQMLGNAFCWNRTDYVRIQANGLTSGGAEELLKERGVETAPFGVKRILTESNGERIEGFVQRLVASGKSSLPPSPCKESAVNPLADGR

SEQ ID NO: 43537 - protein, 382 aa, Arabidopsis thaliana
  peptide (1)..(382): Ceres Seq. ID no. 15179701
  misc_feature (31)..(232): Pfam Name: Patatin-like phospholipase Pfam Description: Patatin-like phospholipase
  misc_feature (322)..(369): Homolog of NCBI NO: 7486230 NR Description: hypothetical protein F27B13.40 - Arabidopsis
  misc_feature (30)..(320): Homolog of NCBI NO: 7486230 NR Description: hypothetical protein F27B13.40 - Arabidopsis
  misc_feature (322)..(369): Homolog of NCBI NO: 30688454 NR Description: patatin-related [Arabidopsis thaliana]
  misc_feature (30)..(320): Homolog of NCBI NO: 30688454 NR Description: patatin-related [Arabidopsis thaliana]
  misc_feature (320)..(358): Homolog of NCBI NO: 15233136 NR Description: patatin-related [Arabidopsis thaliana]
  misc_feature (1)..(320): Homolog of NCBI NO: 15233136 NR Description: patatin-related [Arabidopsis thaliana]
  misc_feature (307)..(358): Homolog of NCBI NO: 15225054 NR Description: patatin family [Arabidopsis thaliana]
  misc_feature (27)..(320): Homolog of NCBI NO: 15225054 NR Description: patatin family [Arabidopsis thaliana]
  misc_feature (1)..(382): Homolog of NCBI NO: 11357489 NR Description: hypothetical protein F16M2.50 - Arabidopsis
  misc_feature (1)..(382): Homolog of NCBI NO: 18412659 NR Description: patatin-related [Arabidopsis thaliana]
MDLSKVTLDIFTKLEQKWLSHCDSSRKTRILSIDGGGTTGIVAAASILHLEHQIRLQTGDPHAHISDFFDIVAGTGIGGILAALLVADDGSGRPMFTARDAVKFVAEKNSELFEIRYTGVFRRNKRYSGKSMERVLETAFRREDGKVLTMKDTCKPLLVPCYDLKTSAPFVFSRAGASESPSFDFELWKVCRATSATPSLFKPFSVVSVDGKTSCSAVDGGLVMNNPTAAAVTHVLHNKRDFPSVNGVDDLLVLSLGNGPSTMSSSPGRKLRRNGDCSTSSVVDIVVDGVSDTVDQMLGNAFCWNRTDYVRIQANGLTSGGAEELLKERGVETAPFGVKRILTESNGERIEGFVQRLVASGKSSLPPSPCKESAVNPLADGR

SEQ ID NO: 43538 - protein, 288 aa, Arabidopsis thaliana
  peptide (1)..(288): Ceres Seq. ID no. 15179702
  misc_feature (1)..(138): Pfam Name: Patatin-like phospholipase Pfam Description: Patatin-like phospholipase
  misc_feature (228)..(275): Homolog of NCBI NO: 7486230 NR Description: hypothetical protein F27B13.40 - Arabidopsis
  misc_feature (1)..(226): Homolog of NCBI NO: 7486230 NR Description: hypothetical protein F27B13.40 - Arabidopsis
  misc_feature (228)..(275): Homolog of NCBI NO: 30688454 NR Description: patatin-related [Arabidopsis thaliana]
  misc_feature (1)..(226): Homolog of NCBI NO: 30688454 NR Description: patatin-related [Arabidopsis thaliana]
  misc_feature (226)..(264): Homolog of NCBI NO: 15233136 NR Description: patatin-related [Arabidopsis thaliana]
  misc_feature (1)..(226): Homolog of NCBI NO: 15233136 NR Description: patatin-related [Arabidopsis thaliana]
  misc_feature (213)..(264): Homolog of NCBI NO: 15225054 NR Description: patatin family [Arabidopsis thaliana]
  misc_feature (1)..(226): Homolog of NCBI NO: 15225054 NR Description: patatin family [Arabidopsis thaliana]
  misc_feature (1)..(288): Homolog of NCBI NO: 11357489 NR Description: hypothetical protein F16M2.50 - Arabidopsis
  misc_feature (1)..(288): Homolog of NCBI NO: 18412659 NR Description: patatin-related [Arabidopsis thaliana]
MFTARDAVKFVAEKNSELFEIRYTGVFRRNKRYSGKSMERVLETAFRREDGKVLTMKDTCKPLLVPCYDLKTSAPFVFSRAGASESPSFDFELWKVCRATSATPSLFKPFSVVSVDGKTSCSAVDGGLVMNNPTAAAVTHVLHNKRDFPSVNGVDDLLVLSLGNGPSTMSSSPGRKLRRNGDCSTSSVVDIVVDGVSDTVDQMLGNAFCWNRTDYVRIQANGLTSGGAEELLKERGVETAPFGVKRILTESNGERIEGFVQRLVASGKSSLPPSPCKESAVNPLADGR

SEQ ID NO: 43539 - DNA, 1136 bp, Arabidopsis thaliana
  misc_feature (1)..(1136): Ceres Seq. ID no. 12330277
  misc_feature: MA Experiment ID: 108434 Result: Up-regulated in Transcription
  misc_feature: MA Experiment 108434 PARAMETER Experiment Name: At_Root_Tips_cDNA_P Parameter: Tissue Value: Root Tips
  misc_feature: MA Experiment ID: 20000069 Result: Down-regulated in Transcription
  misc_feature: MA Experiment 20000069 PARAMETER Experiment Name: At_100uM_ABA_Mutants_cDNA_P Parameter: Plant Line Value: CS23
  misc_feature: MA Experiment 20000069 PARAMETER Experiment Name: At_100uM_ABA_Mutants_cDNA_P Parameter: Timepoint (hr) Value: 6
  misc_feature: MA Experiment 20000069 PARAMETER Experiment Name: At_100uM_ABA_Mutants_cDNA_P Parameter: Tissue Value: Aerial
  misc_feature: MA Experiment 20000069 PARAMETER Experiment Name: At_100uM_ABA_Mutants_cDNA_P Parameter: Treatment Value: 100uM ABA vs. No Treatment
  misc_feature: MA Experiment ID: 20000070 Result: Down-regulated in Transcription
  misc_feature: MA Experiment 20000070 PARAMETER Experiment Name: At_100uM_ABA_Mutants_cDNA_P Parameter: Plant Line Value: CS24
  misc_feature: MA Experiment 20000070 PARAMETER Experiment Name: At_100uM_ABA_Mutants_cDNA_P Parameter: Timepoint (hr) Value: 6
  misc_feature: MA Experiment 20000070 PARAMETER Experiment Name: At_100uM_ABA_Mutants_cDNA_P Parameter: Tissue Value: Aerial
  misc_feature: MA Experiment 20000070 PARAMETER Experiment Name: At_100uM_ABA_Mutants_cDNA_P Parameter: Treatment Value: 100uM ABA vs. No Treatment
  misc_feature: MA Experiment ID: 20000179 Result: Up-regulated in Transcription
  misc_feature: MA Experiment 20000179 PARAMETER Experiment Name: At_Germinating_Seeds_P Parameter: Age (hr) Value: 6 vs. 0
  misc_feature: MA Experiment 20000179 PARAMETER Experiment Name: At_Germinating_Seeds_P Parameter: Tissue Value: Germinating Seeds
atgtcctcttcgctccattgctcggaatcacagaaaaaggtgagattaaggaggagcgaaacatgacgaatccacttaattccaccgccgctaatcgctctaaccagccgtcttctgatggaatcagcgacggtcaaatcaccaatgaggaagctgaatcactaattaacaagaagaactgttcagggcacaagctaaaagaagtaactgatagtgacacattctctgacaatggtaaagatgattcagataccaagaaaagattccattaccatcaggatcagcggaggatgagtttgacatcgattgtggcggtggagtctccttcatcgagcaacgctccctctagaaaaaccattgatcttggccatggaagcgacctcatttacattcagaggtttcttccatttcaacaatcttggactttcttcgattatctcgacaagcatattccttggaccaggcctactattcgcgtctggtcgatcttgcctccagccgagagatacttgttatgttgcaagtagcggattgactgcgttggtgtacagtggatatcgacctacctcctattcgtgggatgatttcccacctctcaaggagattctggatgctatttacaaggcgcttcctggaagcagattcaacagcttgctcttaaatagatacaaaggtgccagtgattatgtggcttggcatgcagatgatgaaaagatttatggtccaactccagaaattgcttcagtctcgtttggatgtgaacgtgattttgtgttgaagaaaaagaaagatgaagaatcttcccaagggaaaacaggagacagtggaccagctaagaagaggttaaagagaagcagcagagaggatcaacaaagtttgacattgaaacatggatcgttgctggtgatgagaggatacactcaaagagactggattcattctgtgccaaagcgtgcaaaggcagagggcactcgtatcaacctcacattcaggcttgttttgtaaattgagcatcatatgcaagaaggtgggcttgatcttggtctccattgacatattctaagcttctcatcttaattctctataaacatcaattggtgtagacatttcaagaagcaaattggacgggaagattg

SEQ ID NO: 43540 - protein, 211 aa, Arabidopsis thaliana
  peptide (1)..(211): Ceres Seq. ID no. 12330278
  misc_feature (91)..(211): Pfam Name: 2OG-Fe(II) oxygenase superfamily Pfam Description: 2OG-Fe(II) oxygenase superfamily
  misc_feature (161)..(211): Homolog of NCBI NO: 22994262 NR Description: hypothetical protein [Xylella fastidiosa Dixon]
  misc_feature (38)..(141): Homolog of NCBI NO: 22994262 NR Description: hypothetical protein [Xylella fastidiosa Dixon]
  misc_feature (161)..(211): Homolog of NCBI NO: 15837900 NR Description: DNA repair system specific for alkylated DNA
  misc_feature (38)..(141): Homolog of NCBI NO: 15837900 NR Description: DNA repair system specific for alkylated DNA
  misc_feature (161)..(211): Homolog of NCBI NO: 28198460 NR Description: alkylated DNA repair protein [Xylella fastidiosa
  misc_feature (38)..(141): Homolog of NCBI NO: 28198460 NR Description: alkylated DNA repair protein [Xylella fastidiosa
  misc_feature (168)..(211): Homolog of NCBI NO: 22989027 NR Description: hypothetical protein [Burkholderia fungorum]
  misc_feature (37)..(140): Homolog of NCBI NO: 22989027 NR Description: hypothetical protein [Burkholderia fungorum]
  misc_feature (38)..(211): Homolog of NCBI NO: 25412094 NR Description: hypothetical protein At2g22260 [imported] -
  misc_feature (38)..(211): Homolog of NCBI NO: 18399917 NR Description: expressed protein
MEATSFTFRGFFHFNNLGLSSIISTSIFLGPGLLFASGRSCLQPRDTCYVASSGLTALVYSGYRPTSYSWDDFPPLKEILDAIYKALPGSRFNSLLLNRYKGASDYVAWHADDEKIYGPTPEIASVSFGCERDFVLKKKKDEESSQGKTGDSGPAKKRLKRSSREDQQSLTLKHGSLLVMRGYTQRDWIHSVPKRAKAEGTRINLTFRLVL

SEQ ID NO: 43541 - protein, 174 aa, Arabidopsis thaliana
  peptide (1)..(174): Ceres Seq. ID no. 12330279
  misc_feature (24)..(84): Homolog of NCBI NO: 21553689 NR Description: unknown [Arabidopsis thaliana]
  misc_feature (24)..(84): Homolog of NCBI NO: 15236057 NR Description: putative protein
  misc_feature (24)..(118): Homolog of NCBI NO: 30692553 NR Description: expressed protein [Arabidopsis thaliana]
  misc_feature (24)..(131): Homolog of NCBI NO: 18399920 NR Description: expressed protein
  misc_feature (24)..(131): Homolog of NCBI NO: 25361079 NR Description: hypothetical protein At2g22270 [imported] -
  misc_feature (21)..(167): Homolog of NCBI NO: 25412094 NR Description: hypothetical protein At2g22260 [imported] -
  misc_feature (21)..(167): Homolog of NCBI NO: 18399917 NR Description: expressed protein
VLFAPLLGITEKGEIKEERNMTNPLNSTAANRSNQPSSDGISDGQITNEEAESLINKKNCSGHKLKEVTDSDTFSDNGKDDSDTKKRFHYHQDQRRMSLTSIVAVESPSSSNAPSRKTIDLGHGSDLIYIQRFLPFQQSWTFFDYLDKHIPWTRPTIRVWSILPPAERYLLCCK

SEQ ID NO: 43542 - protein, 154 aa, Arabidopsis thaliana
  peptide (1)..(154): Ceres Seq. ID no. 12330280
  misc_feature (4)..(64): Homolog of NCBI NO: 21553689 NR Description: unknown [Arabidopsis thaliana]
  misc_feature (4)..(64): Homolog of NCBI NO: 15236057 NR Description: putative protein
  misc_feature (4)..(98): Homolog of NCBI NO: 30692553 NR Description: expressed protein [Arabidopsis thaliana]
  misc_feature (4)..(111): Homolog of NCBI NO: 18399920 NR Description: expressed protein
  misc_feature (4)..(111): Homolog of NCBI NO: 25361079 NR Description: hypothetical protein At2g22270 [imported] -
  misc_feature (1)..(147): Homolog of NCBI NO: 25412094 NR Description: hypothetical protein At2g22260 [imported] -
  misc_feature (1)..(147): Homolog of NCBI NO: 18399917 NR Description: expressed protein
MTNPLNSTAANRSNQPSSDGISDGQITNEEAESLINKKNCSGHKLKEVTDSDTFSDNGKDDSDTKKRFHYHQDQRRMSLTSIVAVESPSSSNAPSRKTIDLGHGSDLIYIQRFLPFQQSWTFFDYLDKHIPWTRPTIRVWSILPPAERYLLCCK

SEQ ID NO: 43543 - DNA, 1669 bp, Arabidopsis thaliana
  misc_feature (1)..(1669): Ceres Seq. ID no. 13592797
  misc_feature: MA Experiment ID: 20000227 Result: Up-regulated in Transcription
  misc_feature: MA Experiment 20000227 PARAMETER Experiment Name: At_Root-Tips-vs-Tops_P Parameter: Tissue Value: Root Tips vs. Root Tops
  misc_feature: MA Experiment ID: 20001247 Result: Down-regulated in Transcription
  misc_feature: MA Experiment 20001247 PARAMETER Experiment Name: At_Far-red-induction_P Parameter: Age (day) Value: 7
  misc_feature: MA Experiment 20001247 PARAMETER Experiment Name: At_Far-red-induction_P Parameter: Light Value: Far-red vs. White
  misc_feature: MA Experiment 20001247 PARAMETER Experiment Name: At_Far-red-induction_P Parameter: Organism Value: A. thaliana
  misc_feature: MA Experiment 20001247 PARAMETER Experiment Name: At_Far-red-induction_P Parameter: Plant Line Value: Columbia
  misc_feature: MA Experiment 20001247 PARAMETER Experiment Name: At_Far-red-induction_P Parameter: Timepoint (hr) Value: 1
  misc_feature: MA Experiment 20001247 PARAMETER Experiment Name: At_Far-red-induction_P Parameter: Tissue Value: Whole Plant
  misc_feature: MA Experiment ID: 20001451 Result: Down-regulated in Transcription
  misc_feature: MA Experiment 20001451 PARAMETER Experiment Name: At_Far-red-induction_P Parameter: Age (day) Value: 7
  misc_feature: MA Experiment 20001451 PARAMETER Experiment Name: At_Far-red-induction_P Parameter: Light Value: Far-red vs. White
  misc_feature: MA Experiment 20001451 PARAMETER Experiment Name: At_Far-red-induction_P Parameter: Organism Value: A. thaliana
  misc_feature: MA Experiment 20001451 PARAMETER Experiment Name: At_Far-red-induction_P Parameter: Plant Line Value: Columbia
  misc_feature: MA Experiment 20001451 PARAMETER Experiment Name: At_Far-red-induction_P Parameter: Timepoint (hr) Value: 24
  misc_feature: MA Experiment 20001451 PARAMETER Experiment Name: At_Far-red-induction_P Parameter: Tissue Value: Whole Plant
actagtttcctttccttagtaaaaccctacatttctccgcccgcctttgatttctccccggccgttcccgccgccggtctccgatttaaccagggttgagtctaattccttctttttgtgctcattgctgtcggattctctaccggcgttacatcgaccagccagactcttccccatttgactgctttagtgattcaatcgctcttttagattctggaagttgtgactcagtatctccccttcaacgaattagcatcctgcgcaagaatgtctattgcatcatcacttacttcagccacactttgcggcgcctcagtttttcctaaagcattagcctgcagctctgagttccctatcaatcttcccagcccttttgaaagttcaaagatttgtttgacttcgtttcctgcctctagggatctcaagaaaaatgctactttgaatctgactcgaaatgttggtccagtcaggtgtcatgctatgcaagctgggacgagggagttgaagaaatttgaacttagtgatgtgattgaagggaaacagtttgatagagagatgctaagcgctatattcgatgttgcacgcgaaatggaaaagatagaaaagagctcttcacaaagcgaaatcctcaagggttatttaaaggctaccctcttttatgagccttctacccgtaccaggctttcatttgaatctgctatgaaacgccttggaggtgaagtcttaactactgagaacgctagagagttttcgtctgccgcgaaaggggaaacacttgaagacacaataagaacagtggagggttattcagatataattgtgatgcgacattttgaaagcggtgctgcaagaaaagctgcagctactgccaatatacctgtcattaatgcaggtgatggtcctggagagcatcctactcaggctctattggacgtctataccatccaaagtgaaattggaaaattagatggcatcagtgtagccttagttggagaccttgccaacggaaggactgtgcggtctcttgcatacttgcttgccaagttcaaagacgtgaagatctactttgtttcccctgaaattgtgaaaatgaaggatgatataaaagactatttgacatcaagcggggttgaatgggaagaaagttcagatttaatggaagtagcatccaagtgtgatgtagtttatcaaacacgaatccaaagagagaggtttggagaaaggctggacctttacgaagcagctcgtgggaagtatatcgtagacaaggatctgttaggagtgatgcagaaaaaagctattatcatgcatcctttaccgagattggatgaaatcaccgcagatgttgatgctgatccaagagctgcctacttcagacaagcaaagaacggtttgttcattagaatggctcttctaaagctactgcttgtcggttggtgattggatagttcatggtcgttaagttaaatcctttaatggactgattctcaagcctaccatgagctcaaggaatctgcaataataaaatccgaagctttagtgatttttgagtgttaagcacaaaagctgtgatcttgatgttaattaaaagaaggatctgttggtttgttggttaaaagactgatatgaggaagagttgttgaacttaatgaataaattgatttgagct

SEQ ID NO: 43544 - protein, 390 aa, Arabidopsis thaliana
  peptide (1)..(390): Ceres Seq. ID no. 13592798
  misc_feature (233)..(387): Pfam Name: Aspartate/ornithine carbamoyltransferase, Pfam Description: Aspartate/ornithine carbamoyltransferase,
  misc_feature (123)..(390): Homolog of NCBI NO: 397385 NR Description: aspartate carbamoyltransferase [Lycopersicon
  misc_feature (123)..(390): Homolog of NCBI NO: 479713 NR Description: aspartate carbamoyltransferase (EC 2.1.3.2) -
  misc_feature (65)..(389): Homolog of NCBI NO: 9453916 NR Description: aspartate carbamoyl transferase
  misc_feature (1)..(390): Homolog of NCBI NO: 3914502 NR Description: Aspartate carbamoyltransferase 1, chloroplast
  misc_feature (1)..(390): Homolog of NCBI NO: 3914501 NR Description: Aspartate carbamoyltransferase 3, chloroplast
  misc_feature (1)..(390): Homolog of NCBI NO: 3914503 NR Description: Aspartate carbamoyltransferase 2, chloroplast
  misc_feature (49)..(390): Homolog of NCBI NO: 21535795 NR Description: aspartate carbamoyltransferase [Solanum tuberosum]
  misc_feature (1)..(390): Homolog of NCBI NO: 15215706 NR Description: AT3g20330/MQC12_8 [Arabidopsis thaliana]
  misc_feature (1)..(390): Homolog of NCBI NO: 1076293 NR Description: aspartate carbamoyltransferase (EC 2.1.3.2) -
  misc_feature (1)..(390): Homolog of NCBI NO: 15231112 NR Description: aspartate carbamoyltransferase precursor
MSIASSLTSATLCGASVFPKALACSSEFPINLPSPFESSKICLTSFPASRDLKKNATLNLTRNVGPVRCHAMQAGTRELKKFELSDVIEGKQFDREMLSAIFDVAREMEKIEKSSSQSEILKGYLKATLFYEPSTRTRLSFESAMKRLGGEVLTTENAREFSSAAKGETLEDTIRTVEGYSDIIVMRHFESGAARKAAATANIPVINAGDGPGEHPTQALLDVYTIQSEIGKLDGISVALVGDLANGRTVRSLAYLLAKFKDVKIYFVSPEIVKMKDDIKDYLTSSGVEWEESSDLMEVASKCDVVYQTRIQRERFGERLDLYEAARGKYIVDKDLLGVMQKKAIIMHPLPRLDEITADVDADPRAAYFRQAKNGLFIRMALLKLLLVGW

SEQ ID NO: 43545 - protein, 319 aa, Arabidopsis thaliana
  peptide (1)..(319): Ceres Seq. ID no. 13592799
  misc_feature (162)..(316): Pfam Name: Aspartate/ornithine carbamoyltransferase, Pfam Description: Aspartate/ornithine carbamoyltransferase,
  misc_feature (52)..(319): Homolog of NCBI NO: 397385 NR Description: aspartate carbamoyltransferase [Lycopersicon
  misc_feature (52)..(319): Homolog of NCBI NO: 479713 NR Description: aspartate carbamoyltransferase (EC 2.1.3.2) -
  misc_feature (1)..(318): Homolog of NCBI NO: 9453916 NR Description: aspartate carbamoyl transferase
  misc_feature (1)..(319): Homolog of NCBI NO: 3914502 NR Description: Aspartate carbamoyltransferase 1, chloroplast
  misc_feature (1)..(319): Homolog of NCBI NO: 3914501 NR Description: Aspartate carbamoyltransferase 3, chloroplast
  misc_feature (1)..(319): Homolog of NCBI NO: 3914503 NR Description: Aspartate carbamoyltransferase 2, chloroplast
  misc_feature (1)..(319): Homolog of NCBI NO: 21535795 NR Description: aspartate carbamoyltransferase [Solanum tuberosum]
  misc_feature (1)..(319): Homolog of NCBI NO: 15215706 NR Description: AT3g20330/MQC12_8 [Arabidopsis thaliana]
  misc_feature (1)..(319): Homolog of NCBI NO: 1076293 NR Description: aspartate carbamoyltransferase (EC 2.1.3.2) -
  misc_feature (1)..(319): Homolog of NCBI NO: 15231112 NR Description: aspartate carbamoyltransferase precursor
MQAGTRELKKFELSDVIEGKQFDREMLSAIFDVAREMEKIEKSSSQSEILKGYLKATLFYEPSTRTRLSFESAMKRLGGEVLTTENAREFSSAAKGETLEDTIRTVEGYSDIIVMRHFESGAARKAAATANIPVINAGDGPGEHPTQALLDVYTIQSEIGKLDGISVALVGDLANGRTVRSLAYLLAKFKDVKIYFVSPEIVKMKDDIKDYLTSSGVEWEESSDLMEVASKCDVVYQTRIQRERFGERLDLYEAARGKYIVDKDLLGVMQKKAIIMHPLPRLDEITADVDADPRAAYFRQAKNGLFIRMALLKLLLVGW

SEQ ID NO: 43546 - protein, 294 aa, Arabidopsis thaliana
  peptide (1)..(294): Ceres Seq. ID no. 13592800
  misc_feature (137)..(291): Pfam Name: Aspartate/ornithine carbamoyltransferase, Pfam Description: Aspartate/ornithine carbamoyltransferase,
  misc_feature (27)..(294): Homolog of NCBI NO: 397385 NR Description: aspartate carbamoyltransferase [Lycopersicon
  misc_feature (27)..(294): Homolog of NCBI NO: 479713 NR Description: aspartate carbamoyltransferase (EC 2.1.3.2) -
  misc_feature (1)..(293): Homolog of NCBI NO: 9453916 NR Description: aspartate carbamoyl transferase
  misc_feature (1)..(294): Homolog of NCBI NO: 3914502 NR Description: Aspartate carbamoyltransferase 1, chloroplast
  misc_feature (1)..(294): Homolog of NCBI NO: 3914501 NR Description: Aspartate carbamoyltransferase 3, chloroplast
  misc_feature (1)..(294): Homolog of NCBI NO: 3914503 NR Description: Aspartate carbamoyltransferase 2, chloroplast
  misc_feature (1)..(294): Homolog of NCBI NO: 21535795 NR Description: aspartate carbamoyltransferase [Solanum tuberosum]
  misc_feature (1)..(294): Homolog of NCBI NO: 15215706 NR Description: AT3g20330/MQC12_8 [Arabidopsis thaliana]
  misc_feature (1)..(294): Homolog of NCBI NO: 1076293 NR Description: aspartate carbamoyltransferase (EC 2.1.3.2) -
  misc_feature (1)..(294): Homolog of NCBI NO: 15231112 NR Description: aspartate carbamoyltransferase precursor
MLSAIFDVAREMEKIEKSSSQSEILKGYLKATLFYEPSTRTRLSFESAMKRLGGEVLTTENAREFSSAAKGETLEDTIRTVEGYSDIIVMRHFESGAARKAAATANIPVINAGDGPGEHPTQALLDVYTIQSEIGKLDGISVALVGDLANGRTVRSLAYLLAKFKDVKIYFVSPEIVKMKDDIKDYLTSSGVEWEESSDLMEVASKCDVVYQTRIQRERFGERLDLYEAARGKYIVDKDLLGVMQKKAIIMHPLPRLDEITADVDADPRAAYFRQAKNGLFIRMALLKLLLVGW

SEQ ID NO: 43547 - DNA, 1488 bp, Arabidopsis thaliana
  misc_feature (1)..(1488): Ceres Seq. ID no. 12602889
  misc_feature: MA Experiment ID: 20000184 Result: Down-regulated in Transcription
  misc_feature: MA Experiment 20000184 PARAMETER Experiment Name: At_Shoots__P Parameter: Age (day) Value: 7
  misc_feature: MA Experiment 20000184 PARAMETER Experiment Name: At_Shoots__P Parameter: Tissue Value: Shoots vs. Whole Plant
  misc_feature: MA Experiment ID: 20000264 Result: Down-regulated in Transcription
  misc_feature: MA Experiment 20000264 PARAMETER Experiment Name: At_Open_Flower_P Parameter: Age (day) Value: 21
  misc_feature: MA Experiment 20000264 PARAMETER Experiment Name: At_Open_Flower_P Parameter: Plant Line Value: WS
  misc_feature: MA Experiment 20000264 PARAMETER Experiment Name: At_Open_Flower_P Parameter: Tissue Value: Open Flower vs. Whole Plant
  misc_feature: MA Experiment ID: 20000438 Result: Down-regulated in Transcription
  misc_feature: MA Experiment 20000438 PARAMETER Experiment Name: At_Shoots__P Parameter: Age (day) Value: 14
  misc_feature: MA Experiment 20000438 PARAMETER Experiment Name: At_Shoots__P Parameter: Tissue Value: Shoots vs. Whole Plant
  misc_feature: MA Experiment ID: 20000495 Result: Up-regulated in Transcription
  misc_feature: MA Experiment 20000495 PARAMETER Experiment Name: At_Guard_Cells_P Parameter: Harvest Date Value: 8/2/2002
  misc_feature: MA Experiment 20000495 PARAMETER Experiment Name: At_Guard_Cells_P Parameter: Organism Value: A. thaliana
  misc_feature: MA Experiment 20000495 PARAMETER Experiment Name: At_Guard_Cells_P Parameter: Tissue Value: Guard Cells vs. Leaves
  misc_feature: MA Experiment ID: 20000794 Result: Down-regulated in Transcription
  misc_feature: MA Experiment 20000794 PARAMETER Experiment Name: At_Petals_P Parameter: Age (day) Value: 23-25 days
  misc_feature: MA Experiment 20000794 PARAMETER Experiment Name: At_Petals_P Parameter: Plant Line Value: WS
  misc_feature: MA Experiment 20000794 PARAMETER Experiment Name: At_Petals_P Parameter: Tissue Value: Petals vs. Whole plant
  misc_feature: MA Experiment ID: 20001773 Result: Up-regulated in Transcription
  misc_feature: MA Experiment 20001773 PARAMETER Experiment Name: At_Far-red-enriched-adult_P Parameter: Age (day) Value: 30
  misc_feature: MA Experiment 20001773 PARAMETER Experiment Name: At_Far-red-enriched-adult_P Parameter: Light Value: Far-red enriched vs. White
  misc_feature: MA Experiment 20001773 PARAMETER Experiment Name: At_Far-red-enriched-adult_P Parameter: Organism Value: A. thaliana
  misc_feature: MA Experiment 20001773 PARAMETER Experiment Name: At_Far-red-enriched-adult_P Parameter: Plant Line Value: Columbia
  misc_feature: MA Experiment 20001773 PARAMETER Experiment Name: At_Far-red-enriched-adult_P Parameter: Timepoint (hr) Value: 48
  misc_feature: MA Experiment 20001773 PARAMETER Experiment Name: At_Far-red-enriched-adult_P Parameter: Tissue Value: Aerial
gcgatccaaaccttcaaacacatctccggtagatatgaaaatccactcttgcctctccgccattcttctgttcctcttcttctctgcttcttccgctaaacaaaatgttcggacagagcgaatttcaggaagtgctggtgatgttttggaggatgatccagtgggaaagcttaaggtttatgtatatgagcttccaagcaagtacaacaagaaattactgcaaaaggatcctcgatgtcttacacacatgtttgctgctgagatttttatgcacaggttccttttatctagtcctgttcgaacgcgtaatcctgatgaagctgattggttttacacgccaatttatcctacttgcgacctcactcctaccggcttgccattaccgtttaaatcgccgcgtatgatgagaagttcgatacaactaatctcatcaaattggccttattggaatcggactgaaggagctgatcacttctttgttgtgccccatgactttggagcttgcttccattatcaggaggaaaaagccattgaaagagggatacttccactactccagcgtgccactttggttcagacatttggtcaaaggaaccatgtctgtttggacgaaggctcgatcactattcctccttttgcacctccacagaagatgcaggcccattttattcctccagatattccacgctctatctttgtctacttccgcggtttattttatgatgttaacaacgaccccgaaggtggatattatgcaagaggtgcaagagcagcggtgtgggagaacttcaagaacaaccctttgtttgacatctcaacagatcacccgacaacatactacgaagacatgcagagagccatcttctgtctatgtcctctaggatgggctccatggagccctaggttagttgaagcagttgtgtttgggtgcattccagttatcatagcagacgacatagtactgcctttcgcagacgccatcccctgggaagaaataggagtctttgttgcggaaaaagacgtccctgaactagacacgatcctaacctcaataccaacagaagtgatcctcagaaaacagagactcctcgcaaatccttcgatgaaacgagccatgcttttccctcaacctgcacaaccaggggatgcattccatcagatacttaacgggctagctcggaagttaccccacgacaaaagcatatacttgaagacaggtgagaaggcactgaactggactgctggtccggttgctgacctgaaaccttggtaaagtcagaaagagaggaatctttttgtatatcttgggtttcacctagagcatacgttgttgcctttctatagcacttcaaaaacattagaagtccaagtcctccgagtggattttttttgtagataacattagtacatttactcgaggtacatgtaccaagtttgttgtacattttctcttcgattgatcatataatactgtacactccttttgtc

SEQ ID NO: 43548 - protein, 423 aa, Arabidopsis thaliana
  peptide (1)..(423): Ceres Seq. ID no. 12602890
  misc_feature (59)..(363): Pfam Name: Exostosin family Pfam Description: Exostosin family
  misc_feature (25)..(395): Homolog of NCBI NO: 25407954 NR Description: hypothetical protein At2g28110 [imported] -
  misc_feature (57)..(400): Homolog of NCBI NO: 15237173 NR Description: putative protein; protein id: At5g22940.1
  misc_feature (18)..(423): Homolog of NCBI NO: 18642697 NR Description: Unknown protein [Oryza sativa]
  misc_feature (83)..(423): Homolog of NCBI NO: 10176877 NR Description: gb|AAC80624.1~gene_id:MAC9.17~strong similarity
  misc_feature (83)..(423): Homolog of NCBI NO: 23821292 NR Description: pectin-glucuronyltransferase [Nicotiana
  misc_feature (31)..(423): Homolog of NCBI NO: 38347167 NR Description: OSJNBa0039C07.13 [Oryza sativa (japonica
  misc_feature (19)..(423): Homolog of NCBI NO: 34907048 NR Description: contains EST D24978(R2878)~similar to Arabidopsis
  misc_feature (12)..(423): Homolog of NCBI NO: 21592991 NR Description: unknown [Arabidopsis thaliana]
  misc_feature (12)..(423): Homolog of NCBI NO: 18424516 NR Description: putative protein
  misc_feature (12)..(423): Homolog of NCBI NO: 15223522 NR Description: unknown protein; protein id: At1g27440.1
RSKPSNTSPVDMKIHSCLSAILLFLFFSASSAKQNVRTERISGSAGDVLEDDPVGKLKVYVYELPSKYNKKLLQKDPRCLTHMFAAEIFMHRFLLSSPVRTRNPDEADWFYTPIYPTCDLTPTGLPLPFKSPRMMRSSIQLISSNWPYWNRTEGADHFFVVPHDFGACFHYQEEKAIERGILPLLQRATLVQTFGQRNHVCLDEGSITIPPFAPPQKMQAHFIPPDIPRSIFVYFRGLFYDVNNDPEGGYYARGARAAVWENFKNNPLFDISTDHPTTYYEDMQRAIFCLCPLGWAPWSPRLVEAVVFGCIPVIIADDIVLPFADAIPWEEIGVFVAEKDVPELDTILTSIPTEVILRKQRLLANPSMKRAMLFPQPAQPGDAFHQILNGLARKLPHDKSIYLKTGEKALNWTAGPVADLKPW

SEQ ID NO: 43549 - protein, 412 aa, Arabidopsis thaliana
  peptide (1)..(412): Ceres Seq. ID no. 12602891
  misc_feature (48)..(352): Pfam Name: Exostosin family Pfam Description: Exostosin family
  misc_feature (14)..(384): Homolog of NCBI NO: 25407954 NR Description: hypothetical protein At2g28110 [imported] -
  misc_feature (46)..(389): Homolog of NCBI NO: 15237173 NR Description: putative protein; protein id: At5g22940.1
  misc_feature (7)..(412): Homolog of NCBI NO: 18642697 NR Description: Unknown protein [Oryza sativa]
  misc_feature (72)..(412): Homolog of NCBI NO: 10176877 NR Description: gb|AAC80624.1~gene_id:MAC9.17~strong similarity
  misc_feature (72)..(412): Homolog of NCBI NO: 23821292 NR Description: pectin-glucuronyltransferase [Nicotiana
  misc_feature (20)..(412): Homolog of NCBI NO: 38347167 NR Description: OSJNBa0039C07.13 [Oryza sativa (japonica
  misc_feature (8)..(412): Homolog of NCBI NO: 34907048 NR Description: contains EST D24978(R2878)~similar to Arabidopsis
  misc_feature (1)..(412): Homolog of NCBI NO: 21592991 NR Description: unknown [Arabidopsis thaliana]
  misc_feature (1)..(412): Homolog of NCBI NO: 18424516 NR Description: putative protein
  misc_feature (1)..(412): Homolog of NCBI NO: 15223522 NR Description: unknown protein; protein id: At1g27440.1
MKIHSCLSAILLFLFFSASSAKQNVRTERISGSAGDVLEDDPVGKLKVYVYELPSKYNKKLLQKDPRCLTHMFAAEIFMHRFLLSSPVRTRNPDEADWFYTPIYPTCDLTPTGLPLPFKSPRMMRSSIQLISSNWPYWNRTEGADHFFVVPHDFGACFHYQEEKAIERGILPLLQRATLVQTFGQRNHVCLDEGSITIPPFAPPQKMQAHFIPPDIPRSIFVYFRGLFYDVNNDPEGGYYARGARAAVWENFKNNPLFDISTDHPTTYYEDMQRAIFCLCPLGWAPWSPRLVEAVVFGCIPVIIADDIVLPFADAIPWEEIGVFVAEKDVPELDTILTSIPTEVILRKQRLLANPSMKRAMLFPQPAQPGDAFHQILNGLARKLPHDKSIYLKTGEKALNWTAGPVADLKPW

SEQ ID NO: 43550 - protein, 341 aa, Arabidopsis thaliana
  peptide (1)..(341): Ceres Seq. ID no. 12602892
  misc_feature (1)..(281): Pfam Name: Exostosin family Pfam Description: Exostosin family
  misc_feature (1)..(313): Homolog of NCBI NO: 25407954 NR Description: hypothetical protein At2g28110 [imported] -
  misc_feature (1)..(318): Homolog of NCBI NO: 15237173 NR Description: putative protein; protein id: At5g22940.1
  misc_feature (1)..(341): Homolog of NCBI NO: 18642697 NR Description: Unknown protein [Oryza sativa]
  misc_feature (1)..(341): Homolog of NCBI NO: 10176877 NR Description: gb|AAC80624.1~gene_id:MAC9.17~strong similarity
  misc_feature (1)..(341): Homolog of NCBI NO: 23821292 NR Description: pectin-glucuronyltransferase [Nicotiana
  misc_feature (1)..(341): Homolog of NCBI NO: 38347167 NR Description: OSJNBa0039C07.13 [Oryza sativa (japonica
  misc_feature (1)..(341): Homolog of NCBI NO: 34907048 NR Description: contains EST D24978(R2878)~similar to Arabidopsis
  misc_feature (1)..(341): Homolog of NCBI NO: 21592991 NR Description: unknown [Arabidopsis thaliana]
  misc_feature (1)..(341): Homolog of NCBI NO: 18424516 NR Description: putative protein
  misc_feature (1)..(341): Homolog of NCBI NO: 15223522 NR Description: unknown protein; protein id: At1g27440.1
MFAAEIFMHRFLLSSPVRTRNPDEADWFYTPIYPTCDLTPTGLPLPFKSPRMMRSSIQLISSNWPYWNRTEGADHFFVVPHDFGACFHYQEEKAIERGILPLLQRATLVQTFGQRNHVCLDEGSITIPPFAPPQKMQAHFIPPDIPRSIFVYFRGLFYDVNNDPEGGYYARGARAAVWENFKNNPLFDISTDHPTTYYEDMQRAIFCLCPLGWAPWSPRLVEAVVFGCIPVIIADDIVLPFADAIPWEEIGVFVAEKDVPELDTILTSIPTEVILRKQRLLANPSMKRAMLFPQPAQPGDAFHQILNGLARKLPHDKSIYLKTGEKALNWTAGPVADLKPW

SEQ ID NO: 43551 - DNA, 1936 bp, Arabidopsis thaliana
  misc_feature (1)..(1936): Ceres Seq. ID no. 13592801
  misc_feature: MA Experiment ID: 20000173 Result: Down-regulated in Transcription
  misc_feature: MA Experiment 20000173 PARAMETER Experiment Name: At_42deg_Heat_P Parameter: Age (day) Value: 14
  misc_feature: MA Experiment 20000173 PARAMETER Experiment Name: At_42deg_Heat_P Parameter: Organism Value: A. thaliana
  misc_feature: MA Experiment 20000173 PARAMETER Experiment Name: At_42deg_Heat_P Parameter: Plant Line Value: WS
  misc_feature: MA Experiment 20000173 PARAMETER Experiment Name: At_42deg_Heat_P Parameter: Temperature (deg C) Value: 42 vs. 22
  misc_feature: MA Experiment 20000173 PARAMETER Experiment Name: At_42deg_Heat_P Parameter: Timepoint (hr) Value: 6
  misc_feature: MA Experiment 20000173 PARAMETER Experiment Name: At_42deg_Heat_P Parameter: Tissue Value: Aerial
  misc_feature: MA Experiment ID: 20000179 Result: Up-regulated in Transcription
  misc_feature: MA Experiment 20000179 PARAMETER Experiment Name: At_Germinating_Seeds_P Parameter: Age (hr) Value: 6 vs. 0
  misc_feature: MA Experiment 20000179 PARAMETER Experiment Name: At_Germinating_Seeds_P Parameter: Tissue Value: Germinating Seeds
  misc_feature: MA Experiment ID: 20000180 Result: Up-regulated in Transcription
  misc_feature: MA Experiment 20000180 PARAMETER Experiment Name: At_Germinating_Seeds_P Parameter: Age (hr) Value: 24 vs. 0
  misc_feature: MA Experiment 20000180 PARAMETER Experiment Name: At_Germinating_Seeds_P Parameter: Tissue Value: Germinating Seeds
  misc_feature: MA Experiment ID: 20000185 Result: Down-regulated in Transcription
  misc_feature: MA Experiment 20000185 PARAMETER Experiment Name: At_Roots__P Parameter: Age (day) Value: 7 vs. 21
  misc_feature: MA Experiment 20000185 PARAMETER Experiment Name: At_Roots__P Parameter: Organism Value: A. thaliana
  misc_feature: MA Experiment 20000185 PARAMETER Experiment Name: At_Roots__P Parameter: Tissue Value: Roots vs. Whole Plant
  misc_feature: MA Experiment ID: 20000234 Result: Down-regulated in Transcription
  misc_feature: MA Experiment 20000234 PARAMETER Experiment Name: At_Siliques_P Parameter: Age (day) Value: 21
  misc_feature: MA Experiment 20000234 PARAMETER Experiment Name: At_Siliques_P Parameter: Organism Value: A. thaliana
  misc_feature: MA Experiment 20000234 PARAMETER Experiment Name: At_Siliques_P Parameter: Plant Line Value: WS
  misc_feature: MA Experiment 20000234 PARAMETER Experiment Name: At_Siliques_P Parameter: Tissue Value: Less Than 5mm Siliques vs. Whole Plant
  misc_feature: MA Experiment ID: 20000264 Result: Down-regulated in Transcription
  misc_feature: MA Experiment 20000264 PARAMETER Experiment Name: At_Open_Flower_P Parameter: Age (day) Value: 21
  misc_feature: MA Experiment 20000264 PARAMETER Experiment Name: At_Open_Flower_P Parameter: Plant Line Value: WS
  misc_feature: MA Experiment 20000264 PARAMETER Experiment Name: At_Open_Flower_P Parameter: Tissue Value: Open Flower vs. Whole Plant
  misc_feature: MA Experiment ID: 20000265 Result: Down-regulated in Transcription
  misc_feature: MA Experiment 20000265 PARAMETER Experiment Name: At_Open_Flower_P Parameter: Age (day) Value: 21
  misc_feature: MA Experiment 20000265 PARAMETER Experiment Name: At_Open_Flower_P Parameter: Plant Line Value: WS
  misc_feature: MA Experiment 20000265 PARAMETER Experiment Name: At_Open_Flower_P Parameter: Tissue Value: Closed Flower vs. Whole Plant
  misc_feature: MA Experiment ID: 20000267 Result: Up-regulated in Transcription
  misc_feature: MA Experiment 20000267 PARAMETER Experiment Name: At_Drought_P Parameter: Age (day) Value: 7
  misc_feature: MA Experiment 20000267 PARAMETER Experiment Name: At_Drought_P Parameter: Organism Value: A. thaliana
  misc_feature: MA Experiment 20000267 PARAMETER Experiment Name: At_Drought_P Parameter: Plant Line Value: WS
  misc_feature: MA Experiment 20000267 PARAMETER Experiment Name: At_Drought_P Parameter: Timepoint (hr) Value: 6
  misc_feature: MA Experiment 20000267 PARAMETER Experiment Name: At_Drought_P Parameter: Tissue Value: Whole Plant
  misc_feature: MA Experiment 20000267 PARAMETER Experiment Name: At_Drought_P Parameter: Treatment Value: Drought vs. No Drought
  misc_feature: MA Experiment ID: 20000286 Result: Down-regulated in Transcription
  misc_feature: MA Experiment 20000286 PARAMETER Experiment Name: At_Open_Flower_P Parameter: Age (day) Value: 21
  misc_feature: MA Experiment 20000286 PARAMETER Experiment Name: At_Open_Flower_P Parameter: Plant Line Value: WS
  misc_feature: MA Experiment 20000286 PARAMETER Experiment Name: At_Open_Flower_P Parameter: Tissue Value: Half Open vs. Whole Plant
  misc_feature: MA Experiment ID: 20000439 Result: Down-regulated in Transcription
  misc_feature: MA Experiment 20000439 PARAMETER Experiment Name: At_Roots__P Parameter: Age (day) Value: 14 vs. 21
  misc_feature: MA Experiment 20000439 PARAMETER Experiment Name: At_Roots__P Parameter: Organism Value: A. thaliana
  misc_feature: MA Experiment 20000439 PARAMETER Experiment Name: At_Roots__P Parameter: Tissue Value: Roots vs. Whole Plant
  misc_feature: MA Experiment ID: 20000496 Result: Down-regulated in Transcription
  misc_feature: MA Experiment 20000496 PARAMETER Experiment Name: At_Guard_Cells_P Parameter: Harvest Date Value: 7/19/2002
  misc_feature: MA Experiment 20000496 PARAMETER Experiment Name: At_Guard_Cells_P Parameter: Organism Value: Canola
  misc_feature: MA Experiment 20000496 PARAMETER Experiment Name: At_Guard_Cells_P Parameter: Tissue Value: Guard Cells vs. Leaves
  misc_feature: MA Experiment ID: 20000527 Result: Down-regulated in Transcription
  misc_feature: MA Experiment 20000527 PARAMETER Experiment Name: At_10percent_PEG_P Parameter: Age (day) Value: 20
  misc_feature: MA Experiment 20000527 PARAMETER Experiment Name: At_10percent_PEG_P Parameter: Organism Value: A. thaliana
  misc_feature: MA Experiment 20000527 PARAMETER Experiment Name: At_10percent_PEG_P Parameter: Plant Line Value: WS
  misc_feature: MA Experiment 20000527 PARAMETER Experiment Name: At_10percent_PEG_P Parameter: Timepoint (day) Value: 20
  misc_feature: MA Experiment 20000527 PARAMETER Experiment Name: At_10percent_PEG_P Parameter: Tissue Value: Whole Plant
  misc_feature: MA Experiment 20000527 PARAMETER Experiment Name: At_10percent_PEG_P Parameter: Treatment Value: 10percent PEG vs. No Treatment
  misc_feature: MA Experiment ID: 20000794 Result: Down-regulated in Transcription
  misc_feature: MA Experiment 20000794 PARAMETER Experiment Name: At_Petals_P Parameter: Age (day) Value: 23-25 days
  misc_feature: MA Experiment 20000794 PARAMETER Experiment Name: At_Petals_P Parameter: Plant Line Value: WS
  misc_feature: MA Experiment 20000794 PARAMETER Experiment Name: At_Petals_P Parameter: Tissue Value: Petals vs. Whole plant
  misc_feature: MA Experiment ID: 20001248 Result: Down-regulated in Transcription
  misc_feature: MA Experiment 20001248 PARAMETER Experiment Name: At_Far-red-induction_P Parameter: Age (day) Value: 7
  misc_feature: MA Experiment 20001248 PARAMETER Experiment Name: At_Far-red-induction_P Parameter: Light Value: Far-red vs. White
  misc_feature: MA Experiment 20001248 PARAMETER Experiment Name: At_Far-red-induction_P Parameter: Organism Value: A. thaliana
  misc_feature: MA Experiment 20001248 PARAMETER Experiment Name: At_Far-red-induction_P Parameter: Plant Line Value: Columbia
  misc_feature: MA Experiment 20001248 PARAMETER Experiment Name: At_Far-red-induction_P Parameter: Timepoint (hr) Value: 4
  misc_feature: MA Experiment 20001248 PARAMETER Experiment Name: At_Far-red-induction_P Parameter: Tissue Value: Whole Plant
  misc_feature: MA Experiment ID: 20001450 Result: Down-regulated in Transcription
  misc_feature: MA Experiment 20001450 PARAMETER Experiment Name: At_Far-red-induction_P Parameter: Age (day) Value: 7
  misc_feature: MA Experiment 20001450 PARAMETER Experiment Name: At_Far-red-induction_P Parameter: Light Value: Far-red vs. White
  misc_feature: MA Experiment 20001450 PARAMETER Experiment Name: At_Far-red-induction_P Parameter: Organism Value: A. thaliana
  misc_feature: MA Experiment 20001450 PARAMETER Experiment Name: At_Far-red-induction_P Parameter: Plant Line Value: Columbia
  misc_feature: MA Experiment 20001450 PARAMETER Experiment Name: At_Far-red-induction_P Parameter: Timepoint (hr) Value: 8
  misc_feature: MA Experiment 20001450 PARAMETER Experiment Name: At_Far-red-induction_P Parameter: Tissue Value: Whole Plant
  misc_feature: MA Experiment ID: 20001451 Result: Down-regulated in Transcription
  misc_feature: MA Experiment 20001451 PARAMETER Experiment Name: At_Far-red-induction_P Parameter: Age (day) Value: 7
  misc_feature: MA Experiment 20001451 PARAMETER Experiment Name: At_Far-red-induction_P Parameter: Light Value: Far-red vs. White
  misc_feature: MA Experiment 20001451 PARAMETER Experiment Name: At_Far-red-induction_P Parameter: Organism Value: A. thaliana
  misc_feature: MA Experiment 20001451 PARAMETER Experiment Name: At_Far-red-induction_P Parameter: Plant Line Value: Columbia
  misc_feature: MA Experiment 20001451 PARAMETER Experiment Name: At_Far-red-induction_P Parameter: Timepoint (hr) Value: 24
  misc_feature: MA Experiment 20001451 PARAMETER Experiment Name: At_Far-red-induction_P Parameter: Tissue Value: Whole Plant
  misc_feature: MA Experiment ID: 20001557 Result: Down-regulated in Transcription
  misc_feature: MA Experiment 20001557 PARAMETER Experiment Name: At_Drought_Soil_Dry_P Parameter: Age (day) Value: 27
  misc_feature: MA Experiment 20001557 PARAMETER Experiment Name: At_Drought_Soil_Dry_P Parameter: Organism Value: A. thaliana
  misc_feature: MA Experiment 20001557 PARAMETER Experiment Name: At_Drought_Soil_Dry_P Parameter: Plant Line Value: WS
  misc_feature: MA Experiment 20001557 PARAMETER Experiment Name: At_Drought_Soil_Dry_P Parameter: Post Timepoint (hr) Value: 3
  misc_feature: MA Experiment 20001557 PARAMETER Experiment Name: At_Drought_Soil_Dry_P Parameter: Post-Treatment Value: Re-Water vs. No Drought
  misc_feature: MA Experiment 20001557 PARAMETER Experiment Name: At_Drought_Soil_Dry_P Parameter: Timepoint (day) Value: 13
  misc_feature: MA Experiment 20001557 PARAMETER Experiment Name: At_Drought_Soil_Dry_P Parameter: Treatment Value: Drought vs. No Drought
  misc_feature: MA Experiment ID: 20001558 Result: Down-regulated in Transcription
  misc_feature: MA Experiment 20001558 PARAMETER Experiment Name: At_Drought_Soil_Dry_P Parameter: Age (day) Value: 27
  misc_feature: MA Experiment 20001558 PARAMETER Experiment Name: At_Drought_Soil_Dry_P Parameter: Organism Value: A. thaliana
  misc_feature: MA Experiment 20001558 PARAMETER Experiment Name: At_Drought_Soil_Dry_P Parameter: Plant Line Value: WS
  misc_feature: MA Experiment 20001558 PARAMETER Experiment Name: At_Drought_Soil_Dry_P Parameter: Post Timepoint (hr) Value: 6
  misc_feature: MA Experiment 20001558 PARAMETER Experiment Name: At_Drought_Soil_Dry_P Parameter: Post-Treatment Value: Re-Water vs. No Drought
  misc_feature: MA Experiment 20001558 PARAMETER Experiment Name: At_Drought_Soil_Dry_P Parameter: Timepoint (day) Value: 13
  misc_feature: MA Experiment 20001558 PARAMETER Experiment Name: At_Drought_Soil_Dry_P Parameter: Treatment Value: Drought vs. No Drought
  misc_feature: MA Experiment ID: 20001560 Result: Down-regulated in Transcription
  misc_feature: MA Experiment 20001560 PARAMETER Experiment Name: At_Drought_Soil_Dry_P Parameter: Age (day) Value: 28
  misc_feature: MA Experiment 20001560 PARAMETER Experiment Name: At_Drought_Soil_Dry_P Parameter: Organism Value: A. thaliana
  misc_feature: MA Experiment 20001560 PARAMETER Experiment Name: At_Drought_Soil_Dry_P Parameter: Plant Line Value: WS
  misc_feature: MA Experiment 20001560 PARAMETER Experiment Name: At_Drought_Soil_Dry_P Parameter: Post Timepoint (hr) Value: None
  misc_feature: MA Experiment 20001560 PARAMETER Experiment Name: At_Drought_Soil_Dry_P Parameter: Post-Treatment Value: None
  misc_feature: MA Experiment 20001560 PARAMETER Experiment Name: At_Drought_Soil_Dry_P Parameter: Timepoint (day) Value: 14
  misc_feature: MA Experiment 20001560 PARAMETER Experiment Name: At_Drought_Soil_Dry_P Parameter: Treatment Value: Drought vs. No Drought
  misc_feature: MA Experiment ID: 20001911 Result: Down-regulated in Transcription
  misc_feature: MA Experiment 20001911 PARAMETER Experiment Name: At_Drought_Reproduction_P Parameter: Age (day) Value: 40
  misc_feature: MA Experiment 20001911 PARAMETER Experiment Name: At_Drought_Reproduction_P Parameter: Organism Value: A. thaliana
  misc_feature: MA Experiment 20001911 PARAMETER Experiment Name: At_Drought_Reproduction_P Parameter: Plant Line Value: WS
  misc_feature: MA Experiment 20001911 PARAMETER Experiment Name: At_Drought_Reproduction_P Parameter: Timepoint (day) Value: 10
  misc_feature: MA Experiment 20001911 PARAMETER Experiment Name: At_Drought_Reproduction_P Parameter: Tissue Value: Flowers
  misc_feature: MA Experiment 20001911 PARAMETER Experiment Name: At_Drought_Reproduction_P Parameter: Treatment Value: Drought vs. No Drought
attcaatacacataatttacttctttctttataactaccatattctcaatcacaacactcgccactgtttcgaatagatggcttctatttcaaccccttttccgatttctctccacccaaaaaccgtacgatcaaagccgttgaaattccgagttttgacccgtccgatcaaagcttccgggtcagaaactcctgatctaaccgtagcgacacgaaccggatccaaagatctcccgatccgaaacataccgggaaactacggtttaccaatcgtaggaccaatcaaagaccgttgggattacttttacgaccaaggagctgaagagttcttcaaatcacgaatccgtaaatacaactccacggtgtacagagtcaacatgccaccgggagcttttatcgccgagaatccacaagtcgtggctttactcgacggtaaaagcttcccggttttattcgatgtcgataaagtcgaaaagaaagatctcttcaccggtacttacatgccgtcaacggaactcaccggaggctaccgtatcctctcgtacctcgatccatcggagccgaaacacgaaaagctcaaaaatctccttttcttcctcctcaagtcatctcgaaaccggatcttccctgagtttcaagctacttactccgagcttttcgattctttggagaaagagctttcccttaaagggaaagcggatttcggcggttccagcgacggaaccgcctttaatttcttggctcgagctttctacgggacgaatcccgcagatacaaagctcaaagccgacgcaccgggtttgatcactaaatgggttttattcaatctccatccattactctctattggtttaccgagagttatagaagaacctctcatccatacatttagtctaccaccggcgttagtcaaatctgattaccagagactctacgagtttttcttagaatccgccggtgatattctcgttgaagccgataaattgkktawacwcamkaaagttggaackggaggggaagctactcacaatcttctcttcgccacgtgcttcaacacgtggggtgggatgaagattttgtttccgaatatggttaaacggatcgggcgggcgggtcatcaagttcataacagattagcggaggagattagatctgtgattaaatccaacggtggagaactcacgatgggagcgattgagaaaatggagttaaccaaatcagtggtttacgaatgtctccggtttgaaccaccggttacggctcaatacggtagagcgaagaaggatttggttatcgaaagccacgacgcggcgtttaaagtcaaagccggtgaaatgctttacggttatcaaccgttggcgacgagagatccgaagatttttgatcgggcggatgagtttgtgccggagagattcgtcggagaagaaggagagaagcttttgaggcatgtgttgtggtcgaatggaccggagacggagactccgacggtggggaataaacaatgcgccggtaaggattttgttgttttggtggcgaggttgtttgtgattgagattttccggcgatatgattcgtttgatattgaggttggtacgtcgccgttaggaagctccgttaatttctcgtcgttaaggaaagctagcttttaggagccaagggtaaaatttgtaattgtttatgttcgcacgtgtgtagtccatctgttttcttgttccagtttcgtgaattttgagaaaatgttgtataatctgttgctgctctacatgttcgttttttttgtcataatattaaagttcaagctggtaataagtatttacaaatctgtgagataatttcaaatacacaagagcatattctttataaaaaaagcacgagttttttacactcaaattttttttgagcctgtgaataataggttttttttaaaaaaaaaccc

SEQ ID NO: 43552 - protein, 523 aa, Arabidopsis thaliana
  peptide (1)..(523): Ceres Seq. ID no. 15221157
  misc_feature (352)..(446): Pfam Name: Cytochrome P450 Pfam Description: Cytochrome P450
  misc_feature (8)..(523): Homolog of NCBI NO: 21616113 NR Description: allene oxide synthase [Cucumis melo]
  misc_feature (29)..(523): Homolog of NCBI NO: 1352186 NR Description: Allene oxide synthase, chloroplast precursor
  misc_feature (3)..(521): Homolog of NCBI NO: 7677376 NR Description: allene oxide synthase [Lycopersicon esculentum]
  misc_feature (1)..(521): Homolog of NCBI NO: 23956572 NR Description: allene oxide synthase [Solanum tuberosum]
  misc_feature (1)..(523): Homolog of NCBI NO: 7581989 NR Description: allene oxide synthase [Lycopersicon esculentum]
  misc_feature (12)..(523): Homolog of NCBI NO: 29373135 NR Description: allene oxide synthase [Citrus sinensis]
  misc_feature (2)..(521): Homolog of NCBI NO: 16973300 NR Description: allene oxide synthase [Nicotiana attenuata]
  misc_feature (1)..(523): Homolog of NCBI NO: 20160362 NR Description: allene oxide synthase [Solanum tuberosum]
  misc_feature (1)..(523): Homolog of NCBI NO: 1890152 NR Description: allene oxide synthase [Arabidopsis thaliana]
  misc_feature (1)..(523): Homolog of NCBI NO: 15239032 NR Description: allene oxide synthase / cytochrome P450 74A
  misc_feature (304)..(304): Xaa is any aa, unknown or other
  misc_feature (305)..(305): Xaa is any aa, unknown or other
  misc_feature (306)..(306): Xaa is any aa, unknown or other
  misc_feature (307)..(307): Xaa is any aa, unknown or other
  misc_feature (311)..(311): Xaa is any aa, unknown or other
MASISTPFPISLHPKTVRSKPLKFRVLTRPIKASGSETPDLTVATRTGSKDLPIRNIPGNYGLPIVGPIKDRWDYFYDQGAEEFFKSRIRKYNSTVYRVNMPPGAFIAENPQVVALLDGKSFPVLFDVDKVEKKDLFTGTYMPSTELTGGYRILSYLDPSEPKHEKLKNLLFFLLKSSRNRIFPEFQATYSELFDSLEKELSLKGKADFGGSSDGTAFNFLARAFYGTNPADTKLKADAPGLITKWVLFNLHPLLSIGLPRVIEEPLIHTFSLPPALVKSDYQRLYEFFLESAGDILVEADKLXXXXKVGXGGEATHNLLFATCFNTWGGMKILFPNMVKRIGRAGHQVHNRLAEEIRSVIKSNGGELTMGAIEKMELTKSVVYECLRFEPPVTAQYGRAKKDLVIESHDAAFKVKAGEMLYGYQPLATRDPKIFDRADEFVPERFVGEEGEKLLRHVLWSNGPETETPTVGNKQCAGKDFVVLVARLFVIEIFRRYDSFDIEVGTSPLGSSVNFSSLRKASF

SEQ ID NO: 43553 - protein, 423 aa, Arabidopsis thaliana
  peptide (1)..(423): Ceres Seq. ID no. 15221158
  misc_feature (252)..(346): Pfam Name: Cytochrome P450 Pfam Description: Cytochrome P450
  misc_feature (1)..(423): Homolog of NCBI NO: 21616113 NR Description: allene oxide synthase [Cucumis melo]
  misc_feature (1)..(423): Homolog of NCBI NO: 1352186 NR Description: Allene oxide synthase, chloroplast precursor
  misc_feature (1)..(421): Homolog of NCBI NO: 7677376 NR Description: allene oxide synthase [Lycopersicon esculentum]
  misc_feature (1)..(421): Homolog of NCBI NO: 23956572 NR Description: allene oxide synthase [Solanum tuberosum]
  misc_feature (1)..(423): Homolog of NCBI NO: 7581989 NR Description: allene oxide synthase [Lycopersicon esculentum]
  misc_feature (1)..(423): Homolog of NCBI NO: 29373135 NR Description: allene oxide synthase [Citrus sinensis]
  misc_feature (1)..(421): Homolog of NCBI NO: 16973300 NR Description: allene oxide synthase [Nicotiana attenuata]
  misc_feature (1)..(423): Homolog of NCBI NO: 20160362 NR Description: allene oxide synthase [Solanum tuberosum]
  misc_feature (1)..(423): Homolog of NCBI NO: 1890152 NR Description: allene oxide synthase [Arabidopsis thaliana]
  misc_feature (1)..(423): Homolog of NCBI NO: 15239032 NR Description: allene oxide synthase / cytochrome P450 74A
  misc_feature (204)..(204): Xaa is any aa, unknown or other
  misc_feature (205)..(205): Xaa is any aa, unknown or other
  misc_feature (206)..(206): Xaa is any aa, unknown or other
  misc_feature (207)..(207): Xaa is any aa, unknown or other
  misc_feature (211)..(211): Xaa is any aa, unknown or other
MPPGAFIAENPQVVALLDGKSFPVLFDVDKVEKKDLFTGTYMPSTELTGGYRILSYLDPSEPKHEKLKNLLFFLLKSSRNRIFPEFQATYSELFDSLEKELSLKGKADFGGSSDGTAFNFLARAFYGTNPADTKLKADAPGLITKWVLFNLHPLLSIGLPRVIEEPLIHTFSLPPALVKSDYQRLYEFFLESAGDILVEADKLXXXXKVGXGGEATHNLLFATCFNTWGGMKILFPNMVKRIGRAGHQVHNRLAEEIRSVIKSNGGELTMGAIEKMELTKSVVYECLRFEPPVTAQYGRAKKDLVIESHDAAFKVKAGEMLYGYQPLATRDPKIFDRADEFVPERFVGEEGEKLLRHVLWSNGPETETPTVGNKQCAGKDFVVLVARLFVIEIFRRYDSFDIEVGTSPLGSSVNFSSLRKASF

SEQ ID NO: 43554 - protein, 382 aa, Arabidopsis thaliana
  peptide (1)..(382): Ceres Seq. ID no. 15221159
  misc_feature (211)..(305): Pfam Name: Cytochrome P450 Pfam Description: Cytochrome P450
  misc_feature (1)..(382): Homolog of NCBI NO: 21616113 NR Description: allene oxide synthase [Cucumis melo]
  misc_feature (1)..(382): Homolog of NCBI NO: 1352186 NR Description: Allene oxide synthase, chloroplast precursor
  misc_feature (1)..(380): Homolog of NCBI NO: 7677376 NR Description: allene oxide synthase [Lycopersicon esculentum]
  misc_feature (1)..(380): Homolog of NCBI NO: 23956572 NR Description: allene oxide synthase [Solanum tuberosum]
  misc_feature (1)..(382): Homolog of NCBI NO: 7581989 NR Description: allene oxide synthase [Lycopersicon esculentum]
  misc_feature (1)..(382): Homolog of NCBI NO: 29373135 NR Description: allene oxide synthase [Citrus sinensis]
  misc_feature (1)..(380): Homolog of NCBI NO: 16973300 NR Description: allene oxide synthase [Nicotiana attenuata]
  misc_feature (1)..(382): Homolog of NCBI NO: 20160362 NR Description: allene oxide synthase [Solanum tuberosum]
  misc_feature (1)..(382): Homolog of NCBI NO: 1890152 NR Description: allene oxide synthase [Arabidopsis thaliana]
  misc_feature (1)..(382): Homolog of NCBI NO: 15239032 NR Description: allene oxide synthase / cytochrome P450 74A
  misc_feature (163)..(163): Xaa is any aa, unknown or other
  misc_feature (164)..(164): Xaa is any aa, unknown or other
  misc_feature (165)..(165): Xaa is any aa, unknown or other
  misc_feature (166)..(166): Xaa is any aa, unknown or other
  misc_feature (170)..(170): Xaa is any aa, unknown or other
MPSTELTGGYRILSYLDPSEPKHEKLKNLLFFLLKSSRNRIFPEFQATYSELFDSLEKELSLKGKADFGGSSDGTAFNFLARAFYGTNPADTKLKADAPGLITKWVLFNLHPLLSIGLPRVIEEPLIHTFSLPPALVKSDYQRLYEFFLESAGDILVEADKLXXXXKVGXGGEATHNLLFATCFNTWGGMKILFPNMVKRIGRAGHQVHNRLAEEIRSVIKSNGGELTMGAIEKMELTKSVVYECLRFEPPVTAQYGRAKKDLVIESHDAAFKVKAGEMLYGYQPLATRDPKIFDRADEFVPERFVGEEGEKLLRHVLWSNGPETETPTVGNKQCAGKDFVVLVARLFVIEIFRRYDSFDIEVGTSPLGSSVNFSSLRKASF

SEQ ID NO: 43555 - DNA, 1894 bp, Arabidopsis thaliana
  misc_feature (1)..(1894): Ceres Seq. ID no. 12338500
  misc_feature: MA Experiment ID: 20000173 Result: Down-regulated in Transcription
  misc_feature: MA Experiment 20000173 PARAMETER Experiment Name: At_42deg_Heat_P Parameter: Age (day) Value: 14
  misc_feature: MA Experiment 20000173 PARAMETER Experiment Name: At_42deg_Heat_P Parameter: Organism Value: A. thaliana
  misc_feature: MA Experiment 20000173 PARAMETER Experiment Name: At_42deg_Heat_P Parameter: Plant Line Value: WS
  misc_feature: MA Experiment 20000173 PARAMETER Experiment Name: At_42deg_Heat_P Parameter: Temperature (deg C) Value: 42 vs. 22
  misc_feature: MA Experiment 20000173 PARAMETER Experiment Name: At_42deg_Heat_P Parameter: Timepoint (hr) Value: 6
  misc_feature: MA Experiment 20000173 PARAMETER Experiment Name: At_42deg_Heat_P Parameter: Tissue Value: Aerial
  misc_feature: MA Experiment ID: 20000179 Result: Up-regulated in Transcription
  misc_feature: MA Experiment 20000179 PARAMETER Experiment Name: At_Germinating_Seeds_P Parameter: Age (hr) Value: 6 vs. 0
  misc_feature: MA Experiment 20000179 PARAMETER Experiment Name: At_Germinating_Seeds_P Parameter: Tissue Value: Germinating Seeds
  misc_feature: MA Experiment ID: 20000180 Result: Up-regulated in Transcription
  misc_feature: MA Experiment 20000180 PARAMETER Experiment Name: At_Germinating_Seeds_P Parameter: Age (hr) Value: 24 vs. 0
  misc_feature: MA Experiment 20000180 PARAMETER Experiment Name: At_Germinating_Seeds_P Parameter: Tissue Value: Germinating Seeds
  misc_feature: MA Experiment ID: 20000184 Result: Down-regulated in Transcription
  misc_feature: MA Experiment 20000184 PARAMETER Experiment Name: At_Shoots__P Parameter: Age (day) Value: 7
  misc_feature: MA Experiment 20000184 PARAMETER Experiment Name: At_Shoots__P Parameter: Tissue Value: Shoots vs. Whole Plant
  misc_feature: MA Experiment ID: 20000185 Result: Up-regulated in Transcription
  misc_feature: MA Experiment 20000185 PARAMETER Experiment Name: At_Roots__P Parameter: Age (day) Value: 7 vs. 21
  misc_feature: MA Experiment 20000185 PARAMETER Experiment Name: At_Roots__P Parameter: Organism Value: A. thaliana
  misc_feature: MA Experiment 20000185 PARAMETER Experiment Name: At_Roots__P Parameter: Tissue Value: Roots vs. Whole Plant
aacaccgtgacagctccttagatctctcctcggttacttcctttttaatttccatggctctctaaaaatctctctctctttctctctctcttacttgtattgttacgatctctgcttgaagattatggacggcgccgatggaaccgttcgcgtcaagcctggtcgcggattcgaaacggagacggatgttgcggtttcgtcgccagtgacacgtcagaaagctgctgcagctaagcaattcatcgagaatcattataagaattacttgcaaggcttgcacgaacgaatggagagacgcagggagtttcagaggaaagtgcaagaagctcagttacctgttgaggaacaagacgagatgatgaggaatctggctcgtcgtgaaactgagtatatgagacttcagagacgtaaaattgggattgatgattttgagcttttgaccgttattggcaaaggtgcctttggtgaggttagattatgtcgtttgagatctacatctgaagtttatgccatgaagaaattgaaaaaaactgagatgcttagccgtggacaggtagagcatgtcaggtccgagaggaacttacttgcagaagttgacagccgttacattgtaaagcttttttactcttttcaagattctgaatgtttgtatcttatcatggagtatttacctgggggtgacatcatgacactactcatgagagaagacattctttctgaagatgttgcccgtttttatattgctgagagcattcttgccatccattcaattcatcaacacaactatgttcacagggacatcaaacctgataatttgatactagacaaaagtgggcatttgaagctttcagattttggtttatgtaagccacttgatgacaagtattcttcattgctattagaagacgatgaaatgttgtctcaggattcagagaaccagtcaggaaaatcagacgctgacaaagcaccctggcaaatgcctaaagagcagttactgcagtggaaacgcaatcgccgtgcattggcttattcaaccgttggaactcttgattacatggctccagaagtactcctaaagaaaggatatggaatggaatgtgattggtggtctctcggcgcaattttgtatgagatgttagttgggtatcccccattctgttctgatgacccccgtataacatgccgcaagataattaattggagggtatgcttgaagttccctgaacaaccaaaaatatcagatgaagccagagacttgatttgtcggttgctttgtgatgttgattcaaggttgggaaccagaggtgttgaggagataaagtcgcatccatggttcaaaggcaccccatgggacaaactgtatgacatggaggcagcttatagacccattgtcgatggagaactagacacacaaaattttgagaagtttcctgaagttgaaggatcaccatccgaagcaccacaagttggtccttggagaaagatgttgacgtccaaggacaccaacttcataggatttacatttaagaagtcagacatcacaagatcaatggaaagttcaggtgcagacatgaaatcaaatggatcaggggaagccccgtcgttgatatcattgttaggtcggatcaatatggaagaaggtgaaggtggtgagttaaaccacaagacatagggaaaatacaaatattattgattttttatccgcttgcagttgttttgatcatttggcagaggcaatggagaggcgatggtagttttttaaccacatcacttatgatggggttcataaaaacttctatttcctttttttttcttgtaacatatttgtttttttttcaatctaaaaaagaaactgtaaagcatggaagaataatttctggaacattttaccccc

SEQ ID NO: 43556 - protein, 515 aa, Arabidopsis thaliana
  peptide (1)..(515): Ceres Seq. ID no. 12338501
  misc_feature (102)..(404): Pfam Name: Protein kinase domain Pfam Description: Protein kinase domain
  misc_feature (16)..(443): Homolog of NCBI NO: 3005054 NR Description: protein kinase Ukc1p [Ustilago maydis]
  misc_feature (19)..(480): Homolog of NCBI NO: 15225358 NR Description: putative protein kinase; protein id: At2g20470.1
  misc_feature (17)..(479): Homolog of NCBI NO: 15234064 NR Description: putative protein kinase; protein id: At4g33080.1
  misc_feature (31)..(504): Homolog of NCBI NO: 541824 NR Description: protein kinase (EC 2.7.1.-) - spinach
  misc_feature (23)..(497): Homolog of NCBI NO: 22331282 NR Description: putative protein kinase
  misc_feature (1)..(499): Homolog of NCBI NO: 37535354 NR Description: putative protein kinase [Oryza sativa (japonica
  misc_feature (1)..(497): Homolog of NCBI NO: 7339534 NR Description: protein kinase MK6 [Mesembryanthemum crystallinum]
  misc_feature (1)..(481): Homolog of NCBI NO: 9758967 NR Description: protein kinase [Arabidopsis thaliana]
  misc_feature (1)..(515): Homolog of NCBI NO: 18416116 NR Description: protein kinase
  misc_feature (1)..(515): Homolog of NCBI NO: 21554143 NR Description: protein kinase [Arabidopsis thaliana]
MDGADGTVRVKPGRGFETETDVAVSSPVTRQKAAAAKQFIENHYKNYLQGLHERMERRREFQRKVQEAQLPVEEQDEMMRNLARRETEYMRLQRRKIGIDDFELLTVIGKGAFGEVRLCRLRSTSEVYAMKKLKKTEMLSRGQVEHVRSERNLLAEVDSRYIVKLFYSFQDSECLYLIMEYLPGGDIMTLLMREDILSEDVARFYIAESILAIHSIHQHNYVHRDIKPDNLILDKSGHLKLSDFGLCKPLDDKYSSLLLEDDEMLSQDSENQSGKSDADKAPWQMPKEQLLQWKRNRRALAYSTVGTLDYMAPEVLLKKGYGMECDWWSLGAILYEMLVGYPPFCSDDPRITCRKIINWRVCLKFPEQPKISDEARDLICRLLCDVDSRLGTRGVEEIKSHPWFKGTPWDKLYDMEAAYRPIVDGELDTQNFEKFPEVEGSPSEAPQVGPWRKMLTSKDTNFIGFTFKKSDITRSMESSGADMKSNGSGEAPSLISLLGRINMEEGEGGELNHKT

SEQ ID NO: 43557 - protein, 461 aa, Arabidopsis thaliana
  peptide (1)..(461): Ceres Seq. ID no. 12338502
  misc_feature (48)..(350): Pfam Name: Protein kinase domain Pfam Description: Protein kinase domain
  misc_feature (1)..(389): Homolog of NCBI NO: 3005054 NR Description: protein kinase Ukc1p [Ustilago maydis]
  misc_feature (1)..(426): Homolog of NCBI NO: 15225358 NR Description: putative protein kinase; protein id: At2g20470.1
  misc_feature (1)..(425): Homolog of NCBI NO: 15234064 NR Description: putative protein kinase; protein id: At4g33080.1
  misc_feature (1)..(450): Homolog of NCBI NO: 541824 NR Description: protein kinase (EC 2.7.1.-) - spinach
  misc_feature (1)..(443): Homolog of NCBI NO: 22331282 NR Description: putative protein kinase
  misc_feature (1)..(445): Homolog of NCBI NO: 37535354 NR Description: putative protein kinase [Oryza sativa (japonica
  misc_feature (1)..(443): Homolog of NCBI NO: 7339534 NR Description: protein kinase MK6 [Mesembryanthemum crystallinum]
  misc_feature (1)..(427): Homolog of NCBI NO: 9758967 NR Description: protein kinase [Arabidopsis thaliana]
  misc_feature (1)..(461): Homolog of NCBI NO: 18416116 NR Description: protein kinase
  misc_feature (1)..(461): Homolog of NCBI NO: 21554143 NR Description: protein kinase [Arabidopsis thaliana]
MERRREFQRKVQEAQLPVEEQDEMMRNLARRETEYMRLQRRKIGIDDFELLTVIGKGAFGEVRLCRLRSTSEVYAMKKLKKTEMLSRGQVEHVRSERNLLAEVDSRYIVKLFYSFQDSECLYLIMEYLPGGDIMTLLMREDILSEDVARFYIAESILAIHSIHQHNYVHRDIKPDNLILDKSGHLKLSDFGLCKPLDDKYSSLLLEDDEMLSQDSENQSGKSDADKAPWQMPKEQLLQWKRNRRALAYSTVGTLDYMAPEVLLKKGYGMECDWWSLGAILYEMLVGYPPFCSDDPRITCRKIINWRVCLKFPEQPKISDEARDLICRLLCDVDSRLGTRGVEEIKSHPWFKGTPWDKLYDMEAAYRPIVDGELDTQNFEKFPEVEGSPSEAPQVGPWRKMLTSKDTNFIGFTFKKSDITRSMESSGADMKSNGSGEAPSLISLLGRINMEEGEGGELNHKT

SEQ ID NO: 43558 - protein, 438 aa, Arabidopsis thaliana
  peptide (1)..(438): Ceres Seq. ID no. 12338503
  misc_feature (25)..(327): Pfam Name: Protein kinase domain Pfam Description: Protein kinase domain
  misc_feature (1)..(366): Homolog of NCBI NO: 3005054 NR Description: protein kinase Ukc1p [Ustilago maydis]
  misc_feature (1)..(403): Homolog of NCBI NO: 15225358 NR Description: putative protein kinase; protein id: At2g20470.1
  misc_feature (1)..(402): Homolog of NCBI NO: 15234064 NR Description: putative protein kinase; protein id: At4g33080.1
  misc_feature (1)..(427): Homolog of NCBI NO: 541824 NR Description: protein kinase (EC 2.7.1.-) - spinach
  misc_feature (1)..(420): Homolog of NCBI NO: 22331282 NR Description: putative protein kinase
  misc_feature (1)..(422): Homolog of NCBI NO: 37535354 NR Description: putative protein kinase [Oryza sativa (japonica
  misc_feature (1)..(420): Homolog of NCBI NO: 7339534 NR Description: protein kinase MK6 [Mesembryanthemum crystallinum]
  misc_feature (1)..(404): Homolog of NCBI NO: 9758967 NR Description: protein kinase [Arabidopsis thaliana]
  misc_feature (1)..(438): Homolog of NCBI NO: 18416116 NR Description: protein kinase
  misc_feature (1)..(438): Homolog of NCBI NO: 21554143 NR Description: protein kinase [Arabidopsis thaliana]
MMRNLARRETEYMRLQRRKIGIDDFELLTVIGKGAFGEVRLCRLRSTSEVYAMKKLKKTEMLSRGQVEHVRSERNLLAEVDSRYIVKLFYSFQDSECLYLIMEYLPGGDIMTLLMREDILSEDVARFYIAESILAIHSIHQHNYVHRDIKPDNLILDKSGHLKLSDFGLCKPLDDKYSSLLLEDDEMLSQDSENQSGKSDADKAPWQMPKEQLLQWKRNRRALAYSTVGTLDYMAPEVLLKKGYGMECDWWSLGAILYEMLVGYPPFCSDDPRITCRKIINWRVCLKFPEQPKISDEARDLICRLLCDVDSRLGTRGVEEIKSHPWFKGTPWDKLYDMEAAYRPIVDGELDTQNFEKFPEVEGSPSEAPQVGPWRKMLTSKDTNFIGFTFKKSDITRSMESSGADMKSNGSGEAPSLISLLGRINMEEGEGGELNHKT

SEQ ID NO: 43559 - DNA, 1338 bp, Arabidopsis thaliana
  misc_feature (1)..(1338): Ceres Seq. ID no. 12389117
  misc_feature: MA Experiment ID: 20000173 Result: Down-regulated in Transcription
  misc_feature: MA Experiment 20000173 PARAMETER Experiment Name: At_42deg_Heat_P Parameter: Age (day) Value: 14
  misc_feature: MA Experiment 20000173 PARAMETER Experiment Name: At_42deg_Heat_P Parameter: Organism Value: A. thaliana
  misc_feature: MA Experiment 20000173 PARAMETER Experiment Name: At_42deg_Heat_P Parameter: Plant Line Value: WS
  misc_feature: MA Experiment 20000173 PARAMETER Experiment Name: At_42deg_Heat_P Parameter: Temperature (deg C) Value: 42 vs. 22
  misc_feature: MA Experiment 20000173 PARAMETER Experiment Name: At_42deg_Heat_P Parameter: Timepoint (hr) Value: 6
  misc_feature: MA Experiment 20000173 PARAMETER Experiment Name: At_42deg_Heat_P Parameter: Tissue Value: Aerial
  misc_feature: MA Experiment ID: 20000180 Result: Down-regulated in Transcription
  misc_feature: MA Experiment 20000180 PARAMETER Experiment Name: At_Germinating_Seeds_P Parameter: Age (hr) Value: 24 vs. 0
  misc_feature: MA Experiment 20000180 PARAMETER Experiment Name: At_Germinating_Seeds_P Parameter: Tissue Value: Germinating Seeds
  misc_feature: MA Experiment ID: 20000184 Result: Down-regulated in Transcription
  misc_feature: MA Experiment 20000184 PARAMETER Experiment Name: At_Shoots__P Parameter: Age (day) Value: 7
  misc_feature: MA Experiment 20000184 PARAMETER Experiment Name: At_Shoots__P Parameter: Tissue Value: Shoots vs. Whole Plant
aaaaacattattcccctctgtggtctctctctcacgagcatcgtttcttcatcgatctcatagttaccggcgttgttttgaggccactaccgtcgtctctctccgtaatcgtctccaacatcatcatcttctcaatttcgaagcattttattctctaatagtgctctctctatatctgggttcgtgttcgtctggaagagacctggaaaaacaattcaggaagacgattagttgtgttcgtgttcgtccctaatccctaaaggactcaggaatgaatctttctccgttcaagagagatatcgatgagctgatagacgagtttgtggaggatgatttgacaacctttgctgatatgaagagtgtctggctatctagaaagttttctcatatatatgaagctagtcctaacagcaacctagcctttttcatgcagtcactatatgttcataccattggtcacatggttagtattgattctttttcacggagacttggaggtctttactgtctctattgccttcatgagatccaaccctttaaacccaagttcagaatctatatctcacttcaagagcttgggaaatttagggatcttgtagttgaggcaaaagataaaggtgtagagatagctgctgctgtggcaaaaaaaatgcttgatgagaacatgttaatatttggagctgtggatgagacatctgcaaccaagacaattcatcaattaaccgagctacagaacgcacgtgtgcggtttgcctatgagaagttaatctgtgacactagtattaaccaatttattcatttggatatgggtaaggaagttgatctgaattccctagataaaatgtctatagaatatgcagaggccaagaagcgtgcagtcgaaggtgcaggagaaataatggagattgatgacataaagcatatatcagaagagaaagagttgatgggagagagaatggagaaattgaaagaggaatgggattcacaaagactttacttttatgaacaaaccaagcttgatggttttactacgacaccaaaacagttgacaaatgtggaacatgatgaagatgatgggtttgatgagcttgatcgcttactttctcaaagctagtgttgccattgcaatcactgatcgatatcagagtcaggtttgtaggagagagctacacacacactctcacaaaatcaagagagcatgtttgattaggagaatatattggttagtaaattctgtatctaacaaggagattaagaaaattttaattacggtttttcttacgattggaaattatgtagtttgtcatattctcagagtatatgtgatttgataatctt

SEQ ID NO: 43560 - protein, 280 aa, Arabidopsis thaliana
  peptide (1)..(280): Ceres Seq. ID no. 12389118
  misc_feature (1)..(277): Homolog of NCBI NO: 37535650 NR Description: unknown protein [Oryza sativa (japonica
  misc_feature (1)..(67): Homolog of NCBI NO: 11285706 NR Description: hypothetical protein T4D2_190.1 - Arabidopsis
  misc_feature (100)..(270): Homolog of NCBI NO: 11285706 NR Description: hypothetical protein T4D2_190.1 - Arabidopsis
  misc_feature (1)..(280): Homolog of NCBI NO: 18409805 NR Description: putative protein
MNLSPFKRDIDELIDEFVEDDLTTFADMKSVWLSRKFSHIYEASPNSNLAFFMQSLYVHTIGHMVSIDSFSRRLGGLYCLYCLHEIQPFKPKFRIYISLQELGKFRDLVVEAKDKGVEIAAAVAKKMLDENMLIFGAVDETSATKTIHQLTELQNARVRFAYEKLICDTSINQFIHLDMGKEVDLNSLDKMSIEYAEAKKRAVEGAGEIMEIDDIKHISEEKELMGERMEKLKEEWDSQRLYFYEQTKLDGFTTTPKQLTNVEHDEDDGFDELDRLLSQS

SEQ ID NO: 43561 - protein, 253 aa, Arabidopsis thaliana
  peptide (1)..(253): Ceres Seq. ID no. 12389119
  misc_feature (1)..(250): Homolog of NCBI NO: 37535650 NR Description: unknown protein [Oryza sativa (japonica
  misc_feature (1)..(40): Homolog of NCBI NO: 11285706 NR Description: hypothetical protein T4D2_190.1 - Arabidopsis
  misc_feature (73)..(243): Homolog of NCBI NO: 11285706 NR Description: hypothetical protein T4D2_190.1 - Arabidopsis
  misc_feature (1)..(253): Homolog of NCBI NO: 18409805 NR Description: putative protein
MKSVWLSRKFSHIYEASPNSNLAFFMQSLYVHTIGHMVSIDSFSRRLGGLYCLYCLHEIQPFKPKFRIYISLQELGKFRDLVVEAKDKGVEIAAAVAKKMLDENMLIFGAVDETSATKTIHQLTELQNARVRFAYEKLICDTSINQFIHLDMGKEVDLNSLDKMSIEYAEAKKRAVEGAGEIMEIDDIKHISEEKELMGERMEKLKEEWDSQRLYFYEQTKLDGFTTTPKQLTNVEHDEDDGFDELDRLLSQS

SEQ ID NO: 43562 - protein, 228 aa, Arabidopsis thaliana
  peptide (1)..(228): Ceres Seq. ID no. 12389120
  misc_feature (1)..(225): Homolog of NCBI NO: 37535650 NR Description: unknown protein [Oryza sativa (japonica
  misc_feature (1)..(15): Homolog of NCBI NO: 11285706 NR Description: hypothetical protein T4D2_190.1 - Arabidopsis
  misc_feature (48)..(218): Homolog of NCBI NO: 11285706 NR Description: hypothetical protein T4D2_190.1 - Arabidopsis
  misc_feature (1)..(228): Homolog of NCBI NO: 18409805 NR Description: putative protein
MQSLYVHTIGHMVSIDSFSRRLGGLYCLYCLHEIQPFKPKFRIYISLQELGKFRDLVVEAKDKGVEIAAAVAKKMLDENMLIFGAVDETSATKTIHQLTELQNARVRFAYEKLICDTSINQFIHLDMGKEVDLNSLDKMSIEYAEAKKRAVEGAGEIMEIDDIKHISEEKELMGERMEKLKEEWDSQRLYFYEQTKLDGFTTTPKQLTNVEHDEDDGFDELDRLLSQS

SEQ ID NO: 43563 - DNA, 529 bp, Arabidopsis thaliana
  misc_feature (1)..(529): Ceres Seq. ID no. 13500001
  misc_feature: MA Experiment ID: 108434 Result: Down-regulated in Transcription
  misc_feature: MA Experiment 108434 PARAMETER Experiment Name: At_Root_Tips_cDNA_P Parameter: Tissue Value: Root Tips
  misc_feature: MA Experiment ID: 108435 Result: Up-regulated in Transcription
  misc_feature: MA Experiment 108435 PARAMETER Experiment Name: At_stm_Mutants_cDNA_P Parameter: Plant Line Value: wt Landsburg vs stm
  misc_feature: MA Experiment 108435 PARAMETER Experiment Name: At_stm_Mutants_cDNA_P Parameter: Tissue Value: Shoot Apical Meristem Region
  misc_feature: MA Experiment ID: 108461 Result: Up-regulated in Transcription
  misc_feature: MA Experiment 108461 PARAMETER Experiment Name: At_Germinating_Seeds_cDNA_P Parameter: Age (day) Value: 1 vs. 0
  misc_feature: MA Experiment 108461 PARAMETER Experiment Name: At_Germinating_Seeds_cDNA_P Parameter: Tissue Value: Germinating Seeds
  misc_feature: MA Experiment ID: 108462 Result: Up-regulated in Transcription
  misc_feature: MA Experiment 108462 PARAMETER Experiment Name: At_Germinating_Seeds_cDNA_P Parameter: Age (day) Value: 2 vs. 0
  misc_feature: MA Experiment 108462 PARAMETER Experiment Name: At_Germinating_Seeds_cDNA_P Parameter: Tissue Value: Germinating Seeds
  misc_feature: MA Experiment ID: 108561 Result: Down-regulated in Transcription
  misc_feature: MA Experiment 108561 PARAMETER Experiment Name: At_100uM_ABA_cDNA_P Parameter: Timepoint (hr) Value: 6
  misc_feature: MA Experiment 108561 PARAMETER Experiment Name: At_100uM_ABA_cDNA_P Parameter: Tissue Value: Aerial
  misc_feature: MA Experiment 108561 PARAMETER Experiment Name: At_100uM_ABA_cDNA_P Parameter: Treatment Value: 100uM ABA vs. No Treatment
  misc_feature: MA Experiment ID: 108577 Result: Down-regulated in Transcription
  misc_feature: MA Experiment 108577 PARAMETER Experiment Name: At_42deg_Heat_cDNA_P Parameter: Temperature (deg C) Value: 42 vs. 22
  misc_feature: MA Experiment 108577 PARAMETER Experiment Name: At_42deg_Heat_cDNA_P Parameter: Timepoint (hr) Value: 6
  misc_feature: MA Experiment 108577 PARAMETER Experiment Name: At_42deg_Heat_cDNA_P Parameter: Tissue Value: Aerial
  misc_feature: MA Experiment ID: 108595 Result: Up-regulated in Transcription
  misc_feature: MA Experiment 108595 PARAMETER Experiment Name: At_Ler-pi_Ovule_cDNA_P Parameter: Plant Line Value: null
  misc_feature: MA Experiment ID: 20000069 Result: Down-regulated in Transcription
  misc_feature: MA Experiment 20000069 PARAMETER Experiment Name: At_100uM_ABA_Mutants_cDNA_P Parameter: Plant Line Value: CS23
  misc_feature: MA Experiment 20000069 PARAMETER Experiment Name: At_100uM_ABA_Mutants_cDNA_P Parameter: Timepoint (hr) Value: 6
  misc_feature: MA Experiment 20000069 PARAMETER Experiment Name: At_100uM_ABA_Mutants_cDNA_P Parameter: Tissue Value: Aerial
  misc_feature: MA Experiment 20000069 PARAMETER Experiment Name: At_100uM_ABA_Mutants_cDNA_P Parameter: Treatment Value: 100uM ABA vs. No Treatment
  misc_feature: MA Experiment ID: 20000093 Result: Down-regulated in Transcription
  misc_feature: MA Experiment 20000093 PARAMETER Experiment Name: At_42deg_Heat_cDNA_P Parameter: Temperature (deg C) Value: 42 vs. 22
  misc_feature: MA Experiment 20000093 PARAMETER Experiment Name: At_42deg_Heat_cDNA_P Parameter: Timepoint (hr) Value: 0.5
  misc_feature: MA Experiment 20000093 PARAMETER Experiment Name: At_42deg_Heat_cDNA_P Parameter: Tissue Value: Aerial
  misc_feature: MA Experiment ID: 20000111 Result: Down-regulated in Transcription
  misc_feature: MA Experiment 20000111 PARAMETER Experiment Name: At_42deg_Heat_cDNA_P Parameter: Temperature (deg C) Value: 42 vs. 22
  misc_feature: MA Experiment 20000111 PARAMETER Experiment Name: At_42deg_Heat_cDNA_P Parameter: Timepoint (hr) Value: 6
  misc_feature: MA Experiment 20000111 PARAMETER Experiment Name: At_42deg_Heat_cDNA_P Parameter: Tissue Value: Aerial
  misc_feature: MA Experiment ID: 20000112 Result: Down-regulated in Transcription
  misc_feature: MA Experiment 20000112 PARAMETER Experiment Name: At_42deg_Heat_cDNA_P Parameter: Temperature (deg C) Value: 42 vs. 22
  misc_feature: MA Experiment 20000112 PARAMETER Experiment Name: At_42deg_Heat_cDNA_P Parameter: Timepoint (hr) Value: 2
  misc_feature: MA Experiment 20000112 PARAMETER Experiment Name: At_42deg_Heat_cDNA_P Parameter: Tissue Value: Aerial
  misc_feature: MA Experiment ID: 20000113 Result: Down-regulated in Transcription
  misc_feature: MA Experiment 20000113 PARAMETER Experiment Name: At_42deg_Heat_cDNA_P Parameter: Temperature (deg C) Value: 42 vs. 22
  misc_feature: MA Experiment 20000113 PARAMETER Experiment Name: At_42deg_Heat_cDNA_P Parameter: Timepoint (hr) Value: 8
  misc_feature: MA Experiment 20000113 PARAMETER Experiment Name: At_42deg_Heat_cDNA_P Parameter: Tissue Value: Aerial
  misc_feature: MA Experiment ID: 20000117 Result: Down-regulated in Transcription
  misc_feature: MA Experiment 20000117 PARAMETER Experiment Name: At_100uM_ABA_Mutants_cDNA_P Parameter: Plant Line Value: Columbia
  misc_feature: MA Experiment 20000117 PARAMETER Experiment Name: At_100uM_ABA_Mutants_cDNA_P Parameter: Timepoint (hr) Value: 6
  misc_feature: MA Experiment 20000117 PARAMETER Experiment Name: At_100uM_ABA_Mutants_cDNA_P Parameter: Tissue Value: Aerial
  misc_feature: MA Experiment 20000117 PARAMETER Experiment Name: At_100uM_ABA_Mutants_cDNA_P Parameter: Treatment Value: 100uM ABA vs. No Treatment
  misc_feature: MA Experiment ID: 20000144 Result: Down-regulated in Transcription
  misc_feature: MA Experiment 20000144 PARAMETER Experiment Name: At_42deg_Heat_cDNA_P Parameter: Temperature (deg C) Value: 42 vs. 22
  misc_feature: MA Experiment 20000144 PARAMETER Experiment Name: At_42deg_Heat_cDNA_P Parameter: Timepoint (hr) Value: 1
  misc_feature: MA Experiment 20000144 PARAMETER Experiment Name: At_42deg_Heat_cDNA_P Parameter: Tissue Value: Aerial
  misc_feature: MA Experiment ID: 20000171 Result: Down-regulated in Transcription
  misc_feature: MA Experiment 20000171 PARAMETER Experiment Name: At_42deg_Heat_P Parameter: Age (day) Value: 14
  misc_feature: MA Experiment 20000171 PARAMETER Experiment Name: At_42deg_Heat_P Parameter: Organism Value: A. thaliana
  misc_feature: MA Experiment 20000171 PARAMETER Experiment Name: At_42deg_Heat_P Parameter: Plant Line Value: WS
  misc_feature: MA Experiment 20000171 PARAMETER Experiment Name: At_42deg_Heat_P Parameter: Temperature (deg C) Value: 42 vs. 22
  misc_feature: MA Experiment 20000171 PARAMETER Experiment Name: At_42deg_Heat_P Parameter: Timepoint (hr) Value: 1
  misc_feature: MA Experiment 20000171 PARAMETER Experiment Name: At_42deg_Heat_P Parameter: Tissue Value: Aerial
  misc_feature: MA Experiment ID: 20000173 Result: Down-regulated in Transcription
  misc_feature: MA Experiment 20000173 PARAMETER Experiment Name: At_42deg_Heat_P Parameter: Age (day) Value: 14
  misc_feature: MA Experiment 20000173 PARAMETER Experiment Name: At_42deg_Heat_P Parameter: Organism Value: A. thaliana
  misc_feature: MA Experiment 20000173 PARAMETER Experiment Name: At_42deg_Heat_P Parameter: Plant Line Value: WS
  misc_feature: MA Experiment 20000173 PARAMETER Experiment Name: At_42deg_Heat_P Parameter: Temperature (deg C) Value: 42 vs. 22
  misc_feature: MA Experiment 20000173 PARAMETER Experiment Name: At_42deg_Heat_P Parameter: Timepoint (hr) Value: 6
  misc_feature: MA Experiment 20000173 PARAMETER Experiment Name: At_42deg_Heat_P Parameter: Tissue Value: Aerial
  misc_feature: MA Experiment ID: 20000179 Result: Up-regulated in Transcription
  misc_feature: MA Experiment 20000179 PARAMETER Experiment Name: At_Germinating_Seeds_P Parameter: Age (hr) Value: 6 vs. 0
  misc_feature: MA Experiment 20000179 PARAMETER Experiment Name: At_Germinating_Seeds_P Parameter: Tissue Value: Germinating Seeds
  misc_feature: MA Experiment ID: 20000180 Result: Up-regulated in Transcription
  misc_feature: MA Experiment 20000180 PARAMETER Experiment Name: At_Germinating_Seeds_P Parameter: Age (hr) Value: 24 vs. 0
  misc_feature: MA Experiment 20000180 PARAMETER Experiment Name: At_Germinating_Seeds_P Parameter: Tissue Value: Germinating Seeds
  misc_feature: MA Experiment ID: 20000184 Result: Down-regulated in Transcription
  misc_feature: MA Experiment 20000184 PARAMETER Experiment Name: At_Shoots__P Parameter: Age (day) Value: 7
  misc_feature: MA Experiment 20000184 PARAMETER Experiment Name: At_Shoots__P Parameter: Tissue Value: Shoots vs. Whole Plant
  misc_feature: MA Experiment ID: 20000185 Result: Down-regulated in Transcription
  misc_feature: MA Experiment 20000185 PARAMETER Experiment Name: At_Roots__P Parameter: Age (day) Value: 7 vs. 21
  misc_feature: MA Experiment 20000185 PARAMETER Experiment Name: At_Roots__P Parameter: Organism Value: A. thaliana
  misc_feature: MA Experiment 20000185 PARAMETER Experiment Name: At_Roots__P Parameter: Tissue Value: Roots vs. Whole Plant
  misc_feature: MA Experiment ID: 20000224 Result: Up-regulated in Transcription
  misc_feature: MA Experiment ID: 20000227 Result: Down-regulated in Transcription
  misc_feature: MA Experiment 20000227 PARAMETER Experiment Name: At_Root-Tips-vs-Tops_P Parameter: Tissue Value: Root Tips vs. Root Tops
  misc_feature: MA Experiment ID: 20000234 Result: Up-regulated in Transcription
  misc_feature: MA Experiment 20000234 PARAMETER Experiment Name: At_Siliques_P Parameter: Age (day) Value: 21
  misc_feature: MA Experiment 20000234 PARAMETER Experiment Name: At_Siliques_P Parameter: Organism Value: A. thaliana
  misc_feature: MA Experiment 20000234 PARAMETER Experiment Name: At_Siliques_P Parameter: Plant Line Value: WS
  misc_feature: MA Experiment 20000234 PARAMETER Experiment Name: At_Siliques_P Parameter: Tissue Value: Less Than 5mm Siliques vs. Whole Plant
  misc_feature: MA Experiment ID: 20000235 Result: Up-regulated in Transcription
  misc_feature: MA Experiment 20000235 PARAMETER Experiment Name: At_Siliques_P Parameter: Age (day) Value: 21
  misc_feature: MA Experiment 20000235 PARAMETER Experiment Name: At_Siliques_P Parameter: Organism Value: A. thaliana
  misc_feature: MA Experiment 20000235 PARAMETER Experiment Name: At_Siliques_P Parameter: Plant Line Value: WS
  misc_feature: MA Experiment 20000235 PARAMETER Experiment Name: At_Siliques_P Parameter: Tissue Value: 5-10mm Siliques vs. Whole Plant
  misc_feature: MA Experiment ID: 20000264 Result: Up-regulated in Transcription
  misc_feature: MA Experiment 20000264 PARAMETER Experiment Name: At_Open_Flower_P Parameter: Age (day) Value: 21
  misc_feature: MA Experiment 20000264 PARAMETER Experiment Name: At_Open_Flower_P Parameter: Plant Line Value: WS
  misc_feature: MA Experiment 20000264 PARAMETER Experiment Name: At_Open_Flower_P Parameter: Tissue Value: Open Flower vs. Whole Plant
  misc_feature: MA Experiment ID: 20000265 Result: Up-regulated in Transcription
  misc_feature: MA Experiment 20000265 PARAMETER Experiment Name: At_Open_Flower_P Parameter: Age (day) Value: 21
  misc_feature: MA Experiment 20000265 PARAMETER Experiment Name: At_Open_Flower_P Parameter: Plant Line Value: WS
  misc_feature: MA Experiment 20000265 PARAMETER Experiment Name: At_Open_Flower_P Parameter: Tissue Value: Closed Flower vs. Whole Plant
  misc_feature: MA Experiment ID: 20000286 Result: Up-regulated in Transcription
  misc_feature: MA Experiment 20000286 PARAMETER Experiment Name: At_Open_Flower_P Parameter: Age (day) Value: 21
  misc_feature: MA Experiment 20000286 PARAMETER Experiment Name: At_Open_Flower_P Parameter: Plant Line Value: WS
  misc_feature: MA Experiment 20000286 PARAMETER Experiment Name: At_Open_Flower_P Parameter: Tissue Value: Half Open vs. Whole Plant
  misc_feature: MA Experiment ID: 20000437 Result: Down-regulated in Transcription
  misc_feature: MA Experiment 20000437 PARAMETER Experiment Name: At_Drought_P Parameter: Age (day) Value: 8
  misc_feature: MA Experiment 20000437 PARAMETER Experiment Name: At_Drought_P Parameter: Organism Value: A. thaliana
  misc_feature: MA Experiment 20000437 PARAMETER Experiment Name: At_Drought_P Parameter: Plant Line Value: WS
  misc_feature: MA Experiment 20000437 PARAMETER Experiment Name: At_Drought_P Parameter: Timepoint (hr) Value: 24
  misc_feature: MA Experiment 20000437 PARAMETER Experiment Name: At_Drought_P Parameter: Tissue Value: Whole Plant
  misc_feature: MA Experiment 20000437 PARAMETER Experiment Name: At_Drought_P Parameter: Treatment Value: Drought vs. No Drought
  misc_feature: MA Experiment ID: 20000439 Result: Down-regulated in Transcription
  misc_feature: MA Experiment 20000439 PARAMETER Experiment Name: At_Roots__P Parameter: Age (day) Value: 14 vs. 21
  misc_feature: MA Experiment 20000439 PARAMETER Experiment Name: At_Roots__P Parameter: Organism Value: A. thaliana
  misc_feature: MA Experiment 20000439 PARAMETER Experiment Name: At_Roots__P Parameter: Tissue Value: Roots vs. Whole Plant
  misc_feature: MA Experiment ID: 20000451 Result: Up-regulated in Transcription
  misc_feature: MA Experiment 20000451 PARAMETER Experiment Name: At_CS6879_Shoots-Roots_P Parameter: Age (day) Value: 14
  misc_feature: MA Experiment 20000451 PARAMETER Experiment Name: At_CS6879_Shoots-Roots_P Parameter: Organism Value: A. thaliana
  misc_feature: MA Experiment 20000451 PARAMETER Experiment Name: At_CS6879_Shoots-Roots_P Parameter: Plant Line Value: CS6879 vs. WS
  misc_feature: MA Experiment 20000451 PARAMETER Experiment Name: At_CS6879_Shoots-Roots_P Parameter: Tissue Value: Roots
  misc_feature: MA Experiment ID: 20000460 Result: Up-regulated in Transcription
  misc_feature: MA Experiment 20000460 PARAMETER Experiment Name: At_10percent_PEG_P Parameter: Age (day) Value: 12
  misc_feature: MA Experiment 20000460 PARAMETER Experiment Name: At_10percent_PEG_P Parameter: Organism Value: A. thaliana
  misc_feature: MA Experiment 20000460 PARAMETER Experiment Name: At_10percent_PEG_P Parameter: Plant Line Value: WS
  misc_feature: MA Experiment 20000460 PARAMETER Experiment Name: At_10percent_PEG_P Parameter: Timepoint (day) Value: 12
  misc_feature: MA Experiment 20000460 PARAMETER Experiment Name: At_10percent_PEG_P Parameter: Tissue Value: Whole Plant
  misc_feature: MA Experiment 20000460 PARAMETER Experiment Name: At_10percent_PEG_P Parameter: Treatment Value: 10percent PEG vs. No Treatment
  misc_feature: MA Experiment ID: 20000495 Result: Up-regulated in Transcription
  misc_feature: MA Experiment 20000495 PARAMETER Experiment Name: At_Guard_Cells_P Parameter: Harvest Date Value: 8/2/2002
  misc_feature: MA Experiment 20000495 PARAMETER Experiment Name: At_Guard_Cells_P Parameter: Organism Value: A. thaliana
  misc_feature: MA Experiment 20000495 PARAMETER Experiment Name: At_Guard_Cells_P Parameter: Tissue Value: Guard Cells vs. Leaves
  misc_feature: MA Experiment ID: 20000573 Result: Down-regulated in Transcription
  misc_feature: MA Experiment 20000573 PARAMETER Experiment Name: At_100uM_ABA_Mutants__P Parameter: Organism Value: A. thaliana
  misc_feature: MA Experiment 20000573 PARAMETER Experiment Name: At_100uM_ABA_Mutants__P Parameter: Plant Line Value: CS22 vs. Ler wt
  misc_feature: MA Experiment 20000573 PARAMETER Experiment Name: At_100uM_ABA_Mutants__P Parameter: Timepoint (hr) Value: N/A
  misc_feature: MA Experiment 20000573 PARAMETER Experiment Name: At_100uM_ABA_Mutants__P Parameter: Tissue Value: Whole Plant
  misc_feature: MA Experiment 20000573 PARAMETER Experiment Name: At_100uM_ABA_Mutants__P Parameter: Treatment Value: None
  misc_feature: MA Experiment ID: 20000574 Result: Down-regulated in Transcription
  misc_feature: MA Experiment 20000574 PARAMETER Experiment Name: At_100uM_ABA_Mutants__P Parameter: Organism Value: A. thaliana
  misc_feature: MA Experiment 20000574 PARAMETER Experiment Name: At_100uM_ABA_Mutants__P Parameter: Plant Line Value: CS23 vs. Ler wt
  misc_feature: MA Experiment 20000574 PARAMETER Experiment Name: At_100uM_ABA_Mutants__P Parameter: Timepoint (hr) Value: N/A
  misc_feature: MA Experiment 20000574 PARAMETER Experiment Name: At_100uM_ABA_Mutants__P Parameter: Tissue Value: Whole Plant
  misc_feature: MA Experiment 20000574 PARAMETER Experiment Name: At_100uM_ABA_Mutants__P Parameter: Treatment Value: None
  misc_feature: MA Experiment ID: 20000794 Result: Down-regulated in Transcription
  misc_feature: MA Experiment 20000794 PARAMETER Experiment Name: At_Petals_P Parameter: Age (day) Value: 23-25 days
  misc_feature: MA Experiment 20000794 PARAMETER Experiment Name: At_Petals_P Parameter: Plant Line Value: WS
  misc_feature: MA Experiment 20000794 PARAMETER Experiment Name: At_Petals_P Parameter: Tissue Value: Petals vs. Whole plant
  misc_feature: MA Experiment ID: 20001248 Result: Down-regulated in Transcription
  misc_feature: MA Experiment 20001248 PARAMETER Experiment Name: At_Far-red-induction_P Parameter: Age (day) Value: 7
  misc_feature: MA Experiment 20001248 PARAMETER Experiment Name: At_Far-red-induction_P Parameter: Light Value: Far-red vs. White
  misc_feature: MA Experiment 20001248 PARAMETER Experiment Name: At_Far-red-induction_P Parameter: Organism Value: A. thaliana
  misc_feature: MA Experiment 20001248 PARAMETER Experiment Name: At_Far-red-induction_P Parameter: Plant Line Value: Columbia
  misc_feature: MA Experiment 20001248 PARAMETER Experiment Name: At_Far-red-induction_P Parameter: Timepoint (hr) Value: 4
  misc_feature: MA Experiment 20001248 PARAMETER Experiment Name: At_Far-red-induction_P Parameter: Tissue Value: Whole Plant
  misc_feature: MA Experiment ID: 20001450 Result: Down-regulated in Transcription
  misc_feature: MA Experiment 20001450 PARAMETER Experiment Name: At_Far-red-induction_P Parameter: Age (day) Value: 7
  misc_feature: MA Experiment 20001450 PARAMETER Experiment Name: At_Far-red-induction_P Parameter: Light Value: Far-red vs. White
  misc_feature: MA Experiment 20001450 PARAMETER Experiment Name: At_Far-red-induction_P Parameter: Organism Value: A. thaliana
  misc_feature: MA Experiment 20001450 PARAMETER Experiment Name: At_Far-red-induction_P Parameter: Plant Line Value: Columbia
  misc_feature: MA Experiment 20001450 PARAMETER Experiment Name: At_Far-red-induction_P Parameter: Timepoint (hr) Value: 8
  misc_feature: MA Experiment 20001450 PARAMETER Experiment Name: At_Far-red-induction_P Parameter: Tissue Value: Whole Plant
  misc_feature: MA Experiment ID: 20001451 Result: Down-regulated in Transcription
  misc_feature: MA Experiment 20001451 PARAMETER Experiment Name: At_Far-red-induction_P Parameter: Age (day) Value: 7
  misc_feature: MA Experiment 20001451 PARAMETER Experiment Name: At_Far-red-induction_P Parameter: Light Value: Far-red vs. White
  misc_feature: MA Experiment 20001451 PARAMETER Experiment Name: At_Far-red-induction_P Parameter: Organism Value: A. thaliana
  misc_feature: MA Experiment 20001451 PARAMETER Experiment Name: At_Far-red-induction_P Parameter: Plant Line Value: Columbia
  misc_feature: MA Experiment 20001451 PARAMETER Experiment Name: At_Far-red-induction_P Parameter: Timepoint (hr) Value: 24
  misc_feature: MA Experiment 20001451 PARAMETER Experiment Name: At_Far-red-induction_P Parameter: Tissue Value: Whole Plant
  misc_feature: MA Experiment ID: 20001457 Result: Up-regulated in Transcription
  misc_feature: MA Experiment 20001457 PARAMETER Experiment Name: At_50mM_NH4NO3_L-to-H_P Parameter: Age (day) Value: Undefined
  misc_feature: MA Experiment 20001457 PARAMETER Experiment Name: At_50mM_NH4NO3_L-to-H_P Parameter: Organism Value: Undefined
  misc_feature: MA Experiment 20001457 PARAMETER Experiment Name: At_50mM_NH4NO3_L-to-H_P Parameter: Plant Line Value: Undefined
  misc_feature: MA Experiment 20001457 PARAMETER Experiment Name: At_50mM_NH4NO3_L-to-H_P Parameter: Timepoint (hr) Value: 0.5
  misc_feature: MA Experiment 20001457 PARAMETER Experiment Name: At_50mM_NH4NO3_L-to-H_P Parameter: Tissue Value: Siliques
  misc_feature: MA Experiment 20001457 PARAMETER Experiment Name: At_50mM_NH4NO3_L-to-H_P Parameter: Treatment Value: 50mM NH4NO3 vs. 100mM Manitol
  misc_feature: MA Experiment ID: 20001555 Result: Down-regulated in Transcription
  misc_feature: MA Experiment 20001555 PARAMETER Experiment Name: At_Drought_Soil_Dry_P Parameter: Age (day) Value: 24
  misc_feature: MA Experiment 20001555 PARAMETER Experiment Name: At_Drought_Soil_Dry_P Parameter: Organism Value: A. thaliana
  misc_feature: MA Experiment 20001555 PARAMETER Experiment Name: At_Drought_Soil_Dry_P Parameter: Plant Line Value: WS
  misc_feature: MA Experiment 20001555 PARAMETER Experiment Name: At_Drought_Soil_Dry_P Parameter: Post Timepoint (hr) Value: None
  misc_feature: MA Experiment 20001555 PARAMETER Experiment Name: At_Drought_Soil_Dry_P Parameter: Post-Treatment Value: None
  misc_feature: MA Experiment 20001555 PARAMETER Experiment Name: At_Drought_Soil_Dry_P Parameter: Timepoint (day) Value: 10
  misc_feature: MA Experiment 20001555 PARAMETER Experiment Name: At_Drought_Soil_Dry_P Parameter: Treatment Value: Drought vs. No Drought
  misc_feature: MA Experiment ID: 20001556 Result: Down-regulated in Transcription
  misc_feature: MA Experiment 20001556 PARAMETER Experiment Name: At_Drought_Soil_Dry_P Parameter: Age (day) Value: 26
  misc_feature: MA Experiment 20001556 PARAMETER Experiment Name: At_Drought_Soil_Dry_P Parameter: Organism Value: A. thaliana
  misc_feature: MA Experiment 20001556 PARAMETER Experiment Name: At_Drought_Soil_Dry_P Parameter: Plant Line Value: WS
  misc_feature: MA Experiment 20001556 PARAMETER Experiment Name: At_Drought_Soil_Dry_P Parameter: Post Timepoint (hr) Value: None
  misc_feature: MA Experiment 20001556 PARAMETER Experiment Name: At_Drought_Soil_Dry_P Parameter: Post-Treatment Value: None
  misc_feature: MA Experiment 20001556 PARAMETER Experiment Name: At_Drought_Soil_Dry_P Parameter: Timepoint (day) Value: 12
  misc_feature: MA Experiment 20001556 PARAMETER Experiment Name: At_Drought_Soil_Dry_P Parameter: Treatment Value: Drought vs. No Drought
  misc_feature: MA Experiment ID: 20001558 Result: Up-regulated in Transcription
  misc_feature: MA Experiment 20001558 PARAMETER Experiment Name: At_Drought_Soil_Dry_P Parameter: Age (day) Value: 27
  misc_feature: MA Experiment 20001558 PARAMETER Experiment Name: At_Drought_Soil_Dry_P Parameter: Organism Value: A. thaliana
  misc_feature: MA Experiment 20001558 PARAMETER Experiment Name: At_Drought_Soil_Dry_P Parameter: Plant Line Value: WS
  misc_feature: MA Experiment 20001558 PARAMETER Experiment Name: At_Drought_Soil_Dry_P Parameter: Post Timepoint (hr) Value: 6
  misc_feature: MA Experiment 20001558 PARAMETER Experiment Name: At_Drought_Soil_Dry_P Parameter: Post-Treatment Value: Re-Water vs. No Drought
  misc_feature: MA Experiment 20001558 PARAMETER Experiment Name: At_Drought_Soil_Dry_P Parameter: Timepoint (day) Value: 13
  misc_feature: MA Experiment 20001558 PARAMETER Experiment Name: At_Drought_Soil_Dry_P Parameter: Treatment Value: Drought vs. No Drought
  misc_feature: MA Experiment ID: 20001559 Result: Down-regulated in Transcription
  misc_feature: MA Experiment 20001559 PARAMETER Experiment Name: At_Drought_Soil_Dry_P Parameter: Age (day) Value: 28
  misc_feature: MA Experiment 20001559 PARAMETER Experiment Name: At_Drought_Soil_Dry_P Parameter: Organism Value: A. thaliana
  misc_feature: MA Experiment 20001559 PARAMETER Experiment Name: At_Drought_Soil_Dry_P Parameter: Plant Line Value: WS
  misc_feature: MA Experiment 20001559 PARAMETER Experiment Name: At_Drought_Soil_Dry_P Parameter: Post Timepoint (hr) Value: 29
  misc_feature: MA Experiment 20001559 PARAMETER Experiment Name: At_Drought_Soil_Dry_P Parameter: Post-Treatment Value: Re-Water vs. No Drought
  misc_feature: MA Experiment 20001559 PARAMETER Experiment Name: At_Drought_Soil_Dry_P Parameter: Timepoint (day) Value: 14
  misc_feature: MA Experiment 20001559 PARAMETER Experiment Name: At_Drought_Soil_Dry_P Parameter: Treatment Value: Drought vs. No Drought
  misc_feature: MA Experiment ID: 20001560 Result: Up-regulated in Transcription
  misc_feature: MA Experiment 20001560 PARAMETER Experiment Name: At_Drought_Soil_Dry_P Parameter: Age (day) Value: 28
  misc_feature: MA Experiment 20001560 PARAMETER Experiment Name: At_Drought_Soil_Dry_P Parameter: Organism Value: A. thaliana
  misc_feature: MA Experiment 20001560 PARAMETER Experiment Name: At_Drought_Soil_Dry_P Parameter: Plant Line Value: WS
  misc_feature: MA Experiment 20001560 PARAMETER Experiment Name: At_Drought_Soil_Dry_P Parameter: Post Timepoint (hr) Value: None
  misc_feature: MA Experiment 20001560 PARAMETER Experiment Name: At_Drought_Soil_Dry_P Parameter: Post-Treatment Value: None
  misc_feature: MA Experiment 20001560 PARAMETER Experiment Name: At_Drought_Soil_Dry_P Parameter: Timepoint (day) Value: 14
  misc_feature: MA Experiment 20001560 PARAMETER Experiment Name: At_Drought_Soil_Dry_P Parameter: Treatment Value: Drought vs. No Drought
gtaacacaaatacaccaaaaaaaaaaaaacagaaagtaacatgagatctctcttattagccgtgtgcctggttcttgctttacactgcggtgaagcagccgtgtcttgcaacacggtgattgcggatctttacccttgcttatcctacgtgactcagggcggaccggtcccaaccctctgctgcaacggtctcacaacactcaagagtcaggctcaaacttctgtggaccgtcagggggtctgtcgttgcatcaaatctgctattggaggactcactctctctcctagaaccatccaaaatgctttggaattgccttctaaatgtggtgtcgatctcccttacaagttcagcccttccactgactgcgacagtatccagtgagacaagcagaaaatcttaaaggaagctactacaagaactataataacctaataattaataaatgagggcattggtttgctagttgctaattgatcagtgatgtattgtcattttgaatgttctaatatcagcaggcacttatctctg

SEQ ID NO: 43564 - protein, 113 aa, Arabidopsis thaliana; identical to SEQ ID NO: 36177
  peptide (1)..(113): Ceres Seq. ID no. 13500002
  misc_feature (23)..(109): Pfam Name: Protease inhibitor/seed storage/LTP family Pfam Description: Protease inhibitor/seed storage/LTP family
  misc_feature (5)..(113): Homolog of NCBI NO: 11095210 NR Description: lipid transfer protein 3 precursor [Gossypium
  misc_feature (3)..(113): Homolog of NCBI NO: 18477856 NR Description: lipid transfer protein [Fragaria x ananassa]
  misc_feature (9)..(113): Homolog of NCBI NO: 7438274 NR Description: lipid transfer protein SDi-9, drought-induced -
  misc_feature (5)..(113): Homolog of NCBI NO: 16930759 NR Description: lipid transfer protein-like protein [Retama
  misc_feature (9)..(113): Homolog of NCBI NO: 6093512 NR Description: NONSPECIFIC LIPID-TRANSFER PROTEIN PRECURSOR
  misc_feature (4)..(113): Homolog of NCBI NO: 2497753 NR Description: NONSPECIFIC LIPID-TRANSFER PROTEIN 3 PRECURSOR
  misc_feature (3)..(113): Homolog of NCBI NO: 6782436 NR Description: lipid-transfer protein [Nicotiana glauca]
  misc_feature (8)..(113): Homolog of NCBI NO: 16903206 NR Description: lipid transfer protein precursor [Davidia
  misc_feature (1)..(113): Homolog of NCBI NO: 15241086 NR Description: lipid transfer protein, putative [Arabidopsis
  misc_feature (1)..(113): Homolog of NCBI NO: 15231964 NR Description: lipid transfer protein 6 (ltp6) [Arabidopsis

SEQ ID NO: 43565 - DNA, 1251 bp, Arabidopsis thaliana
  misc_feature (1)..(1251): Ceres Seq. ID no. 13593313
  misc_feature: MA Experiment ID: 20000307 Result: Up-regulated in Transcription
  misc_feature: MA Experiment 20000307 PARAMETER Experiment Name: At_Germinating_Seeds_Sub_P Parameter: Age (hr) Value: 24 vs. 0
  misc_feature: MA Experiment 20000307 PARAMETER Experiment Name: At_Germinating_Seeds_Sub_P Parameter: Organism Value: A. thaliana
  misc_feature: MA Experiment 20000307 PARAMETER Experiment Name: At_Germinating_Seeds_Sub_P Parameter: Plant Line Value: WS
  misc_feature: MA Experiment 20000307 PARAMETER Experiment Name: At_Germinating_Seeds_Sub_P Parameter: Tissue Value: Germinating Seeds
  misc_feature: MA Experiment ID: 20000315 Result: Down-regulated in Transcription
  misc_feature: MA Experiment 20000315 PARAMETER Experiment Name: At_14day_Shoots-Roots_Sub_P Parameter: Age (day) Value: 14
  misc_feature: MA Experiment 20000315 PARAMETER Experiment Name: At_14day_Shoots-Roots_Sub_P Parameter: Organism Value: A. thaliana
  misc_feature: MA Experiment 20000315 PARAMETER Experiment Name: At_14day_Shoots-Roots_Sub_P Parameter: Plant Line Value: WS
  misc_feature: MA Experiment 20000315 PARAMETER Experiment Name: At_14day_Shoots-Roots_Sub_P Parameter: Tissue Value: Shoots vs. Whole Plant
  misc_feature: MA Experiment ID: 20000328 Result: Down-regulated in Transcription
  misc_feature: MA Experiment 20000328 PARAMETER Experiment Name: At_42deg_Heat_Sub_P Parameter: Age (day) Value: 14
  misc_feature: MA Experiment 20000328 PARAMETER Experiment Name: At_42deg_Heat_Sub_P Parameter: Organism Value: A. thaliana
  misc_feature: MA Experiment 20000328 PARAMETER Experiment Name: At_42deg_Heat_Sub_P Parameter: Plant Line Value: WS
  misc_feature: MA Experiment 20000328 PARAMETER Experiment Name: At_42deg_Heat_Sub_P Parameter: Temperature (deg C) Value: 42 vs. 22
  misc_feature: MA Experiment 20000328 PARAMETER Experiment Name: At_42deg_Heat_Sub_P Parameter: Timepoint (hr) Value: 6
  misc_feature: MA Experiment 20000328 PARAMETER Experiment Name: At_42deg_Heat_Sub_P Parameter: Tissue Value: Aerial
  misc_feature: MA Experiment ID: 20000349 Result: Up-regulated in Transcription
  misc_feature: MA Experiment 20000349 PARAMETER Experiment Name: At_100uM_ABA_Sub_P Parameter: Age (day) Value: 14
  misc_feature: MA Experiment 20000349 PARAMETER Experiment Name: At_100uM_ABA_Sub_P Parameter: Organism Value: A. thaliana
  misc_feature: MA Experiment 20000349 PARAMETER Experiment Name: At_100uM_ABA_Sub_P Parameter: Plant Line Value: WS
  misc_feature: MA Experiment 20000349 PARAMETER Experiment Name: At_100uM_ABA_Sub_P Parameter: Timepoint (hr) Value: 6
  misc_feature: MA Experiment 20000349 PARAMETER Experiment Name: At_100uM_ABA_Sub_P Parameter: Tissue Value: Aerial
  misc_feature: MA Experiment 20000349 PARAMETER Experiment Name: At_100uM_ABA_Sub_P Parameter: Treatment Value: 100uM ABA vs. No Treatment
  misc_feature: MA Experiment ID: 20000355 Result: Down-regulated in Transcription
  misc_feature: MA Experiment 20000355 PARAMETER Experiment Name: At_Siliques_Sub_P Parameter: Age (day) Value: 21
  misc_feature: MA Experiment 20000355 PARAMETER Experiment Name: At_Siliques_Sub_P Parameter: Organism Value: A. thaliana
  misc_feature: MA Experiment 20000355 PARAMETER Experiment Name: At_Siliques_Sub_P Parameter: Plant Line Value: WS
  misc_feature: MA Experiment 20000355 PARAMETER Experiment Name: At_Siliques_Sub_P Parameter: Tissue Value: Less Than 5mm Siliques vs. Whole Plant
  misc_feature: MA Experiment ID: 20000440 Result: Down-regulated in Transcription
  misc_feature: MA Experiment 20000440 PARAMETER Experiment Name: At_Closed-Flower__Sub_P Parameter: Tissue Value: Closed Flower vs. Whole Plant
  misc_feature: MA Experiment ID: 20001807 Result: Down-regulated in Transcription
  misc_feature: MA Experiment 20001807 PARAMETER Experiment Name: At_50mM_NH4NO3_L-to-H_Sub_P Parameter: Timepoint (hr) Value: 6
  misc_feature: MA Experiment 20001807 PARAMETER Experiment Name: At_50mM_NH4NO3_L-to-H_Sub_P Parameter: Tissue Value: Leaf
  misc_feature: MA Experiment 20001807 PARAMETER Experiment Name: At_50mM_NH4NO3_L-to-H_Sub_P Parameter: Treatment Value: 50mM NH4NO3 vs 100mM Mannitol
ataatgaattaaagaatcacatttcatacaacctttctatcattttccaataatggcccggacagtaagtctctggcggagagaggccgtgttcttgacggccatgctggcgacagaaaccggcgtagtcggaataagtactttgtttaaagtagcaacttcaaagggactcaatctttacgctttcctcggctattcttatcttcttgcttctctccttcttcttccttctctgttcttcaccgacaggtcaagatcacttcctccactaagtttgtcaatactttctaaaataggacttcttggattgctaggatcaatgtatgtgatcacaggatacataggcatcgaatacagcagcccaaccttagcctctgccattagcaatatcactcctgctcttaccttcatcctcgccattatcttcagaatggaaaaagtatctttcaaagaaaggagcagtgtagccaaagtgatggggacgatattgtcgttaataggcgcacttgttgtggttctctaccatggtccacgtgtctttgttgcatcttctccgccgtatataaacttccgtcagctttctccgccgttatcatcttcaaattcagattggctcatcggcggagctcttcttaccataagagacatctttgtttctgtttctttcattctccaggcaaaaataatgagtacatatccagcagcattcacagtctccttcctctacattgtatcggtttcaatcgtgacttcaatgattggactagtagtggaaaagaacaatccaagcgtttggatcattcgatttgatattactttgataacaattgtaactatggcaataattacttcagtatactatgtgatccattcatggacagtacgtcacaaaggacctctatacttagcgatatttaagcctttgtcgattttaatagcggtggttatgagcgcagtttttctcaacgattctctctatctcggatgtttgataggaggactattgataacgttggggttttacgctgtgatgtggggtaaagcaaacgaagagaaagatcaattgttgttagtttcaggaaaagagagaacccctcttctattgaacggctaanntggccaaattagaattaaaaataaattagaactaatttacatattcttagccacacttttgggtaatgtgtacatgtatattactactctatttcatgttgcgctttgtttataacttgaataattgttttaacc

SEQ ID NO: 43566 - protein, 353 aa, Arabidopsis thaliana
  peptide (1)..(353): Ceres Seq. ID no. 15221208
  misc_feature (24)..(156): Pfam Name: Integral membrane protein DUF6 Pfam Description: Integral membrane protein DUF6
  misc_feature (4)..(88): Homolog of NCBI NO: 11994131 NR Description: nodulin-like protein [Arabidopsis thaliana]
  misc_feature (127)..(350): Homolog of NCBI NO: 11994131 NR Description: nodulin-like protein [Arabidopsis thaliana]
  misc_feature (127)..(353): Homolog of NCBI NO: 15232901 NR Description: nodulin MtN21 family protein [Arabidopsis
  misc_feature (90)..(353): Homolog of NCBI NO: 11994129 NR Description: contains similarity to nodulin~gene_id:MMG15.13
  misc_feature (1)..(262): Homolog of NCBI NO: 11994127 NR Description: contains similarity to nodulin~gene_id:MMG15.11
  misc_feature (1)..(353): Homolog of NCBI NO: 30689045 NR Description: nodulin MtN21 family protein [Arabidopsis
  misc_feature (1)..(353): Homolog of NCBI NO: 18405642 NR Description: nodulin MtN21 family protein [Arabidopsis
  misc_feature (1)..(353): Homolog of NCBI NO: 21618226 NR Description: contains similarity to integral membrane protein
  misc_feature (1)..(352): Homolog of NCBI NO: 22331380 NR Description: nodulin MtN21 family protein [Arabidopsis
  misc_feature (1)..(353): Homolog of NCBI NO: 11994130 NR Description: contains similarity to integral membrane protein
MARTVSLWRREAVFLTAMLATETGVVGISTLFKVATSKGLNLYAFLGYSYLLASLLLLPSLFFTDRSRSLPPLSLSILSKIGLLGLLGSMYVITGYIGIEYSSPTLASAISNITPALTFILAIIFRMEKVSFKERSSVAKVMGTILSLIGALVVVLYHGPRVFVASSPPYINFRQLSPPLSSSNSDWLIGGALLTIRDIFVSVSFILQAKIMSTYPAAFTVSFLYIVSVSIVTSMIGLVVEKNNPSVWIIRFDITLITIVTMAIITSVYYVIHSWTVRHKGPLYLAIFKPLSILIAVVMSAVFLNDSLYLGCLIGGLLITLGFYAVMWGKANEEKDQLLLVSGKERTPLLLNG

SEQ ID NO: 43567 - protein, 336 aa, Arabidopsis thaliana
  peptide (1)..(336): Ceres Seq. ID no. 15221209
  misc_feature (7)..(139): Pfam Name: Integral membrane protein DUF6 Pfam Description: Integral membrane protein DUF6
  misc_feature (1)..(71): Homolog of NCBI NO: 11994131 NR Description: nodulin-like protein [Arabidopsis thaliana]
  misc_feature (110)..(333): Homolog of NCBI NO: 11994131 NR Description: nodulin-like protein [Arabidopsis thaliana]
  misc_feature (110)..(336): Homolog of NCBI NO: 15232901 NR Description: nodulin MtN21 family protein [Arabidopsis
  misc_feature (73)..(336): Homolog of NCBI NO: 11994129 NR Description: contains similarity to nodulin~gene_id:MMG15.13
  misc_feature (1)..(245): Homolog of NCBI NO: 11994127 NR Description: contains similarity to nodulin~gene_id:MMG15.11
  misc_feature (1)..(336): Homolog of NCBI NO: 30689045 NR Description: nodulin MtN21 family protein [Arabidopsis
  misc_feature (1)..(336): Homolog of NCBI NO: 18405642 NR Description: nodulin MtN21 family protein [Arabidopsis
  misc_feature (1)..(336): Homolog of NCBI NO: 21618226 NR Description: contains similarity to integral membrane protein
  misc_feature (1)..(335): Homolog of NCBI NO: 22331380 NR Description: nodulin MtN21 family protein [Arabidopsis
  misc_feature (1)..(336): Homolog of NCBI NO: 11994130 NR Description: contains similarity to integral membrane protein
MLATETGVVGISTLFKVATSKGLNLYAFLGYSYLLASLLLLPSLFFTDRSRSLPPLSLSILSKIGLLGLLGSMYVITGYIGIEYSSPTLASAISNITPALTFILAIIFRMEKVSFKERSSVAKVMGTILSLIGALVVVLYHGPRVFVASSPPYINFRQLSPPLSSSNSDWLIGGALLTIRDIFVSVSFILQAKIMSTYPAAFTVSFLYIVSVSIVTSMIGLVVEKNNPSVWIIRFDITLITIVTMAIITSVYYVIHSWTVRHKGPLYLAIFKPLSILIAVVMSAVFLNDSLYLGCLIGGLLITLGFYAVMWGKANEEKDQLLLVSGKERTPLLLNG

SEQ ID NO: 43568 - protein, 264 aa, Arabidopsis thaliana
  peptide (1)..(264): Ceres Seq. ID no. 15221210
  misc_feature (1)..(67): Pfam Name: Integral membrane protein DUF6 Pfam Description: Integral membrane protein DUF6
  misc_feature (89)..(263): Homolog of NCBI NO: 18421959 NR Description: nodulin MtN21 family protein [Arabidopsis
  misc_feature (38)..(261): Homolog of NCBI NO: 11994131 NR Description: nodulin-like protein [Arabidopsis thaliana]
  misc_feature (38)..(264): Homolog of NCBI NO: 15232901 NR Description: nodulin MtN21 family protein [Arabidopsis
  misc_feature (1)..(264): Homolog of NCBI NO: 11994129 NR Description: contains similarity to nodulin~gene_id:MMG15.13
  misc_feature (1)..(173): Homolog of NCBI NO: 11994127 NR Description: contains similarity to nodulin~gene_id:MMG15.11
  misc_feature (1)..(264): Homolog of NCBI NO: 30689045 NR Description: nodulin MtN21 family protein [Arabidopsis
  misc_feature (1)..(264): Homolog of NCBI NO: 18405642 NR Description: nodulin MtN21 family protein [Arabidopsis
  misc_feature (1)..(264): Homolog of NCBI NO: 21618226 NR Description: contains similarity to integral membrane protein
  misc_feature (1)..(263): Homolog of NCBI NO: 22331380 NR Description: nodulin MtN21 family protein [Arabidopsis
  misc_feature (1)..(264): Homolog of NCBI NO: 11994130 NR Description: contains similarity to integral membrane protein
MYVITGYIGIEYSSPTLASAISNITPALTFILAIIFRMEKVSFKERSSVAKVMGTILSLIGALVVVLYHGPRVFVASSPPYINFRQLSPPLSSSNSDWLIGGALLTIRDIFVSVSFILQAKIMSTYPAAFTVSFLYIVSVSIVTSMIGLVVEKNNPSVWIIRFDITLITIVTMAIITSVYYVIHSWTVRHKGPLYLAIFKPLSILIAVVMSAVFLNDSLYLGCLIGGLLITLGFYAVMWGKANEEKDQLLLVSGKERTPLLLNG

SEQ ID NO: 43569 - DNA, 1577 bp, Arabidopsis thaliana
  misc_feature (1)..(1577): Ceres Seq. ID no. 12331009
  misc_feature: MA Experiment ID: 108461 Result: Up-regulated in Transcription
  misc_feature: MA Experiment 108461 PARAMETER Experiment Name: At_Germinating_Seeds_cDNA_P Parameter: Age (day) Value: 1 vs. 0
  misc_feature: MA Experiment 108461 PARAMETER Experiment Name: At_Germinating_Seeds_cDNA_P Parameter: Tissue Value: Germinating Seeds
  misc_feature: MA Experiment ID: 20000111 Result: Down-regulated in Transcription
  misc_feature: MA Experiment 20000111 PARAMETER Experiment Name: At_42deg_Heat_cDNA_P Parameter: Temperature (deg C) Value: 42 vs. 22
  misc_feature: MA Experiment 20000111 PARAMETER Experiment Name: At_42deg_Heat_cDNA_P Parameter: Timepoint (hr) Value: 6
  misc_feature: MA Experiment 20000111 PARAMETER Experiment Name: At_42deg_Heat_cDNA_P Parameter: Tissue Value: Aerial
  misc_feature: MA Experiment ID: 20000113 Result: Down-regulated in Transcription
  misc_feature: MA Experiment 20000113 PARAMETER Experiment Name: At_42deg_Heat_cDNA_P Parameter: Temperature (deg C) Value: 42 vs. 22
  misc_feature: MA Experiment 20000113 PARAMETER Experiment Name: At_42deg_Heat_cDNA_P Parameter: Timepoint (hr) Value: 8
  misc_feature: MA Experiment 20000113 PARAMETER Experiment Name: At_42deg_Heat_cDNA_P Parameter: Tissue Value: Aerial
  misc_feature: MA Experiment ID: 20000173 Result: Down-regulated in Transcription
  misc_feature: MA Experiment 20000173 PARAMETER Experiment Name: At_42deg_Heat_P Parameter: Age (day) Value: 14
  misc_feature: MA Experiment 20000173 PARAMETER Experiment Name: At_42deg_Heat_P Parameter: Organism Value: A. thaliana
  misc_feature: MA Experiment 20000173 PARAMETER Experiment Name: At_42deg_Heat_P Parameter: Plant Line Value: WS
  misc_feature: MA Experiment 20000173 PARAMETER Experiment Name: At_42deg_Heat_P Parameter: Temperature (deg C) Value: 42 vs. 22
  misc_feature: MA Experiment 20000173 PARAMETER Experiment Name: At_42deg_Heat_P Parameter: Timepoint (hr) Value: 6
  misc_feature: MA Experiment 20000173 PARAMETER Experiment Name: At_42deg_Heat_P Parameter: Tissue Value: Aerial
  misc_feature: MA Experiment ID: 20000180 Result: Up-regulated in Transcription
  misc_feature: MA Experiment 20000180 PARAMETER Experiment Name: At_Germinating_Seeds_P Parameter: Age (hr) Value: 24 vs. 0
  misc_feature: MA Experiment 20000180 PARAMETER Experiment Name: At_Germinating_Seeds_P Parameter: Tissue Value: Germinating Seeds
  misc_feature: MA Experiment ID: 20000184 Result: Up-regulated in Transcription
  misc_feature: MA Experiment 20000184 PARAMETER Experiment Name: At_Shoots__P Parameter: Age (day) Value: 7
  misc_feature: MA Experiment 20000184 PARAMETER Experiment Name: At_Shoots__P Parameter: Tissue Value: Shoots vs. Whole Plant
  misc_feature: MA Experiment ID: 20000234 Result: Up-regulated in Transcription
  misc_feature: MA Experiment 20000234 PARAMETER Experiment Name: At_Siliques_P Parameter: Age (day) Value: 21
  misc_feature: MA Experiment 20000234 PARAMETER Experiment Name: At_Siliques_P Parameter: Organism Value: A. thaliana
  misc_feature: MA Experiment 20000234 PARAMETER Experiment Name: At_Siliques_P Parameter: Plant Line Value: WS
  misc_feature: MA Experiment 20000234 PARAMETER Experiment Name: At_Siliques_P Parameter: Tissue Value: Less Than 5mm Siliques vs. Whole Plant
  misc_feature: MA Experiment ID: 20000264 Result: Up-regulated in Transcription
  misc_feature: MA Experiment 20000264 PARAMETER Experiment Name: At_Open_Flower_P Parameter: Age (day) Value: 21
  misc_feature: MA Experiment 20000264 PARAMETER Experiment Name: At_Open_Flower_P Parameter: Plant Line Value: WS
  misc_feature: MA Experiment 20000264 PARAMETER Experiment Name: At_Open_Flower_P Parameter: Tissue Value: Open Flower vs. Whole Plant
  misc_feature: MA Experiment ID: 20000265 Result: Up-regulated in Transcription
  misc_feature: MA Experiment 20000265 PARAMETER Experiment Name: At_Open_Flower_P Parameter: Age (day) Value: 21
  misc_feature: MA Experiment 20000265 PARAMETER Experiment Name: At_Open_Flower_P Parameter: Plant Line Value: WS
  misc_feature: MA Experiment 20000265 PARAMETER Experiment Name: At_Open_Flower_P Parameter: Tissue Value: Closed Flower vs. Whole Plant
  misc_feature: MA Experiment ID: 20000286 Result: Up-regulated in Transcription
  misc_feature: MA Experiment 20000286 PARAMETER Experiment Name: At_Open_Flower_P Parameter: Age (day) Value: 21
  misc_feature: MA Experiment 20000286 PARAMETER Experiment Name: At_Open_Flower_P Parameter: Plant Line Value: WS
  misc_feature: MA Experiment 20000286 PARAMETER Experiment Name: At_Open_Flower_P Parameter: Tissue Value: Half Open vs. Whole Plant
  misc_feature: MA Experiment ID: 20000436 Result: Down-regulated in Transcription
  misc_feature: MA Experiment 20000436 PARAMETER Experiment Name: At_Drought_P Parameter: Age (day) Value: 7
  misc_feature: MA Experiment 20000436 PARAMETER Experiment Name: At_Drought_P Parameter: Organism Value: A. thaliana
  misc_feature: MA Experiment 20000436 PARAMETER Experiment Name: At_Drought_P Parameter: Plant Line Value: WS
  misc_feature: MA Experiment 20000436 PARAMETER Experiment Name: At_Drought_P Parameter: Timepoint (hr) Value: 12
  misc_feature: MA Experiment 20000436 PARAMETER Experiment Name: At_Drought_P Parameter: Tissue Value: Whole Plant
  misc_feature: MA Experiment 20000436 PARAMETER Experiment Name: At_Drought_P Parameter: Treatment Value: Drought vs. No Drought
  misc_feature: MA Experiment ID: 20000437 Result: Down-regulated in Transcription
  misc_feature: MA Experiment 20000437 PARAMETER Experiment Name: At_Drought_P Parameter: Age (day) Value: 8
  misc_feature: MA Experiment 20000437 PARAMETER Experiment Name: At_Drought_P Parameter: Organism Value: A. thaliana
  misc_feature: MA Experiment 20000437 PARAMETER Experiment Name: At_Drought_P Parameter: Plant Line Value: WS
  misc_feature: MA Experiment 20000437 PARAMETER Experiment Name: At_Drought_P Parameter: Timepoint (hr) Value: 24
  misc_feature: MA Experiment 20000437 PARAMETER Experiment Name: At_Drought_P Parameter: Tissue Value: Whole Plant
  misc_feature: MA Experiment 20000437 PARAMETER Experiment Name: At_Drought_P Parameter: Treatment Value: Drought vs. No Drought
  misc_feature: MA Experiment ID: 20000438 Result: Up-regulated in Transcription
  misc_feature: MA Experiment 20000438 PARAMETER Experiment Name: At_Shoots__P Parameter: Age (day) Value: 14
  misc_feature: MA Experiment 20000438 PARAMETER Experiment Name: At_Shoots__P Parameter: Tissue Value: Shoots vs. Whole Plant
  misc_feature: MA Experiment ID: 20000495 Result: Up-regulated in Transcription
  misc_feature: MA Experiment 20000495 PARAMETER Experiment Name: At_Guard_Cells_P Parameter: Harvest Date Value: 8/2/2002
  misc_feature: MA Experiment 20000495 PARAMETER Experiment Name: At_Guard_Cells_P Parameter: Organism Value: A. thaliana
  misc_feature: MA Experiment 20000495 PARAMETER Experiment Name: At_Guard_Cells_P Parameter: Tissue Value: Guard Cells vs. Leaves
  misc_feature: MA Experiment ID: 20001451 Result: Down-regulated in Transcription
  misc_feature: MA Experiment 20001451 PARAMETER Experiment Name: At_Far-red-induction_P Parameter: Age (day) Value: 7
  misc_feature: MA Experiment 20001451 PARAMETER Experiment Name: At_Far-red-induction_P Parameter: Light Value: Far-red vs. White
  misc_feature: MA Experiment 20001451 PARAMETER Experiment Name: At_Far-red-induction_P Parameter: Organism Value: A. thaliana
  misc_feature: MA Experiment 20001451 PARAMETER Experiment Name: At_Far-red-induction_P Parameter: Plant Line Value: Columbia
  misc_feature: MA Experiment 20001451 PARAMETER Experiment Name: At_Far-red-induction_P Parameter: Timepoint (hr) Value: 24
  misc_feature: MA Experiment 20001451 PARAMETER Experiment Name: At_Far-red-induction_P Parameter: Tissue Value: Whole Plant
  misc_feature: MA Experiment ID: 20001557 Result: Up-regulated in Transcription
  misc_feature: MA Experiment 20001557 PARAMETER Experiment Name: At_Drought_Soil_Dry_P Parameter: Age (day) Value: 27
  misc_feature: MA Experiment 20001557 PARAMETER Experiment Name: At_Drought_Soil_Dry_P Parameter: Organism Value: A. thaliana
  misc_feature: MA Experiment 20001557 PARAMETER Experiment Name: At_Drought_Soil_Dry_P Parameter: Plant Line Value: WS
  misc_feature: MA Experiment 20001557 PARAMETER Experiment Name: At_Drought_Soil_Dry_P Parameter: Post Timepoint (hr) Value: 3
  misc_feature: MA Experiment 20001557 PARAMETER Experiment Name: At_Drought_Soil_Dry_P Parameter: Post-Treatment Value: Re-Water vs. No Drought
  misc_feature: MA Experiment 20001557 PARAMETER Experiment Name: At_Drought_Soil_Dry_P Parameter: Timepoint (day) Value: 13
  misc_feature: MA Experiment 20001557 PARAMETER Experiment Name: At_Drought_Soil_Dry_P Parameter: Treatment Value: Drought vs. No Drought
  misc_feature: MA Experiment ID: 20001558 Result: Up-regulated in Transcription
  misc_feature: MA Experiment 20001558 PARAMETER Experiment Name: At_Drought_Soil_Dry_P Parameter: Age (day) Value: 27
  misc_feature: MA Experiment 20001558 PARAMETER Experiment Name: At_Drought_Soil_Dry_P Parameter: Organism Value: A. thaliana
  misc_feature: MA Experiment 20001558 PARAMETER Experiment Name: At_Drought_Soil_Dry_P Parameter: Plant Line Value: WS
  misc_feature: MA Experiment 20001558 PARAMETER Experiment Name: At_Drought_Soil_Dry_P Parameter: Post Timepoint (hr) Value: 6
  misc_feature: MA Experiment 20001558 PARAMETER Experiment Name: At_Drought_Soil_Dry_P Parameter: Post-Treatment Value: Re-Water vs. No Drought
  misc_feature: MA Experiment 20001558 PARAMETER Experiment Name: At_Drought_Soil_Dry_P Parameter: Timepoint (day) Value: 13
  misc_feature: MA Experiment 20001558 PARAMETER Experiment Name: At_Drought_Soil_Dry_P Parameter: Treatment Value: Drought vs. No Drought
atttttgtcactgggagggaagggagagagtgaaaaattgaaaatatctagtttttttttctctctcttgcttttaggctttaggctttcactactaatactctcttagtttaagacattgccttcacatccaaacacaaatgcaaatctttgtctcctctcttccttcaaagtctttcattacaaaaccctaatatctctaatcttctctctgtctctcttaagggcaatatcttcaatagagttctgaactttggaagcatattaagatatcaaagtaattttctacttttagttgtgaagctagtctctcctctgtccccaaaccaagaaacaatttgcaaagagaaagcaaaaggtttttgaagaagacccaattaaaaaagatggaaattgcaagtcaagaagatcatgatatgcccatcccattaaacactacatttggtggtggtggtagtcatggtcacatgatccatcatcatgatcatcatgctgctaattctgctcctccaactcacaacaacaacaatactactcaaccacctccaatgccgttacatggtaatggtcatggcaacaattatgatcatcatcatcatcaagatcctcatcatgttggttacaacgctatcatcaagaagcctatgataaagtacaaggagtgtctcaagaaccatgcagcagctatgggaggcaatgctactgatgggtgtggagagtttatgccaagtggtgaagatggctccattgaggctctcacttgctcagcttgcaattgccacaggaacttccatagaaaagaagtggaaggcgaactcgcagccaccgccatgtccccttaccaccaacaccctccacaccgaaaactcatgctcaaccaccaaaagatcagatcagctatgccacaccaaatgatcatgcccattggagtctctaactaccggtacatgcataacaactccgagtccgaggactttatggaggaagatggcgtaaccaccgcatctagatcgctaccaaacctgccatacaaccagaagaagaggttcaggacaaagttcacgccggaacagaaggagaagatgcttagttttgctgagaaagttgggtggaaaatacaaaggcaagaagattgtgttgttcaaaggttttgtgaagagattggagtgaagagaagagtgcttaaggtttggatgcacaacaacaagatccatttctccaagaagaacaacattaacctcgaagacaacgacaacgaaaagatcaacaatctcaacaatgttgatctgtccggtaataacgacatgactaagatcgtcccatgatataattaataacgttatttttatatgatctttgataattatttagttatctttatgttagctactagggttttaattttatcttctagctggtttggttttattttatatatataagctcatttcgctatctctcgttaaacccatggattttatataattttctgctctttgttgtgttttatttatttggaagttatatatattaatcttgttgtaataaatgtatgaccagccgtatttttcttcttc

SEQ ID NO: 43570 - protein, 312 aa, Arabidopsis thaliana
  peptide (1)..(312): Ceres Seq. ID no. 12331010
  misc_feature (85)..(144): Pfam Name: ZF-HD protein dimerisation region Pfam Description: ZF-HD protein dimerisation region
  misc_feature (88)..(274): Homolog of NCBI NO: 5091602 NR Description: 10A19I.6 [Oryza sativa]
  misc_feature (40)..(290): Homolog of NCBI NO: 15228530 NR Description: unknown protein
  misc_feature (89)..(274): Homolog of NCBI NO: 15238445 NR Description: hypothetical protein common family; protein id:
  misc_feature (65)..(280): Homolog of NCBI NO: 13277218 NR Description: ZF-HD homeobox protein [Flaveria bidentis]
  misc_feature (88)..(159): Homolog of NCBI NO: 15233925 NR Description: putative protein
  misc_feature (169)..(280): Homolog of NCBI NO: 15233925 NR Description: putative protein
  misc_feature (89)..(280): Homolog of NCBI NO: 13374061 NR Description: ZF-HD homeobox protein [Flaveria bidentis]
  misc_feature (1)..(309): Homolog of NCBI NO: 20148768 NR Description: hypothetical protein At2g02540/T822.16
  misc_feature (1)..(309): Homolog of NCBI NO: 15226993 NR Description: hypothetical protein
  misc_feature (1)..(312): Homolog of NCBI NO: 15223757 NR Description: hypothetical protein
MEIASQEDHDMPIPLNTTFGGGGSHGHMIHHHDHHAANSAPPTHNNNNTTQPPPMPLHGNGHGNNYDHHHHQDPHHVGYNAIIKKPMIKYKECLKNHAAAMGGNATDGCGEFMPSGEDGSIEALTCSACNCHRNFHRKEVEGELAATAMSPYHQHPPHRKLMLNHQKIRSAMPHQMIMPIGVSNYRYMHNNSESEDFMEEDGVTTASRSLPNLPYNQKKRFRTKFTPEQKEKMLSFAEKVGWKIQRQEDCVVQRFCEEIGVKRRVLKVWMHNNKIHFSKKNNINLEDNDNEKINNLNNVDLSGNNDMTKIVP

SEQ ID NO: 43571 - protein, 302 aa, Arabidopsis thaliana
  peptide (1)..(302): Ceres Seq. ID no. 12331011
  misc_feature (75)..(134): Pfam Name: ZF-HD protein dimerisation region Pfam Description: ZF-HD protein dimerisation region
  misc_feature (78)..(264): Homolog of NCBI NO: 5091602 NR Description: 10A19I.6 [Oryza sativa]
  misc_feature (30)..(280): Homolog of NCBI NO: 15228530 NR Description: unknown protein
  misc_feature (79)..(264): Homolog of NCBI NO: 15238445 NR Description: hypothetical protein common family; protein id:
  misc_feature (55)..(270): Homolog of NCBI NO: 13277218 NR Description: ZF-HD homeobox protein [Flaveria bidentis]
  misc_feature (78)..(149): Homolog of NCBI NO: 15233925 NR Description: putative protein
  misc_feature (159)..(270): Homolog of NCBI NO: 15233925 NR Description: putative protein
  misc_feature (79)..(270): Homolog of NCBI NO: 13374061 NR Description: ZF-HD homeobox protein [Flaveria bidentis]
  misc_feature (1)..(299): Homolog of NCBI NO: 20148768 NR Description: hypothetical protein At2g02540/T822.16
  misc_feature (1)..(299): Homolog of NCBI NO: 15226993 NR Description: hypothetical protein
  misc_feature (1)..(302): Homolog of NCBI NO: 15223757 NR Description: hypothetical protein
MPIPLNTTFGGGGSHGHMIHHHDHHAANSAPPTHNNNNTTQPPPMPLHGNGHGNNYDHHHHQDPHHVGYNAIIKKPMIKYKECLKNHAAAMGGNATDGCGEFMPSGEDGSIEALTCSACNCHRNFHRKEVEGELAATAMSPYHQHPPHRKLMLNHQKIRSAMPHQMIMPIGVSNYRYMHNNSESEDFMEEDGVTTASRSLPNLPYNQKKRFRTKFTPEQKEKMLSFAEKVGWKIQRQEDCVVQRFCEEIGVKRRVLKVWMHNNKIHFSKKNNINLEDNDNEKINNLNNVDLSGNNDMTKIVP

SEQ ID NO: 43572 - protein, 285 aa, Arabidopsis thaliana
  peptide (1)..(285): Ceres Seq. ID no. 12331012
  misc_feature (58)..(117): Pfam Name: ZF-HD protein dimerisation region Pfam Description: ZF-HD protein dimerisation region
  misc_feature (61)..(247): Homolog of NCBI NO: 5091602 NR Description: 10A19I.6 [Oryza sativa]
  misc_feature (13)..(263): Homolog of NCBI NO: 15228530 NR Description: unknown protein
  misc_feature (62)..(247): Homolog of NCBI NO: 15238445 NR Description: hypothetical protein common family; protein id:
  misc_feature (38)..(253): Homolog of NCBI NO: 13277218 NR Description: ZF-HD homeobox protein [Flaveria bidentis]
  misc_feature (61)..(132): Homolog of NCBI NO: 15233925 NR Description: putative protein
  misc_feature (142)..(253): Homolog of NCBI NO: 15233925 NR Description: putative protein
  misc_feature (62)..(253): Homolog of NCBI NO: 13374061 NR Description: ZF-HD homeobox protein [Flaveria bidentis]
  misc_feature (1)..(282): Homolog of NCBI NO: 20148768 NR Description: hypothetical protein At2g02540/T822.16
  misc_feature (1)..(282): Homolog of NCBI NO: 15226993 NR Description: hypothetical protein
  misc_feature (1)..(285): Homolog of NCBI NO: 15223757 NR Description: hypothetical protein
MIHHHDHHAANSAPPTHNNNNTTQPPPMPLHGNGHGNNYDHHHHQDPHHVGYNAIIKKPMIKYKECLKNHAAAMGGNATDGCGEFMPSGEDGSIEALTCSACNCHRNFHRKEVEGELAATAMSPYHQHPPHRKLMLNHQKIRSAMPHQMIMPIGVSNYRYMHNNSESEDFMEEDGVTTASRSLPNLPYNQKKRFRTKFTPEQKEKMLSFAEKVGWKIQRQEDCVVQRFCEEIGVKRRVLKVWMHNNKIHFSKKNNINLEDNDNEKINNLNNVDLSGNNDMTKIVP

SEQ ID NO: 43573 - DNA, 617 bp, Arabidopsis thaliana
  misc_feature (1)..(617): Ceres Seq. ID no. 13576587
  misc_feature: MA Experiment ID: 20000171 Result: Up-regulated in Transcription
  misc_feature: MA Experiment 20000171 PARAMETER Experiment Name: At_42deg_Heat_P Parameter: Age (day) Value: 14
  misc_feature: MA Experiment 20000171 PARAMETER Experiment Name: At_42deg_Heat_P Parameter: Organism Value: A. thaliana
  misc_feature: MA Experiment 20000171 PARAMETER Experiment Name: At_42deg_Heat_P Parameter: Plant Line Value: WS
  misc_feature: MA Experiment 20000171 PARAMETER Experiment Name: At_42deg_Heat_P Parameter: Temperature (deg C) Value: 42 vs. 22
  misc_feature: MA Experiment 20000171 PARAMETER Experiment Name: At_42deg_Heat_P Parameter: Timepoint (hr) Value: 1
  misc_feature: MA Experiment 20000171 PARAMETER Experiment Name: At_42deg_Heat_P Parameter: Tissue Value: Aerial
  misc_feature: MA Experiment ID: 20000173 Result: Up-regulated in Transcription
  misc_feature: MA Experiment 20000173 PARAMETER Experiment Name: At_42deg_Heat_P Parameter: Age (day) Value: 14
  misc_feature: MA Experiment 20000173 PARAMETER Experiment Name: At_42deg_Heat_P Parameter: Organism Value: A. thaliana
  misc_feature: MA Experiment 20000173 PARAMETER Experiment Name: At_42deg_Heat_P Parameter: Plant Line Value: WS
  misc_feature: MA Experiment 20000173 PARAMETER Experiment Name: At_42deg_Heat_P Parameter: Temperature (deg C) Value: 42 vs. 22
  misc_feature: MA Experiment 20000173 PARAMETER Experiment Name: At_42deg_Heat_P Parameter: Timepoint (hr) Value: 6
  misc_feature: MA Experiment 20000173 PARAMETER Experiment Name: At_42deg_Heat_P Parameter: Tissue Value: Aerial
acataccacaaacacatcacacttatagcaaaaataattaatctctctcccatatcacaaaggagaaaaacaatatgacaacatatggcaccaatcagaagtcgtctaacgacttagcccccaagctggagtacatcacccgtggcatcaaccaacacaaaagatccggcctcgccacgcgccgcccttggaagcaaatgctagacctcggttccttcaacttcccccgcaaactagccaccgtgatcactagaatcagagccaacacggtctatttccagaccaattacaccattgtcgtcctcttctccgtatttctcagcctgatttggaatcccttctccctcttagttctactcgccctactcggtgcatggctcttcctctacttcctccgtgatgaaccgctcactgtttttgaccgcgagattgaccaccgtatcgtacttataatcatgtctgttatcactctttccatcctttttttaactgatgcgaagctcaatatcgcggtggccatcgtggcaggtgccttggctgtgttgtctcatgcagctgttaggaaaactgaagatcttttccaaaccgacgaagaaaccagtcttttaaatccgtaa

SEQ ID NO: 43574 - protein, 180 aa, Arabidopsis thaliana
  peptide (1)..(180): Ceres Seq. ID no. 13576588
  misc_feature (32)..(179): Homolog of NCBI NO: 7487097 NR Description: hypothetical protein T16L4.170 - Arabidopsis
  misc_feature (6)..(174): Homolog of NCBI NO: 15226664 NR Description: expressed protein [Arabidopsis thaliana]
  misc_feature (27)..(176): Homolog of NCBI NO: 21594668 NR Description: unknown [Arabidopsis thaliana]
  misc_feature (27)..(176): Homolog of NCBI NO: 18390939 NR Description: expressed protein [Arabidopsis thaliana]
  misc_feature (15)..(174): Homolog of NCBI NO: 34903576 NR Description: P0419B01.1 [Oryza sativa (japonica
  misc_feature (10)..(176): Homolog of NCBI NO: 15231332 NR Description: expressed protein [Arabidopsis thaliana]
  misc_feature (1)..(176): Homolog of NCBI NO: 18405248 NR Description: expressed protein [Arabidopsis thaliana]
  misc_feature (1)..(176): Homolog of NCBI NO: 18400140 NR Description: expressed protein [Arabidopsis thaliana]
  misc_feature (1)..(176): Homolog of NCBI NO: 21617895 NR Description: unknown [Arabidopsis thaliana]
  misc_feature (1)..(180): Homolog of NCBI NO: 15220814 NR Description: expressed protein [Arabidopsis thaliana]
MTTYGTNQKSSNDLAPKLEYITRGINQHKRSGLATRRPWKQMLDLGSFNFPRKLATVITRIRANTVYFQTNYTIVVLFSVFLSLIWNPFSLLVLLALLGAWLFLYFLRDEPLTVFDREIDHRIVLIIMSVITLSILFLTDAKLNIAVAIVAGALAVLSHAAVRKTEDLFQTDEETSLLNP

SEQ ID NO: 43575 - protein, 139 aa, Arabidopsis thaliana
  peptide (1)..(139): Ceres Seq. ID no. 13576589
  misc_feature (1)..(138): Homolog of NCBI NO: 7487097 NR Description: hypothetical protein T16L4.170 - Arabidopsis
  misc_feature (1)..(133): Homolog of NCBI NO: 15226664 NR Description: expressed protein [Arabidopsis thaliana]
  misc_feature (1)..(135): Homolog of NCBI NO: 21594668 NR Description: unknown [Arabidopsis thaliana]
  misc_feature (1)..(135): Homolog of NCBI NO: 18390939 NR Description: expressed protein [Arabidopsis thaliana]
  misc_feature (1)..(133): Homolog of NCBI NO: 34903576 NR Description: P0419B01.1 [Oryza sativa (japonica
  misc_feature (1)..(135): Homolog of NCBI NO: 15231332 NR Description: expressed protein [Arabidopsis thaliana]
  misc_feature (1)..(135): Homolog of NCBI NO: 18405248 NR Description: expressed protein [Arabidopsis thaliana]
  misc_feature (1)..(135): Homolog of NCBI NO: 18400140 NR Description: expressed protein [Arabidopsis thaliana]
  misc_feature (1)..(135): Homolog of NCBI NO: 21617895 NR Description: unknown [Arabidopsis thaliana]
  misc_feature (1)..(139): Homolog of NCBI NO: 15220814 NR Description: expressed protein [Arabidopsis thaliana]
MLDLGSFNFPRKLATVITRIRANTVYFQTNYTIVVLFSVFLSLIWNPFSLLVLLALLGAWLFLYFLRDEPLTVFDREIDHRIVLIIMSVITLSILFLTDAKLNIAVAIVAGALAVLSHAAVRKTEDLFQTDEETSLLNP

SEQ ID NO: 43576 - DNA, 1763 bp, Arabidopsis thaliana
  misc_feature (1)..(1763): Ceres Seq. ID no. 13491005
  misc_feature: MA Experiment ID: 108434 Result: Down-regulated in Transcription
  misc_feature: MA Experiment 108434 PARAMETER Experiment Name: At_Root_Tips_cDNA_P Parameter: Tissue Value: Root Tips
  misc_feature: MA Experiment ID: 108461 Result: Up-regulated in Transcription
  misc_feature: MA Experiment 108461 PARAMETER Experiment Name: At_Germinating_Seeds_cDNA_P Parameter: Age (day) Value: 1 vs. 0
  misc_feature: MA Experiment 108461 PARAMETER Experiment Name: At_Germinating_Seeds_cDNA_P Parameter: Tissue Value: Germinating Seeds
  misc_feature: MA Experiment ID: 108462 Result: Up-regulated in Transcription
  misc_feature: MA Experiment 108462 PARAMETER Experiment Name: At_Germinating_Seeds_cDNA_P Parameter: Age (day) Value: 2 vs. 0
  misc_feature: MA Experiment 108462 PARAMETER Experiment Name: At_Germinating_Seeds_cDNA_P Parameter: Tissue Value: Germinating Seeds
  misc_feature: MA Experiment ID: 108463 Result: Up-regulated in Transcription
  misc_feature: MA Experiment 108463 PARAMETER Experiment Name: At_Germinating_Seeds_cDNA_P Parameter: Age (day) Value: 3 vs. 0
  misc_feature: MA Experiment 108463 PARAMETER Experiment Name: At_Germinating_Seeds_cDNA_P Parameter: Tissue Value: Germinating Seeds
  misc_feature: MA Experiment ID: 108464 Result: Up-regulated in Transcription
  misc_feature: MA Experiment 108464 PARAMETER Experiment Name: At_Germinating_Seeds_cDNA_P Parameter: Age (day) Value: 4 vs. 0
  misc_feature: MA Experiment 108464 PARAMETER Experiment Name: At_Germinating_Seeds_cDNA_P Parameter: Tissue Value: Germinating Seeds
  misc_feature: MA Experiment ID: 108469 Result: Up-regulated in Transcription
  misc_feature: MA Experiment ID: 108473 Result: Up-regulated in Transcription
  misc_feature: MA Experiment 108473 PARAMETER Experiment Name: At_Drought_Flowers_cDNA_P Parameter: Timepoint (hr) Value: 7 d
  misc_feature: MA Experiment 108473 PARAMETER Experiment Name: At_Drought_Flowers_cDNA_P Parameter: Tissue Value: Flower
  misc_feature: MA Experiment 108473 PARAMETER Experiment Name: At_Drought_Flowers_cDNA_P Parameter: Treatment Value: Drought vs. No Drought
  misc_feature: MA Experiment ID: 108488 Result: Down-regulated in Transcription
  misc_feature: MA Experiment ID: 108561 Result: Up-regulated in Transcription
  misc_feature: MA Experiment 108561 PARAMETER Experiment Name: At_100uM_ABA_cDNA_P Parameter: Timepoint (hr) Value: 6
  misc_feature: MA Experiment 108561 PARAMETER Experiment Name: At_100uM_ABA_cDNA_P Parameter: Tissue Value: Aerial
  misc_feature: MA Experiment 108561 PARAMETER Experiment Name: At_100uM_ABA_cDNA_P Parameter: Treatment Value: 100uM ABA vs. No Treatment
  misc_feature: MA Experiment ID: 108569 Result: Up-regulated in Transcription
  misc_feature: MA Experiment 108569 PARAMETER Experiment Name: At_0.001%_MeJA__cDNA_P Parameter: Timepoint (hr) Value: 6
  misc_feature: MA Experiment 108569 PARAMETER Experiment Name: At_0.001%_MeJA__cDNA_P Parameter: Tissue Value: Aerial
  misc_feature: MA Experiment 108569 PARAMETER Experiment Name: At_0.001%_MeJA__cDNA_P Parameter: Treatment Value: 0.001% MeJA vs. No Treatment
  misc_feature: MA Experiment ID: 108573 Result: Up-regulated in Transcription
  misc_feature: MA Experiment 108573 PARAMETER Experiment Name: At_Drought_cDNA_P Parameter: Timepoint (hr) Value: 6
  misc_feature: MA Experiment 108573 PARAMETER Experiment Name: At_Drought_cDNA_P Parameter: Tissue Value: Aerial
  misc_feature: MA Experiment 108573 PARAMETER Experiment Name: At_Drought_cDNA_P Parameter: Treatment Value: Drought vs. No Drought
  misc_feature: MA Experiment ID: 108585 Result: Up-regulated in Transcription
  misc_feature: MA Experiment 108585 PARAMETER Experiment Name: At_5mM_NaNP_cDNA_P Parameter: Timepoint (hr) Value: 6
  misc_feature: MA Experiment 108585 PARAMETER Experiment Name: At_5mM_NaNP_cDNA_P Parameter: Tissue Value: Aerial
  misc_feature: MA Experiment 108585 PARAMETER Experiment Name: At_5mM_NaNP_cDNA_P Parameter: Treatment Value: null
  misc_feature: MA Experiment ID: 108605 Result: Up-regulated in Transcription
  misc_feature: MA Experiment 108605 PARAMETER Experiment Name: At_100uM_ABA_cDNA_P Parameter: Timepoint (hr) Value: 6
  misc_feature: MA Experiment 108605 PARAMETER Experiment Name: At_100uM_ABA_cDNA_P Parameter: Tissue Value: Aerial
  misc_feature: MA Experiment 108605 PARAMETER Experiment Name: At_100uM_ABA_cDNA_P Parameter: Treatment Value: 100uM ABA vs. No Treatment
  misc_feature: MA Experiment ID: 108607 Result: Up-regulated in Transcription
  misc_feature: MA Experiment 108607 PARAMETER Experiment Name: At_100uM_ABA_cDNA_P Parameter: Timepoint (hr) Value: 4
  misc_feature: MA Experiment 108607 PARAMETER Experiment Name: At_100uM_ABA_cDNA_P Parameter: Tissue Value: Aerial
  misc_feature: MA Experiment 108607 PARAMETER Experiment Name: At_100uM_ABA_cDNA_P Parameter: Treatment Value: 100uM ABA vs. No Treatment
  misc_feature: MA Experiment ID: 108609 Result: Up-regulated in Transcription
  misc_feature: MA Experiment 108609 PARAMETER Experiment Name: At_100uM_ABA_cDNA_P Parameter: Timepoint (hr) Value: 24
  misc_feature: MA Experiment 108609 PARAMETER Experiment Name: At_100uM_ABA_cDNA_P Parameter: Tissue Value: Aerial
  misc_feature: MA Experiment 108609 PARAMETER Experiment Name: At_100uM_ABA_cDNA_P Parameter: Treatment Value: 100uM ABA vs. No Treatment
  misc_feature: MA Experiment ID: 108668 Result: Up-regulated in Transcription
  misc_feature: MA Experiment 108668 PARAMETER Experiment Name: At_2mM_SA_cDNA_P Parameter: Plant Line Value: WS
  misc_feature: MA Experiment 108668 PARAMETER Experiment Name: At_2mM_SA_cDNA_P Parameter: Timepoint (hr) Value: 6
  misc_feature: MA Experiment 108668 PARAMETER Experiment Name: At_2mM_SA_cDNA_P Parameter: Treatment Value: 2mM SA vs. No Treatment
  misc_feature: MA Experiment ID: 20000070 Result: Up-regulated in Transcription
  misc_feature: MA Experiment 20000070 PARAMETER Experiment Name: At_100uM_ABA_Mutants_cDNA_P Parameter: Plant Line Value: CS24
  misc_feature: MA Experiment 20000070 PARAMETER Experiment Name: At_100uM_ABA_Mutants_cDNA_P Parameter: Timepoint (hr) Value: 6
  misc_feature: MA Experiment 20000070 PARAMETER Experiment Name: At_100uM_ABA_Mutants_cDNA_P Parameter: Tissue Value: Aerial
  misc_feature: MA Experiment 20000070 PARAMETER Experiment Name: At_100uM_ABA_Mutants_cDNA_P Parameter: Treatment Value: 100uM ABA vs. No Treatment
  misc_feature: MA Experiment ID: 20000071 Result: Up-regulated in Transcription
  misc_feature: MA Experiment 20000071 PARAMETER Experiment Name: At_100uM_ABA_Mutants_cDNA_P Parameter: Plant Line Value: CS8104
  misc_feature: MA Experiment 20000071 PARAMETER Experiment Name: At_100uM_ABA_Mutants_cDNA_P Parameter: Timepoint (hr) Value: 6
  misc_feature: MA Experiment 20000071 PARAMETER Experiment Name: At_100uM_ABA_Mutants_cDNA_P Parameter: Tissue Value: Aerial
  misc_feature: MA Experiment 20000071 PARAMETER Experiment Name: At_100uM_ABA_Mutants_cDNA_P Parameter: Treatment Value: 100uM ABA vs. No Treatment
  misc_feature: MA Experiment ID: 20000072 Result: Up-regulated in Transcription
  misc_feature: MA Experiment 20000072 PARAMETER Experiment Name: At_100uM_ABA_Mutants_cDNA_P Parameter: Plant Line Value: CS8105
  misc_feature: MA Experiment 20000072 PARAMETER Experiment Name: At_100uM_ABA_Mutants_cDNA_P Parameter: Timepoint (hr) Value: 6
  misc_feature: MA Experiment 20000072 PARAMETER Experiment Name: At_100uM_ABA_Mutants_cDNA_P Parameter: Tissue Value: Aerial
  misc_feature: MA Experiment 20000072 PARAMETER Experiment Name: At_100uM_ABA_Mutants_cDNA_P Parameter: Treatment Value: 100uM ABA vs. No Treatment
  misc_feature: MA Experiment ID: 20000086 Result: Up-regulated in Transcription
  misc_feature: MA Experiment 20000086 PARAMETER Experiment Name: At_100uM_ABA_Mutants_cDNA_P Parameter: Plant Line Value: CS22
  misc_feature: MA Experiment 20000086 PARAMETER Experiment Name: At_100uM_ABA_Mutants_cDNA_P Parameter: Timepoint (hr) Value: 6
  misc_feature: MA Experiment 20000086 PARAMETER Experiment Name: At_100uM_ABA_Mutants_cDNA_P Parameter: Tissue Value: Aerial
  misc_feature: MA Experiment 20000086 PARAMETER Experiment Name: At_100uM_ABA_Mutants_cDNA_P Parameter: Treatment Value: 100uM ABA vs. No Treatment
  misc_feature: MA Experiment ID: 20000087 Result: Up-regulated in Transcription
  misc_feature: MA Experiment 20000087 PARAMETER Experiment Name: At_100uM_ABA_Mutants_cDNA_P Parameter: Plant Line Value: WS
  misc_feature: MA Experiment 20000087 PARAMETER Experiment Name: At_100uM_ABA_Mutants_cDNA_P Parameter: Timepoint (hr) Value: 6
  misc_feature: MA Experiment 20000087 PARAMETER Experiment Name: At_100uM_ABA_Mutants_cDNA_P Parameter: Tissue Value: Aerial
  misc_feature: MA Experiment 20000087 PARAMETER Experiment Name: At_100uM_ABA_Mutants_cDNA_P Parameter: Treatment Value: 100uM ABA vs. No Treatment
  misc_feature: MA Experiment ID: 20000088 Result: Up-regulated in Transcription
  misc_feature: MA Experiment 20000088 PARAMETER Experiment Name: At_100uM_ABA_Mutants_cDNA_P Parameter: Plant Line Value: Landsberg
  misc_feature: MA Experiment 20000088 PARAMETER Experiment Name: At_100uM_ABA_Mutants_cDNA_P Parameter: Timepoint (hr) Value: 6
  misc_feature: MA Experiment 20000088 PARAMETER Experiment Name: At_100uM_ABA_Mutants_cDNA_P Parameter: Tissue Value: Aerial
  misc_feature: MA Experiment 20000088 PARAMETER Experiment Name: At_100uM_ABA_Mutants_cDNA_P Parameter: Treatment Value: 100uM ABA vs. No Treatment
  misc_feature: MA Experiment ID: 20000090 Result: Up-regulated in Transcription
  misc_feature: MA Experiment ID: 20000117 Result: Up-regulated in Transcription
  misc_feature: MA Experiment 20000117 PARAMETER Experiment Name: At_100uM_ABA_Mutants_cDNA_P Parameter: Plant Line Value: Columbia
  misc_feature: MA Experiment 20000117 PARAMETER Experiment Name: At_100uM_ABA_Mutants_cDNA_P Parameter: Timepoint (hr) Value: 6
  misc_feature: MA Experiment 20000117 PARAMETER Experiment Name: At_100uM_ABA_Mutants_cDNA_P Parameter: Tissue Value: Aerial
  misc_feature: MA Experiment 20000117 PARAMETER Experiment Name: At_100uM_ABA_Mutants_cDNA_P Parameter: Treatment Value: 100uM ABA vs. No Treatment
  misc_feature: MA Experiment ID: 20000169 Result: Up-regulated in Transcription
  misc_feature: MA Experiment 20000169 PARAMETER Experiment Name: At_100uM_ABA_P Parameter: Age (day) Value: 14
  misc_feature: MA Experiment 20000169 PARAMETER Experiment Name: At_100uM_ABA_P Parameter: Organism Value: A. thaliana
  misc_feature: MA Experiment 20000169 PARAMETER Experiment Name: At_100uM_ABA_P Parameter: Plant Line Value: WS
  misc_feature: MA Experiment 20000169 PARAMETER Experiment Name: At_100uM_ABA_P Parameter: Timepoint (hr) Value: 6
  misc_feature: MA Experiment 20000169 PARAMETER Experiment Name: At_100uM_ABA_P Parameter: Tissue Value: Aerial
  misc_feature: MA Experiment 20000169 PARAMETER Experiment Name: At_100uM_ABA_P Parameter: Treatment Value: 100uM ABA vs. No Treatment
  misc_feature: MA Experiment ID: 20000182 Result: Up-regulated in Transcription
  misc_feature: MA Experiment 20000182 PARAMETER Experiment Name: At_2mM_SA_P Parameter: Age (day) Value: 14
  misc_feature: MA Experiment 20000182 PARAMETER Experiment Name: At_2mM_SA_P Parameter: Organism Value: A. thaliana
  misc_feature: MA Experiment 20000182 PARAMETER Experiment Name: At_2mM_SA_P Parameter: Plant Line Value: WS
  misc_feature: MA Experiment 20000182 PARAMETER Experiment Name: At_2mM_SA_P Parameter: Timepoint (hr) Value: 6
  misc_feature: MA Experiment 20000182 PARAMETER Experiment Name: At_2mM_SA_P Parameter: Tissue Value: Aerial
  misc_feature: MA Experiment 20000182 PARAMETER Experiment Name: At_2mM_SA_P Parameter: Treatment Value: 2mM SA vs. No Treatment
  misc_feature: MA Experiment ID: 20000264 Result: Down-regulated in Transcription
  misc_feature: MA Experiment 20000264 PARAMETER Experiment Name: At_Open_Flower_P Parameter: Age (day) Value: 21
  misc_feature: MA Experiment 20000264 PARAMETER Experiment Name: At_Open_Flower_P Parameter: Plant Line Value: WS
  misc_feature: MA Experiment 20000264 PARAMETER Experiment Name: At_Open_Flower_P Parameter: Tissue Value: Open Flower vs. Whole Plant
  misc_feature: MA Experiment ID: 20000265 Result: Down-regulated in Transcription
  misc_feature: MA Experiment 20000265 PARAMETER Experiment Name: At_Open_Flower_P Parameter: Age (day) Value: 21
  misc_feature: MA Experiment 20000265 PARAMETER Experiment Name: At_Open_Flower_P Parameter: Plant Line Value: WS
  misc_feature: MA Experiment 20000265 PARAMETER Experiment Name: At_Open_Flower_P Parameter: Tissue Value: Closed Flower vs. Whole Plant
  misc_feature: MA Experiment ID: 20000267 Result: Up-regulated in Transcription
  misc_feature: MA Experiment 20000267 PARAMETER Experiment Name: At_Drought_P Parameter: Age (day) Value: 7
  misc_feature: MA Experiment 20000267 PARAMETER Experiment Name: At_Drought_P Parameter: Organism Value: A. thaliana
  misc_feature: MA Experiment 20000267 PARAMETER Experiment Name: At_Drought_P Parameter: Plant Line Value: WS
  misc_feature: MA Experiment 20000267 PARAMETER Experiment Name: At_Drought_P Parameter: Timepoint (hr) Value: 6
  misc_feature: MA Experiment 20000267 PARAMETER Experiment Name: At_Drought_P Parameter: Tissue Value: Whole Plant
  misc_feature: MA Experiment 20000267 PARAMETER Experiment Name: At_Drought_P Parameter: Treatment Value: Drought vs. No Drought
  misc_feature: MA Experiment ID: 20000268 Result: Up-regulated in Transcription
  misc_feature: MA Experiment 20000268 PARAMETER Experiment Name: At_100mM_NaCl__P Parameter: Age (day) Value: 14
  misc_feature: MA Experiment 20000268 PARAMETER Experiment Name: At_100mM_NaCl__P Parameter: Organism Value: A. thaliana
  misc_feature: MA Experiment 20000268 PARAMETER Experiment Name: At_100mM_NaCl__P Parameter: Plant Line Value: WS
  misc_feature: MA Experiment 20000268 PARAMETER Experiment Name: At_100mM_NaCl__P Parameter: Timepoint (hr) Value: 6
  misc_feature: MA Experiment 20000268 PARAMETER Experiment Name: At_100mM_NaCl__P Parameter: Tissue Value: Whole Plant
  misc_feature: MA Experiment 20000268 PARAMETER Experiment Name: At_100mM_NaCl__P Parameter: Treatment Value: 100mM NaCl vs. No Treatment
  misc_feature: MA Experiment ID: 20000286 Result: Down-regulated in Transcription
  misc_feature: MA Experiment 20000286 PARAMETER Experiment Name: At_Open_Flower_P Parameter: Age (day) Value: 21
  misc_feature: MA Experiment 20000286 PARAMETER Experiment Name: At_Open_Flower_P Parameter: Plant Line Value: WS
  misc_feature: MA Experiment 20000286 PARAMETER Experiment Name: At_Open_Flower_P Parameter: Tissue Value: Half Open vs. Whole Plant
  misc_feature: MA Experiment ID: 20000436 Result: Up-regulated in Transcription
  misc_feature: MA Experiment 20000436 PARAMETER Experiment Name: At_Drought_P Parameter: Age (day) Value: 7
  misc_feature: MA Experiment 20000436 PARAMETER Experiment Name: At_Drought_P Parameter: Organism Value: A. thaliana
  misc_feature: MA Experiment 20000436 PARAMETER Experiment Name: At_Drought_P Parameter: Plant Line Value: WS
  misc_feature: MA Experiment 20000436 PARAMETER Experiment Name: At_Drought_P Parameter: Timepoint (hr) Value: 12
  misc_feature: MA Experiment 20000436 PARAMETER Experiment Name: At_Drought_P Parameter: Tissue Value: Whole Plant
  misc_feature: MA Experiment 20000436 PARAMETER Experiment Name: At_Drought_P Parameter: Treatment Value: Drought vs. No Drought
  misc_feature: MA Experiment ID: 20000437 Result: Up-regulated in Transcription
  misc_feature: MA Experiment 20000437 PARAMETER Experiment Name: At_Drought_P Parameter: Age (day) Value: 8
  misc_feature: MA Experiment 20000437 PARAMETER Experiment Name: At_Drought_P Parameter: Organism Value: A. thaliana
  misc_feature: MA Experiment 20000437 PARAMETER Experiment Name: At_Drought_P Parameter: Plant Line Value: WS
  misc_feature: MA Experiment 20000437 PARAMETER Experiment Name: At_Drought_P Parameter: Timepoint (hr) Value: 24
  misc_feature: MA Experiment 20000437 PARAMETER Experiment Name: At_Drought_P Parameter: Tissue Value: Whole Plant
  misc_feature: MA Experiment 20000437 PARAMETER Experiment Name: At_Drought_P Parameter: Treatment Value: Drought vs. No Drought
  misc_feature: MA Experiment ID: 20000453 Result: Up-regulated in Transcription
  misc_feature: MA Experiment 20000453 PARAMETER Experiment Name: At_100uM_ABA_P Parameter: Age (day) Value: 15
  misc_feature: MA Experiment 20000453 PARAMETER Experiment Name: At_100uM_ABA_P Parameter: Organism Value: A. thaliana
  misc_feature: MA Experiment 20000453 PARAMETER Experiment Name: At_100uM_ABA_P Parameter: Plant Line Value: WS
  misc_feature: MA Experiment 20000453 PARAMETER Experiment Name: At_100uM_ABA_P Parameter: Timepoint (hr) Value: 24
  misc_feature: MA Experiment 20000453 PARAMETER Experiment Name: At_100uM_ABA_P Parameter: Tissue Value: Aerial
  misc_feature: MA Experiment 20000453 PARAMETER Experiment Name: At_100uM_ABA_P Parameter: Treatment Value: 100uM ABA vs. No Treatment
  misc_feature: MA Experiment ID: 20000527 Result: Down-regulated in Transcription
  misc_feature: MA Experiment 20000527 PARAMETER Experiment Name: At_10percent_PEG_P Parameter: Age (day) Value: 20
  misc_feature: MA Experiment 20000527 PARAMETER Experiment Name: At_10percent_PEG_P Parameter: Organism Value: A. thaliana
  misc_feature: MA Experiment 20000527 PARAMETER Experiment Name: At_10percent_PEG_P Parameter: Plant Line Value: WS
  misc_feature: MA Experiment 20000527 PARAMETER Experiment Name: At_10percent_PEG_P Parameter: Timepoint (day) Value: 20
  misc_feature: MA Experiment 20000527 PARAMETER Experiment Name: At_10percent_PEG_P Parameter: Tissue Value: Whole Plant
  misc_feature: MA Experiment 20000527 PARAMETER Experiment Name: At_10percent_PEG_P Parameter: Treatment Value: 10percent PEG vs. No Treatment
  misc_feature: MA Experiment ID: 20001904 Result: Up-regulated in Transcription
  misc_feature: MA Experiment 20001904 PARAMETER Experiment Name: At_Drought_Reproduction_P Parameter: Age (day) Value: 37
  misc_feature: MA Experiment 20001904 PARAMETER Experiment Name: At_Drought_Reproduction_P Parameter: Organism Value: A. thaliana
  misc_feature: MA Experiment 20001904 PARAMETER Experiment Name: At_Drought_Reproduction_P Parameter: Plant Line Value: WS
  misc_feature: MA Experiment 20001904 PARAMETER Experiment Name: At_Drought_Reproduction_P Parameter: Timepoint (day) Value: 7
  misc_feature: MA Experiment 20001904 PARAMETER Experiment Name: At_Drought_Reproduction_P Parameter: Tissue Value: Rosettes
  misc_feature: MA Experiment 20001904 PARAMETER Experiment Name: At_Drought_Reproduction_P Parameter: Treatment Value: Drought vs. No Drought
  misc_feature: MA Experiment ID: 20001908 Result: Up-regulated in Transcription
  misc_feature: MA Experiment 20001908 PARAMETER Experiment Name: At_Drought_Reproduction_P Parameter: Age (day) Value: 40
  misc_feature: MA Experiment 20001908 PARAMETER Experiment Name: At_Drought_Reproduction_P Parameter: Organism Value: A. thaliana
  misc_feature: MA Experiment 20001908 PARAMETER Experiment Name: At_Drought_Reproduction_P Parameter: Plant Line Value: WS
  misc_feature: MA Experiment 20001908 PARAMETER Experiment Name: At_Drought_Reproduction_P Parameter: Timepoint (day) Value: 10
  misc_feature: MA Experiment 20001908 PARAMETER Experiment Name: At_Drought_Reproduction_P Parameter: Tissue Value: Siliques
  misc_feature: MA Experiment 20001908 PARAMETER Experiment Name: At_Drought_Reproduction_P Parameter: Treatment Value: Drought vs. No Drought
  misc_feature: MA Experiment ID: 20001911 Result: Up-regulated in Transcription
  misc_feature: MA Experiment 20001911 PARAMETER Experiment Name: At_Drought_Reproduction_P Parameter: Age (day) Value: 40
  misc_feature: MA Experiment 20001911 PARAMETER Experiment Name: At_Drought_Reproduction_P Parameter: Organism Value: A. thaliana
  misc_feature: MA Experiment 20001911 PARAMETER Experiment Name: At_Drought_Reproduction_P Parameter: Plant Line Value: WS
  misc_feature: MA Experiment 20001911 PARAMETER Experiment Name: At_Drought_Reproduction_P Parameter: Timepoint (day) Value: 10
  misc_feature: MA Experiment 20001911 PARAMETER Experiment Name: At_Drought_Reproduction_P Parameter: Tissue Value: Flowers
  misc_feature: MA Experiment 20001911 PARAMETER Experiment Name: At_Drought_Reproduction_P Parameter: Treatment Value: Drought vs. No Drought
atcaagcttttgaagcttctcaacaatggcggctattccttcccacaacaaccttcttaccatcaaccacaaaaactccataaccggttcttcttccctaaataccaatttctcagaaatcaattttcccgccaaattccgagtagctacgagagctttgtccagaaccgacgagtcgtctttatccgccgtgatttctcgcctcgagcgagaaaggcgggaaagacaaggtttattaatcgaggaagcggaaggagctggagaactatggatgacggcggaagatattcgccggcgagataaaaaaaccgaagaagaaagaagactaagagacacgtggcgtaagatccaaggagaagacgattgggccgggttaatggatccaatggatccaattcttagatcggagctaatccgttacggcgaaatggctcaagcttgttacgacgctttcgatttcgatcccgcttccaaatactgcggcacctccaggttcacgcgactcgagttcttcgattctctcggaatgatcgattccggttacgaggtggcgcgttacctctacgcgacgtcgaacatcaatctcccgaacttcttctcgaaatcgcggtggtctaaagtctggagcaaaaacgctaattggatgggatacgtcgccgtttcagacgacgaaacgtctcgtaaccgactcggccgccgtgatatcgcgattgcgtggagaggaaccgttacgaaacttgaatggatcgcggatctaaaggattatttaaaaccggtaaccgaaaacaagatccgatgccccgacccggccgttaaagtcgaatccggattcttagatctctacactgacaaagacacaacctgcaaattcgcgagattctcagcgcgtgaacagattttaacggaggtgaaacggttagtggaagaacacggcgacgacgatgattccgatttaagcatcaccgtgacgggacacagtctcggcggcgcgttagcgatattaagcgcgtacgatatagcggagatgagattgaatcggagtaagaaagggaaagtgattccggtgacggtgttgacatacggaggaccgagagttgggaacgttaggtttagggagaggatggaggaattgggagtgaaagtgatgagagtagtgaatgttcacgacgtggttcccaagtcgccgggattgtttttgaacgagagtagacctcacgcgctgatgaagatagcggaggggttgccgtggtgttatagccacgtgggggaggagctggcgttggatcatcagaactcgccgtttcttaaaccttccgttgatgtttctactgctcataatcttgaagctatgcttcatttacttgacgggtatcatggaaaaggagagagatttgtgctgtcgagtgggagagaccatgcgctagtgaacaaagcgtcggactttttgaaagagcatttacaaattccaccgttttggcgtcaagacgcgaataaaggaatggttcggaacagtgaaggtcgttggattcaagccgagcgtctccgttttgaggatcatcattctcctgatatccaccaccatctctctcagctccgtcttgatcatccttgttaatcacacgcacatatatataatatacacattttccctaatttgtaaatgacgcatccatcttttgaaaataaaatgtcacaatcatctcacttgcatgctttggtcaacgtacgttccctattaataaaacttattacgtttacgaggc

SEQ ID NO: 43577 - protein, 529 aa, Arabidopsis thaliana
  peptide (1)..(529): Ceres Seq. ID no. 13491006
  misc_feature (105)..(515): Homolog of NCBI NO: 21537306 NR Description: lipase-like protein [Arabidopsis thaliana]
  misc_feature (101)..(447): Homolog of NCBI NO: 18390571 NR Description: lipase (class 3) family [Arabidopsis thaliana]
  misc_feature (88)..(448): Homolog of NCBI NO: 34907690 NR Description: putative triacylglycerol lipase
  misc_feature (46)..(514): Homolog of NCBI NO: 15220732 NR Description: lipase (class 3) family [Arabidopsis thaliana]
  misc_feature (87)..(523): Homolog of NCBI NO: 18403524 NR Description: lipase (class 3) family [Arabidopsis thaliana]
  misc_feature (1)..(448): Homolog of NCBI NO: 18390691 NR Description: lipase (class 3) family [Arabidopsis thaliana]
  misc_feature (1)..(528): Homolog of NCBI NO: 30679836 NR Description: lipase (class 3) family [Arabidopsis thaliana]
  misc_feature (1)..(449): Homolog of NCBI NO: 30684625 NR Description: lipase (class 3) family [Arabidopsis thaliana]
  misc_feature (83)..(529): Homolog of NCBI NO: 25408087 NR Description: probable lipase [imported] - Arabidopsis thaliana
  misc_feature (1)..(529): Homolog of NCBI NO: 18402385 NR Description: lipase (class 3) family [Arabidopsis thaliana]
MAAIPSHNNLLTINHKNSITGSSSLNTNFSEINFPAKFRVATRALSRTDESSLSAVISRLERERRERQGLLIEEAEGAGELWMTAEDIRRRDKKTEEERRLRDTWRKIQGEDDWAGLMDPMDPILRSELIRYGEMAQACYDAFDFDPASKYCGTSRFTRLEFFDSLGMIDSGYEVARYLYATSNINLPNFFSKSRWSKVWSKNANWMGYVAVSDDETSRNRLGRRDIAIAWRGTVTKLEWIADLKDYLKPVTENKIRCPDPAVKVESGFLDLYTDKDTTCKFARFSAREQILTEVKRLVEEHGDDDDSDLSITVTGHSLGGALAILSAYDIAEMRLNRSKKGKVIPVTVLTYGGPRVGNVRFRERMEELGVKVMRVVNVHDVVPKSPGLFLNESRPHALMKIAEGLPWCYSHVGEELALDHQNSPFLKPSVDVSTAHNLEAMLHLLDGYHGKGERFVLSSGRDHALVNKASDFLKEHLQIPPFWRQDANKGMVRNSEGRWIQAERLRFEDHHSPDIHHHLSQLRLDHPC

SEQ ID NO: 43578 - protein, 447 aa, Arabidopsis thaliana
  peptide (1)..(447): Ceres Seq. ID no. 13491007
  misc_feature (23)..(433): Homolog of NCBI NO: 21537306 NR Description: lipase-like protein [Arabidopsis thaliana]
  misc_feature (19)..(365): Homolog of NCBI NO: 18390571 NR Description: lipase (class 3) family [Arabidopsis thaliana]
  misc_feature (6)..(366): Homolog of NCBI NO: 34907690 NR Description: putative triacylglycerol lipase
  misc_feature (1)..(432): Homolog of NCBI NO: 15220732 NR Description: lipase (class 3) family [Arabidopsis thaliana]
  misc_feature (5)..(441): Homolog of NCBI NO: 18403524 NR Description: lipase (class 3) family [Arabidopsis thaliana]
  misc_feature (1)..(366): Homolog of NCBI NO: 18390691 NR Description: lipase (class 3) family [Arabidopsis thaliana]
  misc_feature (1)..(446): Homolog of NCBI NO: 30679836 NR Description: lipase (class 3) family [Arabidopsis thaliana]
  misc_feature (1)..(367): Homolog of NCBI NO: 30684625 NR Description: lipase (class 3) family [Arabidopsis thaliana]
  misc_feature (1)..(447): Homolog of NCBI NO: 25408087 NR Description: probable lipase [imported] - Arabidopsis thaliana
  misc_feature (1)..(447): Homolog of NCBI NO: 18402385 NR Description: lipase (class 3) family [Arabidopsis thaliana]
MTAEDIRRRDKKTEEERRLRDTWRKIQGEDDWAGLMDPMDPILRSELIRYGEMAQACYDAFDFDPASKYCGTSRFTRLEFFDSLGMIDSGYEVARYLYATSNINLPNFFSKSRWSKVWSKNANWMGYVAVSDDETSRNRLGRRDIAIAWRGTVTKLEWIADLKDYLKPVTENKIRCPDPAVKVESGFLDLYTDKDTTCKFARFSAREQILTEVKRLVEEHGDDDDSDLSITVTGHSLGGALAILSAYDIAEMRLNRSKKGKVIPVTVLTYGGPRVGNVRFRERMEELGVKVMRVVNVHDVVPKSPGLFLNESRPHALMKIAEGLPWCYSHVGEELALDHQNSPFLKPSVDVSTAHNLEAMLHLLDGYHGKGERFVLSSGRDHALVNKASDFLKEHLQIPPFWRQDANKGMVRNSEGRWIQAERLRFEDHHSPDIHHHLSQLRLDHPC

SEQ ID NO: 43579 - protein, 412 aa, Arabidopsis thaliana
  peptide (1)..(412): Ceres Seq. ID no. 13491008
  misc_feature (1)..(398): Homolog of NCBI NO: 21537306 NR Description: lipase-like protein [Arabidopsis thaliana]
  misc_feature (1)..(330): Homolog of NCBI NO: 18390571 NR Description: lipase (class 3) family [Arabidopsis thaliana]
  misc_feature (1)..(331): Homolog of NCBI NO: 34907690 NR Description: putative triacylglycerol lipase
  misc_feature (1)..(397): Homolog of NCBI NO: 15220732 NR Description: lipase (class 3) family [Arabidopsis thaliana]
  misc_feature (1)..(406): Homolog of NCBI NO: 18403524 NR Description: lipase (class 3) family [Arabidopsis thaliana]
  misc_feature (1)..(331): Homolog of NCBI NO: 18390691 NR Description: lipase (class 3) family [Arabidopsis thaliana]
  misc_feature (1)..(411): Homolog of NCBI NO: 30679836 NR Description: lipase (class 3) family [Arabidopsis thaliana]
  misc_feature (1)..(332): Homolog of NCBI NO: 30684625 NR Description: lipase (class 3) family [Arabidopsis thaliana]
  misc_feature (1)..(412): Homolog of NCBI NO: 25408087 NR Description: probable lipase [imported] - Arabidopsis thaliana
  misc_feature (1)..(412): Homolog of NCBI NO: 18402385 NR Description: lipase (class 3) family [Arabidopsis thaliana]
MDPMDPILRSELIRYGEMAQACYDAFDFDPASKYCGTSRFTRLEFFDSLGMIDSGYEVARYLYATSNINLPNFFSKSRWSKVWSKNANWMGYVAVSDDETSRNRLGRRDIAIAWRGTVTKLEWIADLKDYLKPVTENKIRCPDPAVKVESGFLDLYTDKDTTCKFARFSAREQILTEVKRLVEEHGDDDDSDLSITVTGHSLGGALAILSAYDIAEMRLNRSKKGKVIPVTVLTYGGPRVGNVRFRERMEELGVKVMRVVNVHDVVPKSPGLFLNESRPHALMKIAEGLPWCYSHVGEELALDHQNSPFLKPSVDVSTAHNLEAMLHLLDGYHGKGERFVLSSGRDHALVNKASDFLKEHLQIPPFWRQDANKGMVRNSEGRWIQAERLRFEDHHSPDIHHHLSQLRLDHPC

SEQ ID NO: 43580 - DNA, 1254 bp, Arabidopsis thaliana
  misc_feature (1)..(1254): Ceres Seq. ID no. 13492155
  misc_feature: MA Experiment ID: 108434 Result: Up-regulated in Transcription
  misc_feature: MA Experiment 108434 PARAMETER Experiment Name: At_Root_Tips_cDNA_P Parameter: Tissue Value: Root Tips
  misc_feature: MA Experiment ID: 108462 Result: Down-regulated in Transcription
  misc_feature: MA Experiment 108462 PARAMETER Experiment Name: At_Germinating_Seeds_cDNA_P Parameter: Age (day) Value: 2 vs. 0
  misc_feature: MA Experiment 108462 PARAMETER Experiment Name: At_Germinating_Seeds_cDNA_P Parameter: Tissue Value: Germinating Seeds
  misc_feature: MA Experiment ID: 108463 Result: Down-regulated in Transcription
  misc_feature: MA Experiment 108463 PARAMETER Experiment Name: At_Germinating_Seeds_cDNA_P Parameter: Age (day) Value: 3 vs. 0
  misc_feature: MA Experiment 108463 PARAMETER Experiment Name: At_Germinating_Seeds_cDNA_P Parameter: Tissue Value: Germinating Seeds
  misc_feature: MA Experiment ID: 108464 Result: Down-regulated in Transcription
  misc_feature: MA Experiment 108464 PARAMETER Experiment Name: At_Germinating_Seeds_cDNA_P Parameter: Age (day) Value: 4 vs. 0
  misc_feature: MA Experiment 108464 PARAMETER Experiment Name: At_Germinating_Seeds_cDNA_P Parameter: Tissue Value: Germinating Seeds
  misc_feature: MA Experiment ID: 108488 Result: Up-regulated in Transcription
  misc_feature: MA Experiment ID: 108573 Result: Down-regulated in Transcription
  misc_feature: MA Experiment 108573 PARAMETER Experiment Name: At_Drought_cDNA_P Parameter: Timepoint (hr) Value: 6
  misc_feature: MA Experiment 108573 PARAMETER Experiment Name: At_Drought_cDNA_P Parameter: Tissue Value: Aerial
  misc_feature: MA Experiment 108573 PARAMETER Experiment Name: At_Drought_cDNA_P Parameter: Treatment Value: Drought vs. No Drought
  misc_feature: MA Experiment ID: 20000184 Result: Up-regulated in Transcription
  misc_feature: MA Experiment 20000184 PARAMETER Experiment Name: At_Shoots__P Parameter: Age (day) Value: 7
  misc_feature: MA Experiment 20000184 PARAMETER Experiment Name: At_Shoots__P Parameter: Tissue Value: Shoots vs. Whole Plant
  misc_feature: MA Experiment ID: 20000224 Result: Down-regulated in Transcription
  misc_feature: MA Experiment ID: 20000234 Result: Up-regulated in Transcription
  misc_feature: MA Experiment 20000234 PARAMETER Experiment Name: At_Siliques_P Parameter: Age (day) Value: 21
  misc_feature: MA Experiment 20000234 PARAMETER Experiment Name: At_Siliques_P Parameter: Organism Value: A. thaliana
  misc_feature: MA Experiment 20000234 PARAMETER Experiment Name: At_Siliques_P Parameter: Plant Line Value: WS
  misc_feature: MA Experiment 20000234 PARAMETER Experiment Name: At_Siliques_P Parameter: Tissue Value: Less Than 5mm Siliques vs. Whole Plant
  misc_feature: MA Experiment ID: 20000265 Result: Up-regulated in Transcription
  misc_feature: MA Experiment 20000265 PARAMETER Experiment Name: At_Open_Flower_P Parameter: Age (day) Value: 21
  misc_feature: MA Experiment 20000265 PARAMETER Experiment Name: At_Open_Flower_P Parameter: Plant Line Value: WS
  misc_feature: MA Experiment 20000265 PARAMETER Experiment Name: At_Open_Flower_P Parameter: Tissue Value: Closed Flower vs. Whole Plant
  misc_feature: MA Experiment ID: 20000794 Result: Down-regulated in Transcription
  misc_feature: MA Experiment 20000794 PARAMETER Experiment Name: At_Petals_P Parameter: Age (day) Value: 23-25 days
  misc_feature: MA Experiment 20000794 PARAMETER Experiment Name: At_Petals_P Parameter: Plant Line Value: WS
  misc_feature: MA Experiment 20000794 PARAMETER Experiment Name: At_Petals_P Parameter: Tissue Value: Petals vs. Whole plant
  misc_feature: MA Experiment ID: 20001557 Result: Up-regulated in Transcription
  misc_feature: MA Experiment 20001557 PARAMETER Experiment Name: At_Drought_Soil_Dry_P Parameter: Age (day) Value: 27
  misc_feature: MA Experiment 20001557 PARAMETER Experiment Name: At_Drought_Soil_Dry_P Parameter: Organism Value: A. thaliana
  misc_feature: MA Experiment 20001557 PARAMETER Experiment Name: At_Drought_Soil_Dry_P Parameter: Plant Line Value: WS
  misc_feature: MA Experiment 20001557 PARAMETER Experiment Name: At_Drought_Soil_Dry_P Parameter: Post Timepoint (hr) Value: 3
  misc_feature: MA Experiment 20001557 PARAMETER Experiment Name: At_Drought_Soil_Dry_P Parameter: Post-Treatment Value: Re-Water vs. No Drought
  misc_feature: MA Experiment 20001557 PARAMETER Experiment Name: At_Drought_Soil_Dry_P Parameter: Timepoint (day) Value: 13
  misc_feature: MA Experiment 20001557 PARAMETER Experiment Name: At_Drought_Soil_Dry_P Parameter: Treatment Value: Drought vs. No Drought
  misc_feature: MA Experiment ID: 20001558 Result: Up-regulated in Transcription
  misc_feature: MA Experiment 20001558 PARAMETER Experiment Name: At_Drought_Soil_Dry_P Parameter: Age (day) Value: 27
  misc_feature: MA Experiment 20001558 PARAMETER Experiment Name: At_Drought_Soil_Dry_P Parameter: Organism Value: A. thaliana
  misc_feature: MA Experiment 20001558 PARAMETER Experiment Name: At_Drought_Soil_Dry_P Parameter: Plant Line Value: WS
  misc_feature: MA Experiment 20001558 PARAMETER Experiment Name: At_Drought_Soil_Dry_P Parameter: Post Timepoint (hr) Value: 6
  misc_feature: MA Experiment 20001558 PARAMETER Experiment Name: At_Drought_Soil_Dry_P Parameter: Post-Treatment Value: Re-Water vs. No Drought
  misc_feature: MA Experiment 20001558 PARAMETER Experiment Name: At_Drought_Soil_Dry_P Parameter: Timepoint (day) Value: 13
  misc_feature: MA Experiment 20001558 PARAMETER Experiment Name: At_Drought_Soil_Dry_P Parameter: Treatment Value: Drought vs. No Drought
  misc_feature: MA Experiment ID: 20001560 Result: Up-regulated in Transcription
  misc_feature: MA Experiment 20001560 PARAMETER Experiment Name: At_Drought_Soil_Dry_P Parameter: Age (day) Value: 28
  misc_feature: MA Experiment 20001560 PARAMETER Experiment Name: At_Drought_Soil_Dry_P Parameter: Organism Value: A. thaliana
  misc_feature: MA Experiment 20001560 PARAMETER Experiment Name: At_Drought_Soil_Dry_P Parameter: Plant Line Value: WS
  misc_feature: MA Experiment 20001560 PARAMETER Experiment Name: At_Drought_Soil_Dry_P Parameter: Post Timepoint (hr) Value: None
  misc_feature: MA Experiment 20001560 PARAMETER Experiment Name: At_Drought_Soil_Dry_P Parameter: Post-Treatment Value: None
  misc_feature: MA Experiment 20001560 PARAMETER Experiment Name: At_Drought_Soil_Dry_P Parameter: Timepoint (day) Value: 14
  misc_feature: MA Experiment 20001560 PARAMETER Experiment Name: At_Drought_Soil_Dry_P Parameter: Treatment Value: Drought vs. No Drought
  misc_feature: MA Experiment ID: 20001757 Result: Up-regulated in Transcription
  misc_feature: MA Experiment 20001757 PARAMETER Experiment Name: At_50mM_NH4NO3_L-to-H_P Parameter: Timepoint (hr) Value: 6
  misc_feature: MA Experiment 20001757 PARAMETER Experiment Name: At_50mM_NH4NO3_L-to-H_P Parameter: Tissue Value: Leaf
  misc_feature: MA Experiment 20001757 PARAMETER Experiment Name: At_50mM_NH4NO3_L-to-H_P Parameter: Treatment Value: 50mM NH4NO3 vs 100mM Mannitol
agagtattttctagggtttcgttttttttaaagatttagagagaaaagtgagttattaagagattccaatcaaaatgagcgagaccgtcccaggtttggtgaccgtgatgggtaccgtgcaggtcctcgagctggtggtgagtttggaggtgaaaagggtggagctcctgcagattaccagccatctttccaaggaagtgggcgtggttttggccgtggtgctggtggctacagcgcagctgcaccatctggttcaggtttgccttgaaaaagaaatgtctttaggtgacagtaagaccatggaggagttttcagctttaaattttgcttttgtaattcagattccggaatccttcataatctctatctgagtttagttttgttgttgaatcaaacatccgatttaaagttatgttcattccatcttctctccaaaaaaaaaaaaaaaaaaaaaaaaaaagaaaaccctagttttttgctctctcgaagttccgtgcgactctctgctcgagcaagatctcctaccgatacaatgattatctcagaggctaaccgcaaagaaatctgcaagtacctcttcaaagaaggagtttgctttgcgaagaaggatttcaatcttgctaagcatccgttgatcgatgtccccaacctacaagtgattaagcttatgcagagtttcaaatccaaggagtatgttagggagacatttgcctggatgcattactattggtttttgaccaatgaagggatcgagttcttgagaacttatcttaatcttccatctgatgttgttcctgctactttgaagaagtcagctaagcctggtggtcgtccatttggtggcccacctggtgatcgctcaagaggacctcgccatgaaggaggagaccgtcccaggtttggtgaccgtgatgggtaccgtgcaggtcctcgagctggtggtgagtttggaggtgaaaagggtggagctcccgcagattaccagccatctttccaaggaagtggccgtggttttggccgtggtgctggtggctacagcgcagctgcaccatctggttcaggtttgccttgaaaaagaaatgtctttaggtgacagtaagaccatggaggagttttcagctttaaattttgcttttgtaattcagattccggaatccttcataatctctatctgagtttagttttgttgttgaatcaaacatccgatttaaagttatgttcattccatcttctcttcaaaaaaaaaaaaaaaaa

SEQ ID NO: 43581 - protein, 179 aa, Arabidopsis thaliana; identical to SEQ ID NO: 37920
  peptide (1)..(179): Ceres Seq. ID no. 13492156
  misc_feature (3)..(98): Pfam Name: Plectin/S10 domain Pfam Description: Plectin/S10 domain
  misc_feature (1)..(166): Homolog of NCBI NO: 28200289 NR Description: ribosomal protein S10 [Branchiostoma belcheri
  misc_feature (1)..(166): Homolog of NCBI NO: 24266976 NR Description: ribosomal protein S10 [Branchiostoma belcheri]
  misc_feature (1)..(173): Homolog of NCBI NO: 40642980 NR Description: ribosomal protein S10 [Crassostrea gigas]
  misc_feature (1)..(179): Homolog of NCBI NO: 15238099 NR Description: expressed protein [Arabidopsis thaliana]
  misc_feature (1)..(178): Homolog of NCBI NO: 20140213 NR Description: 40S ribosomal protein S10
  misc_feature (1)..(174): Homolog of NCBI NO: 34905824 NR Description: putative ribosomal protein S10
  misc_feature (1)..(178): Homolog of NCBI NO: 34897532 NR Description: OSJNBa0042L16.3 [Oryza sativa (japonica
  misc_feature (1)..(179): Homolog of NCBI NO: 15235985 NR Description: 40S ribosomal protein S10 (RPS10A) [Arabidopsis
  misc_feature (1)..(179): Homolog of NCBI NO: 20139798 NR Description: 40S ribosomal protein S10-3
  misc_feature (1)..(179): Homolog of NCBI NO: 15237217 NR Description: 40S ribosomal protein S10 (RPS10C) [Arabidopsis

SEQ ID NO: 43582 - protein, 134 aa, Arabidopsis thaliana; identical to SEQ ID NO: 37921
  peptide (1)..(134): Ceres Seq. ID no. 13492157
  misc_feature (1)..(53): Pfam Name: Plectin/S10 domain Pfam Description: Plectin/S10 domain
  misc_feature (1)..(121): Homolog of NCBI NO: 28200289 NR Description: ribosomal protein S10 [Branchiostoma belcheri
  misc_feature (1)..(121): Homolog of NCBI NO: 24266976 NR Description: ribosomal protein S10 [Branchiostoma belcheri]
  misc_feature (1)..(128): Homolog of NCBI NO: 40642980 NR Description: ribosomal protein S10 [Crassostrea gigas]
  misc_feature (1)..(134): Homolog of NCBI NO: 15238099 NR Description: expressed protein [Arabidopsis thaliana]
  misc_feature (1)..(133): Homolog of NCBI NO: 20140213 NR Description: 40S ribosomal protein S10
  misc_feature (1)..(129): Homolog of NCBI NO: 34905824 NR Description: putative ribosomal protein S10
  misc_feature (1)..(133): Homolog of NCBI NO: 34897532 NR Description: OSJNBa0042L16.3 [Oryza sativa (japonica
  misc_feature (1)..(134): Homolog of NCBI NO: 15235985 NR Description: 40S ribosomal protein S10 (RPS10A) [Arabidopsis
  misc_feature (1)..(134): Homolog of NCBI NO: 20139798 NR Description: 40S ribosomal protein S10-3
  misc_feature (1)..(134): Homolog of NCBI NO: 15237217 NR Description: 40S ribosomal protein S10 (RPS10C) [Arabidopsis

SEQ ID NO: 43583 - protein, 118 aa, Arabidopsis thaliana; identical to SEQ ID NO: 27479
  peptide (1)..(118): Ceres Seq. ID no. 13492158
  misc_feature (1)..(105): Homolog of NCBI NO: 28200289 NR Description: ribosomal protein S10 [Branchiostoma belcheri
  misc_feature (1)..(105): Homolog of NCBI NO: 24266976 NR Description: ribosomal protein S10 [Branchiostoma belcheri]
  misc_feature (1)..(112): Homolog of NCBI NO: 40642980 NR Description: ribosomal protein S10 [Crassostrea gigas]
  misc_feature (1)..(118): Homolog of NCBI NO: 15238099 NR Description: expressed protein [Arabidopsis thaliana]
  misc_feature (1)..(117): Homolog of NCBI NO: 20140213 NR Description: 40S ribosomal protein S10
  misc_feature (1)..(113): Homolog of NCBI NO: 34905824 NR Description: putative ribosomal protein S10
  misc_feature (1)..(117): Homolog of NCBI NO: 34897532 NR Description: OSJNBa0042L16.3 [Oryza sativa (japonica
  misc_feature (1)..(118): Homolog of NCBI NO: 15235985 NR Description: 40S ribosomal protein S10 (RPS10A) [Arabidopsis
  misc_feature (1)..(118): Homolog of NCBI NO: 20139798 NR Description: 40S ribosomal protein S10-3
  misc_feature (1)..(118): Homolog of NCBI NO: 15237217 NR Description: 40S ribosomal protein S10 (RPS10C) [Arabidopsis

SEQ ID NO: 43584 - DNA, 1284 bp, Arabidopsis thaliana
  misc_feature (1)..(1284): Ceres Seq. ID no. 12421800
  misc_feature: MA Experiment ID: 20000184 Result: Down-regulated in Transcription
  misc_feature: MA Experiment 20000184 PARAMETER Experiment Name: At_Shoots__P Parameter: Age (day) Value: 7
  misc_feature: MA Experiment 20000184 PARAMETER Experiment Name: At_Shoots__P Parameter: Tissue Value: Shoots vs. Whole Plant
  misc_feature: MA Experiment ID: 20000227 Result: Down-regulated in Transcription
  misc_feature: MA Experiment 20000227 PARAMETER Experiment Name: At_Root-Tips-vs-Tops_P Parameter: Tissue Value: Root Tips vs. Root Tops
  misc_feature: MA Experiment ID: 20000234 Result: Down-regulated in Transcription
  misc_feature: MA Experiment 20000234 PARAMETER Experiment Name: At_Siliques_P Parameter: Age (day) Value: 21
  misc_feature: MA Experiment 20000234 PARAMETER Experiment Name: At_Siliques_P Parameter: Organism Value: A. thaliana
  misc_feature: MA Experiment 20000234 PARAMETER Experiment Name: At_Siliques_P Parameter: Plant Line Value: WS
  misc_feature: MA Experiment 20000234 PARAMETER Experiment Name: At_Siliques_P Parameter: Tissue Value: Less Than 5mm Siliques vs. Whole Plant
  misc_feature: MA Experiment ID: 20000265 Result: Down-regulated in Transcription
  misc_feature: MA Experiment 20000265 PARAMETER Experiment Name: At_Open_Flower_P Parameter: Age (day) Value: 21
  misc_feature: MA Experiment 20000265 PARAMETER Experiment Name: At_Open_Flower_P Parameter: Plant Line Value: WS
  misc_feature: MA Experiment 20000265 PARAMETER Experiment Name: At_Open_Flower_P Parameter: Tissue Value: Closed Flower vs. Whole Plant
  misc_feature: MA Experiment ID: 20000438 Result: Down-regulated in Transcription
  misc_feature: MA Experiment 20000438 PARAMETER Experiment Name: At_Shoots__P Parameter: Age (day) Value: 14
  misc_feature: MA Experiment 20000438 PARAMETER Experiment Name: At_Shoots__P Parameter: Tissue Value: Shoots vs. Whole Plant
  misc_feature: MA Experiment ID: 20000495 Result: Up-regulated in Transcription
  misc_feature: MA Experiment 20000495 PARAMETER Experiment Name: At_Guard_Cells_P Parameter: Harvest Date Value: 8/2/2002
  misc_feature: MA Experiment 20000495 PARAMETER Experiment Name: At_Guard_Cells_P Parameter: Organism Value: A. thaliana
  misc_feature: MA Experiment 20000495 PARAMETER Experiment Name: At_Guard_Cells_P Parameter: Tissue Value: Guard Cells vs. Leaves
  misc_feature: MA Experiment ID: 20001757 Result: Down-regulated in Transcription
  misc_feature: MA Experiment 20001757 PARAMETER Experiment Name: At_50mM_NH4NO3_L-to-H_P Parameter: Timepoint (hr) Value: 6
  misc_feature: MA Experiment 20001757 PARAMETER Experiment Name: At_50mM_NH4NO3_L-to-H_P Parameter: Tissue Value: Leaf
  misc_feature: MA Experiment 20001757 PARAMETER Experiment Name: At_50mM_NH4NO3_L-to-H_P Parameter: Treatment Value: 50mM NH4NO3 vs 100mM Mannitol
acaccaagcataaaaaaaagttgcgacgttctcattctttctcgaatcgtaccacagagagagagagagaacaaaaagaagcaatcgtcgaaagtcatgttcgctacaaaaacagttctctttatcgccgtcgtgtcacttctcggaacgttttcatccgccgctgtcgatacttttatctacggtggttgctcacaagaaaagtactttccgggatcgccttacgagtcaaacgttaactctctactcacctcgttcgttagctcagcttctctctacacatacaacaacttcaccaccaacggaatctccggcgacagttcctccgtctacggtttgtaccagtgtcgcggtgatctctcctccggctcgggagattgtgcaagatgcgtcgcgcgagcagtaagccgtctagggagtctctgcgccatggcaagcggtggcgcgttgcagctcgaaggctgtttcgttaaatacgacaacacgacgttcctcggtgttgaggataagacggtggtggttcgacgttgtggaccaccggttggttataactcggacgagatgactcgtagagactcggtggtgggttctttagcggcgagtagcggtggttcatacagagtaggagtgtcgggggaactgcaaggtgtggcgcagtgcaccggagatcttagtgcgactgagtgtcaagactgtttgatggaagcgatcggacggctgagaacggattgcggaggagctgcttggggtgacgtgtacttagcaaagtgctacgcgcgttactctgcgcgtggaggtcactctagagccaacggctatggtgggaatcgtaataacaatgatgacgatgagatagagaaaacacttgcaatcatagttggcttaattgctggagttacgttactcgtcgtatttctctcttttatggcaaaatcgtgcgagagaggtaaaggtgggaagtaaataacgttatgggacttttgacttgtatcatcaatttatggttttaaaaaagaatcaaatgcgtaaaggagaaagaaaagcgaagagattcttcatattctccactaaaatcctaaaggatgtttcttttttgacccactttaattgaagttttactatttttcaaatgtatagaaaactcacgccgtttagatttgtgatcgtatctttacgtaagaacatttaaaagtggcgcatatgcaatttatctttgatatatatttctaattatcataatcacttaacgttgtagtttaaaggaattattgttgattttgtgtt

SEQ ID NO: 43585 - protein, 320 aa, Arabidopsis thaliana
  peptide (1)..(320): Ceres Seq. ID no. 12421801
  misc_feature (214)..(268): Pfam Name: Domain of unknown function DUF26 Pfam Description: Domain of unknown function DUF26
  misc_feature (38)..(276): Homolog of NCBI NO: 15232412 NR Description: secretory protein - like; protein id: At3g60720.1
  misc_feature (42)..(269): Homolog of NCBI NO: 38567870 NR Description: OSJNBa0091D06.12 [Oryza sativa (japonica
  misc_feature (33)..(269): Homolog of NCBI NO: 25406066 NR Description: unknown protein F5A18.13 [imported] - Arabidopsis
  misc_feature (36)..(273): Homolog of NCBI NO: 9757976 NR Description: contains similarity to secretory
  misc_feature (33)..(315): Homolog of NCBI NO: 18409653 NR Description: expressed protein
  misc_feature (33)..(315): Homolog of NCBI NO: 21593606 NR Description: unknown [Arabidopsis thaliana]
  misc_feature (36)..(316): Homolog of NCBI NO: 30693130 NR Description: expressed protein [Arabidopsis thaliana]
  misc_feature (33)..(274): Homolog of NCBI NO: 25410919 NR Description: hypothetical protein At2g01660 [imported] -
  misc_feature (33)..(320): Homolog of NCBI NO: 21554153 NR Description: unknown [Arabidopsis thaliana]
  misc_feature (33)..(320): Homolog of NCBI NO: 18379273 NR Description: expressed protein
TPSIKKSCDVLILSRIVPQRERENKKKQSSKVMFATKTVLFIAVVSLLGTFSSAAVDTFIYGGCSQEKYFPGSPYESNVNSLLTSFVSSASLYTYNNFTTNGISGDSSSVYGLYQCRGDLSSGSGDCARCVARAVSRLGSLCAMASGGALQLEGCFVKYDNTTFLGVEDKTVVVRRCGPPVGYNSDEMTRRDSVVGSLAASSGGSYRVGVSGELQGVAQCTGDLSATECQDCLMEAIGRLRTDCGGAAWGDVYLAKCYARYSARGGHSRANGYGGNRNNNDDDEIEKTLAIIVGLIAGVTLLVVFLSFMAKSCERGKGGK

SEQ ID NO: 43586 - protein, 288 aa, Arabidopsis thaliana
  peptide (1)..(288): Ceres Seq. ID no. 12421802
  misc_feature (182)..(236): Pfam Name: Domain of unknown function DUF26 Pfam Description: Domain of unknown function DUF26
  misc_feature (6)..(244): Homolog of NCBI NO: 15232412 NR Description: secretory protein - like; protein id: At3g60720.1
  misc_feature (10)..(237): Homolog of NCBI NO: 38567870 NR Description: OSJNBa0091D06.12 [Oryza sativa (japonica
  misc_feature (1)..(237): Homolog of NCBI NO: 25406066 NR Description: unknown protein F5A18.13 [imported] - Arabidopsis
  misc_feature (4)..(241): Homolog of NCBI NO: 9757976 NR Description: contains similarity to secretory
  misc_feature (1)..(283): Homolog of NCBI NO: 18409653 NR Description: expressed protein
  misc_feature (1)..(283): Homolog of NCBI NO: 21593606 NR Description: unknown [Arabidopsis thaliana]
  misc_feature (4)..(284): Homolog of NCBI NO: 30693130 NR Description: expressed protein [Arabidopsis thaliana]
  misc_feature (1)..(242): Homolog of NCBI NO: 25410919 NR Description: hypothetical protein At2g01660 [imported] -
  misc_feature (1)..(288): Homolog of NCBI NO: 21554153 NR Description: unknown [Arabidopsis thaliana]
  misc_feature (1)..(288): Homolog of NCBI NO: 18379273 NR Description: expressed protein
MFATKTVLFIAVVSLLGTFSSAAVDTFIYGGCSQEKYFPGSPYESNVNSLLTSFVSSASLYTYNNFTTNGISGDSSSVYGLYQCRGDLSSGSGDCARCVARAVSRLGSLCAMASGGALQLEGCFVKYDNTTFLGVEDKTVVVRRCGPPVGYNSDEMTRRDSVVGSLAASSGGSYRVGVSGELQGVAQCTGDLSATECQDCLMEAIGRLRTDCGGAAWGDVYLAKCYARYSARGGHSRANGYGGNRNNNDDDEIEKTLAIIVGLIAGVTLLVVFLSFMAKSCERGKGGK

SEQ ID NO: 43587 - protein, 177 aa, Arabidopsis thaliana
  peptide (1)..(177): Ceres Seq. ID no. 12421803
  misc_feature (71)..(125): Pfam Name: Domain of unknown function DUF26 Pfam Description: Domain of unknown function DUF26
  misc_feature (1)..(133): Homolog of NCBI NO: 15232412 NR Description: secretory protein - like; protein id: At3g60720.1
  misc_feature (1)..(126): Homolog of NCBI NO: 38567870 NR Description: OSJNBa0091D06.12 [Oryza sativa (japonica
  misc_feature (1)..(126): Homolog of NCBI NO: 25406066 NR Description: unknown protein F5A18.13 [imported] - Arabidopsis
  misc_feature (1)..(130): Homolog of NCBI NO: 9757976 NR Description: contains similarity to secretory
  misc_feature (1)..(172): Homolog of NCBI NO: 18409653 NR Description: expressed protein
  misc_feature (1)..(172): Homolog of NCBI NO: 21593606 NR Description: unknown [Arabidopsis thaliana]
  misc_feature (1)..(173): Homolog of NCBI NO: 30693130 NR Description: expressed protein [Arabidopsis thaliana]
  misc_feature (1)..(131): Homolog of NCBI NO: 25410919 NR Description: hypothetical protein At2g01660 [imported] -
  misc_feature (1)..(177): Homolog of NCBI NO: 21554153 NR Description: unknown [Arabidopsis thaliana]
  misc_feature (1)..(177): Homolog of NCBI NO: 18379273 NR Description: expressed protein
MASGGALQLEGCFVKYDNTTFLGVEDKTVVVRRCGPPVGYNSDEMTRRDSVVGSLAASSGGSYRVGVSGELQGVAQCTGDLSATECQDCLMEAIGRLRTDCGGAAWGDVYLAKCYARYSARGGHSRANGYGGNRNNNDDDEIEKTLAIIVGLIAGVTLLVVFLSFMAKSCERGKGGK

SEQ ID NO: 43588 - DNA, 988 bp, Arabidopsis thaliana
  misc_feature (1)..(988): Ceres Seq. ID no. 13492488
  misc_feature: MA Experiment ID: 108434 Result: Up-regulated in Transcription
  misc_feature: MA Experiment 108434 PARAMETER Experiment Name: At_Root_Tips_cDNA_P Parameter: Tissue Value: Root Tips
  misc_feature: MA Experiment ID: 108461 Result: Up-regulated in Transcription
  misc_feature: MA Experiment 108461 PARAMETER Experiment Name: At_Germinating_Seeds_cDNA_P Parameter: Age (day) Value: 1 vs. 0
  misc_feature: MA Experiment 108461 PARAMETER Experiment Name: At_Germinating_Seeds_cDNA_P Parameter: Tissue Value: Germinating Seeds
  misc_feature: MA Experiment ID: 108569 Result: Down-regulated in Transcription
  misc_feature: MA Experiment 108569 PARAMETER Experiment Name: At_0.001%_MeJA__cDNA_P Parameter: Timepoint (hr) Value: 6
  misc_feature: MA Experiment 108569 PARAMETER Experiment Name: At_0.001%_MeJA__cDNA_P Parameter: Tissue Value: Aerial
  misc_feature: MA Experiment 108569 PARAMETER Experiment Name: At_0.001%_MeJA__cDNA_P Parameter: Treatment Value: 0.001% MeJA vs. No Treatment
  misc_feature: MA Experiment ID: 108573 Result: Down-regulated in Transcription
  misc_feature: MA Experiment 108573 PARAMETER Experiment Name: At_Drought_cDNA_P Parameter: Timepoint (hr) Value: 6
  misc_feature: MA Experiment 108573 PARAMETER Experiment Name: At_Drought_cDNA_P Parameter: Tissue Value: Aerial
  misc_feature: MA Experiment 108573 PARAMETER Experiment Name: At_Drought_cDNA_P Parameter: Treatment Value: Drought vs. No Drought
  misc_feature: MA Experiment ID: 108577 Result: Down-regulated in Transcription
  misc_feature: MA Experiment 108577 PARAMETER Experiment Name: At_42deg_Heat_cDNA_P Parameter: Temperature (deg C) Value: 42 vs. 22
  misc_feature: MA Experiment 108577 PARAMETER Experiment Name: At_42deg_Heat_cDNA_P Parameter: Timepoint (hr) Value: 6
  misc_feature: MA Experiment 108577 PARAMETER Experiment Name: At_42deg_Heat_cDNA_P Parameter: Tissue Value: Aerial
  misc_feature: MA Experiment ID: 108585 Result: Down-regulated in Transcription
  misc_feature: MA Experiment 108585 PARAMETER Experiment Name: At_5mM_NaNP_cDNA_P Parameter: Timepoint (hr) Value: 6
  misc_feature: MA Experiment 108585 PARAMETER Experiment Name: At_5mM_NaNP_cDNA_P Parameter: Tissue Value: Aerial
  misc_feature: MA Experiment 108585 PARAMETER Experiment Name: At_5mM_NaNP_cDNA_P Parameter: Treatment Value: null
  misc_feature: MA Experiment ID: 108594 Result: Up-regulated in Transcription
  misc_feature: MA Experiment 108594 PARAMETER Experiment Name: At_Ler-rhl_Root_cDNA_P Parameter: Plant Line Value: null
  misc_feature: MA Experiment ID: 20000090 Result: Up-regulated in Transcription
  misc_feature: MA Experiment ID: 20000111 Result: Down-regulated in Transcription
  misc_feature: MA Experiment 20000111 PARAMETER Experiment Name: At_42deg_Heat_cDNA_P Parameter: Temperature (deg C) Value: 42 vs. 22
  misc_feature: MA Experiment 20000111 PARAMETER Experiment Name: At_42deg_Heat_cDNA_P Parameter: Timepoint (hr) Value: 6
  misc_feature: MA Experiment 20000111 PARAMETER Experiment Name: At_42deg_Heat_cDNA_P Parameter: Tissue Value: Aerial
  misc_feature: MA Experiment ID: 20000113 Result: Down-regulated in Transcription
  misc_feature: MA Experiment 20000113 PARAMETER Experiment Name: At_42deg_Heat_cDNA_P Parameter: Temperature (deg C) Value: 42 vs. 22
  misc_feature: MA Experiment 20000113 PARAMETER Experiment Name: At_42deg_Heat_cDNA_P Parameter: Timepoint (hr) Value: 8
  misc_feature: MA Experiment 20000113 PARAMETER Experiment Name: At_42deg_Heat_cDNA_P Parameter: Tissue Value: Aerial
  misc_feature: MA Experiment ID: 20000117 Result: Down-regulated in Transcription
  misc_feature: MA Experiment 20000117 PARAMETER Experiment Name: At_100uM_ABA_Mutants_cDNA_P Parameter: Plant Line Value: Columbia
  misc_feature: MA Experiment 20000117 PARAMETER Experiment Name: At_100uM_ABA_Mutants_cDNA_P Parameter: Timepoint (hr) Value: 6
  misc_feature: MA Experiment 20000117 PARAMETER Experiment Name: At_100uM_ABA_Mutants_cDNA_P Parameter: Tissue Value: Aerial
  misc_feature: MA Experiment 20000117 PARAMETER Experiment Name: At_100uM_ABA_Mutants_cDNA_P Parameter: Treatment Value: 100uM ABA vs. No Treatment
  misc_feature: MA Experiment ID: 20000173 Result: Down-regulated in Transcription
  misc_feature: MA Experiment 20000173 PARAMETER Experiment Name: At_42deg_Heat_P Parameter: Age (day) Value: 14
  misc_feature: MA Experiment 20000173 PARAMETER Experiment Name: At_42deg_Heat_P Parameter: Organism Value: A. thaliana
  misc_feature: MA Experiment 20000173 PARAMETER Experiment Name: At_42deg_Heat_P Parameter: Plant Line Value: WS
  misc_feature: MA Experiment 20000173 PARAMETER Experiment Name: At_42deg_Heat_P Parameter: Temperature (deg C) Value: 42 vs. 22
  misc_feature: MA Experiment 20000173 PARAMETER Experiment Name: At_42deg_Heat_P Parameter: Timepoint (hr) Value: 6
  misc_feature: MA Experiment 20000173 PARAMETER Experiment Name: At_42deg_Heat_P Parameter: Tissue Value: Aerial
  misc_feature: MA Experiment ID: 20000179 Result: Up-regulated in Transcription
  misc_feature: MA Experiment 20000179 PARAMETER Experiment Name: At_Germinating_Seeds_P Parameter: Age (hr) Value: 6 vs. 0
  misc_feature: MA Experiment 20000179 PARAMETER Experiment Name: At_Germinating_Seeds_P Parameter: Tissue Value: Germinating Seeds
  misc_feature: MA Experiment ID: 20000180 Result: Up-regulated in Transcription
  misc_feature: MA Experiment 20000180 PARAMETER Experiment Name: At_Germinating_Seeds_P Parameter: Age (hr) Value: 24 vs. 0
  misc_feature: MA Experiment 20000180 PARAMETER Experiment Name: At_Germinating_Seeds_P Parameter: Tissue Value: Germinating Seeds
  misc_feature: MA Experiment ID: 20000224 Result: Up-regulated in Transcription
  misc_feature: MA Experiment ID: 20000234 Result: Up-regulated in Transcription
  misc_feature: MA Experiment 20000234 PARAMETER Experiment Name: At_Siliques_P Parameter: Age (day) Value: 21
  misc_feature: MA Experiment 20000234 PARAMETER Experiment Name: At_Siliques_P Parameter: Organism Value: A. thaliana
  misc_feature: MA Experiment 20000234 PARAMETER Experiment Name: At_Siliques_P Parameter: Plant Line Value: WS
  misc_feature: MA Experiment 20000234 PARAMETER Experiment Name: At_Siliques_P Parameter: Tissue Value: Less Than 5mm Siliques vs. Whole Plant
  misc_feature: MA Experiment ID: 20000264 Result: Up-regulated in Transcription
  misc_feature: MA Experiment 20000264 PARAMETER Experiment Name: At_Open_Flower_P Parameter: Age (day) Value: 21
  misc_feature: MA Experiment 20000264 PARAMETER Experiment Name: At_Open_Flower_P Parameter: Plant Line Value: WS
  misc_feature: MA Experiment 20000264 PARAMETER Experiment Name: At_Open_Flower_P Parameter: Tissue Value: Open Flower vs. Whole Plant
  misc_feature: MA Experiment ID: 20000265 Result: Up-regulated in Transcription
  misc_feature: MA Experiment 20000265 PARAMETER Experiment Name: At_Open_Flower_P Parameter: Age (day) Value: 21
  misc_feature: MA Experiment 20000265 PARAMETER Experiment Name: At_Open_Flower_P Parameter: Plant Line Value: WS
  misc_feature: MA Experiment 20000265 PARAMETER Experiment Name: At_Open_Flower_P Parameter: Tissue Value: Closed Flower vs. Whole Plant
  misc_feature: MA Experiment ID: 20000437 Result: Down-regulated in Transcription
  misc_feature: MA Experiment 20000437 PARAMETER Experiment Name: At_Drought_P Parameter: Age (day) Value: 8
  misc_feature: MA Experiment 20000437 PARAMETER Experiment Name: At_Drought_P Parameter: Organism Value: A. thaliana
  misc_feature: MA Experiment 20000437 PARAMETER Experiment Name: At_Drought_P Parameter: Plant Line Value: WS
  misc_feature: MA Experiment 20000437 PARAMETER Experiment Name: At_Drought_P Parameter: Timepoint (hr) Value: 24
  misc_feature: MA Experiment 20000437 PARAMETER Experiment Name: At_Drought_P Parameter: Tissue Value: Whole Plant
  misc_feature: MA Experiment 20000437 PARAMETER Experiment Name: At_Drought_P Parameter: Treatment Value: Drought vs. No Drought
  misc_feature: MA Experiment ID: 20001247 Result: Down-regulated in Transcription
  misc_feature: MA Experiment 20001247 PARAMETER Experiment Name: At_Far-red-induction_P Parameter: Age (day) Value: 7
  misc_feature: MA Experiment 20001247 PARAMETER Experiment Name: At_Far-red-induction_P Parameter: Light Value: Far-red vs. White
  misc_feature: MA Experiment 20001247 PARAMETER Experiment Name: At_Far-red-induction_P Parameter: Organism Value: A. thaliana
  misc_feature: MA Experiment 20001247 PARAMETER Experiment Name: At_Far-red-induction_P Parameter: Plant Line Value: Columbia
  misc_feature: MA Experiment 20001247 PARAMETER Experiment Name: At_Far-red-induction_P Parameter: Timepoint (hr) Value: 1
  misc_feature: MA Experiment 20001247 PARAMETER Experiment Name: At_Far-red-induction_P Parameter: Tissue Value: Whole Plant
  misc_feature: MA Experiment ID: 20001451 Result: Down-regulated in Transcription
  misc_feature: MA Experiment 20001451 PARAMETER Experiment Name: At_Far-red-induction_P Parameter: Age (day) Value: 7
  misc_feature: MA Experiment 20001451 PARAMETER Experiment Name: At_Far-red-induction_P Parameter: Light Value: Far-red vs. White
  misc_feature: MA Experiment 20001451 PARAMETER Experiment Name: At_Far-red-induction_P Parameter: Organism Value: A. thaliana
  misc_feature: MA Experiment 20001451 PARAMETER Experiment Name: At_Far-red-induction_P Parameter: Plant Line Value: Columbia
  misc_feature: MA Experiment 20001451 PARAMETER Experiment Name: At_Far-red-induction_P Parameter: Timepoint (hr) Value: 24
  misc_feature: MA Experiment 20001451 PARAMETER Experiment Name: At_Far-red-induction_P Parameter: Tissue Value: Whole Plant
  misc_feature: MA Experiment ID: 20001555 Result: Down-regulated in Transcription
  misc_feature: MA Experiment 20001555 PARAMETER Experiment Name: At_Drought_Soil_Dry_P Parameter: Age (day) Value: 24
  misc_feature: MA Experiment 20001555 PARAMETER Experiment Name: At_Drought_Soil_Dry_P Parameter: Organism Value: A. thaliana
  misc_feature: MA Experiment 20001555 PARAMETER Experiment Name: At_Drought_Soil_Dry_P Parameter: Plant Line Value: WS
  misc_feature: MA Experiment 20001555 PARAMETER Experiment Name: At_Drought_Soil_Dry_P Parameter: Post Timepoint (hr) Value: None
  misc_feature: MA Experiment 20001555 PARAMETER Experiment Name: At_Drought_Soil_Dry_P Parameter: Post-Treatment Value: None
  misc_feature: MA Experiment 20001555 PARAMETER Experiment Name: At_Drought_Soil_Dry_P Parameter: Timepoint (day) Value: 10
  misc_feature: MA Experiment 20001555 PARAMETER Experiment Name: At_Drought_Soil_Dry_P Parameter: Treatment Value: Drought vs. No Drought
  misc_feature: MA Experiment ID: 20001556 Result: Down-regulated in Transcription
  misc_feature: MA Experiment 20001556 PARAMETER Experiment Name: At_Drought_Soil_Dry_P Parameter: Age (day) Value: 26
  misc_feature: MA Experiment 20001556 PARAMETER Experiment Name: At_Drought_Soil_Dry_P Parameter: Organism Value: A. thaliana
  misc_feature: MA Experiment 20001556 PARAMETER Experiment Name: At_Drought_Soil_Dry_P Parameter: Plant Line Value: WS
  misc_feature: MA Experiment 20001556 PARAMETER Experiment Name: At_Drought_Soil_Dry_P Parameter: Post Timepoint (hr) Value: None
  misc_feature: MA Experiment 20001556 PARAMETER Experiment Name: At_Drought_Soil_Dry_P Parameter: Post-Treatment Value: None
  misc_feature: MA Experiment 20001556 PARAMETER Experiment Name: At_Drought_Soil_Dry_P Parameter: Timepoint (day) Value: 12
  misc_feature: MA Experiment 20001556 PARAMETER Experiment Name: At_Drought_Soil_Dry_P Parameter: Treatment Value: Drought vs. No Drought
  misc_feature: MA Experiment ID: 20001557 Result: Down-regulated in Transcription
  misc_feature: MA Experiment 20001557 PARAMETER Experiment Name: At_Drought_Soil_Dry_P Parameter: Age (day) Value: 27
  misc_feature: MA Experiment 20001557 PARAMETER Experiment Name: At_Drought_Soil_Dry_P Parameter: Organism Value: A. thaliana
  misc_feature: MA Experiment 20001557 PARAMETER Experiment Name: At_Drought_Soil_Dry_P Parameter: Plant Line Value: WS
  misc_feature: MA Experiment 20001557 PARAMETER Experiment Name: At_Drought_Soil_Dry_P Parameter: Post Timepoint (hr) Value: 3
  misc_feature: MA Experiment 20001557 PARAMETER Experiment Name: At_Drought_Soil_Dry_P Parameter: Post-Treatment Value: Re-Water vs. No Drought
  misc_feature: MA Experiment 20001557 PARAMETER Experiment Name: At_Drought_Soil_Dry_P Parameter: Timepoint (day) Value: 13
  misc_feature: MA Experiment 20001557 PARAMETER Experiment Name: At_Drought_Soil_Dry_P Parameter: Treatment Value: Drought vs. No Drought
  misc_feature: MA Experiment ID: 20001905 Result: Down-regulated in Transcription
  misc_feature: MA Experiment 20001905 PARAMETER Experiment Name: At_Drought_Reproduction_P Parameter: Age (day) Value: 40
  misc_feature: MA Experiment 20001905 PARAMETER Experiment Name: At_Drought_Reproduction_P Parameter: Organism Value: A. thaliana
  misc_feature: MA Experiment 20001905 PARAMETER Experiment Name: At_Drought_Reproduction_P Parameter: Plant Line Value: WS
  misc_feature: MA Experiment 20001905 PARAMETER Experiment Name: At_Drought_Reproduction_P Parameter: Timepoint (day) Value: 10
  misc_feature: MA Experiment 20001905 PARAMETER Experiment Name: At_Drought_Reproduction_P Parameter: Tissue Value: Rosettes
  misc_feature: MA Experiment 20001905 PARAMETER Experiment Name: At_Drought_Reproduction_P Parameter: Treatment Value: Drought vs. No Drought
gaattctcgaacacgaaaaatattcacagatattttcgatcttaaccgagaaaaaggaagaaatggctggaccatcgacaacttcaaacgcaccaaagcagaggaagagagtcgaagccgagactagcagcaacacttctactaccttacgtcgcgctaaagacggaagcgctttcgctctctgtgaaggatgtaacaagagtgtagctgtagcgcttataagcatgcacaattgcagtctcgatgctaagatcagagtgaatctcgaagcacaagttgtggagacacaagcagaggctaagaagaagcctgcagagaagaagaagacaacatctgatggacctaagccaaagagacttaagaaaaccaatgatgagaagaagagctcgtctacttcaaacaagcccaagcgacctcttaccgctttctttatcttcatgagtgacttccgtaaaacgtttaagtcagagcataatggttcgttagctaaggatgctgcaaagatcggtggtgagaagtggaagtctttgactgaggaagagaagaaagtttatctggataaagctgctgaacttaaggcagagtataacaagtcactggaaagtaatgatgctgatgaggaagaggaagatgaggagaagcaatctgatgatgttgatgatgctgaggagaaacaagttgacgatgatgatgaagttgaggagaaagaagttgagaacacagatgatgacaagaaagaagctgagggtaaagaagaggaggaagaagagattttggatgactactagaaatgatatgctcgtttttgtggttctagtcttactgaaatcggtttatctctaatcgttgcgatgcattgtaaatgaagcctttattagtgaaagtagtttatttgaagttaagttgtgagcaagtggtttttttgtagttcactgaaatggtaatgccttttgtttaaacaagtaatgaagcttatgtttttcgtttt

SEQ ID NO: 43589 - protein, 261 aa, Arabidopsis thaliana
  peptide (1)..(261): Ceres Seq. ID no. 13492489
  misc_feature (135)..(203): Pfam Name: HMG (high mobility group) box Pfam Description: HMG (high mobility group) box
  misc_feature (102)..(243): Homolog of NCBI NO: 18394900 NR Description: expressed protein [Arabidopsis thaliana]
  misc_feature (106)..(229): Homolog of NCBI NO: 7446212 NR Description: high mobility group protein - potato
  misc_feature (89)..(243): Homolog of NCBI NO: 729737 NR Description: HMG1/2-LIKE PROTEIN
  misc_feature (106)..(243): Homolog of NCBI NO: 1052956 NR Description: high mobility group protein 2 HMG2 [Ipomoea nil]
  misc_feature (93)..(256): Homolog of NCBI NO: 15231065 NR Description: high mobility group protein 2-related
  misc_feature (52)..(111): Homolog of NCBI NO: 30688969 NR Description: expressed protein [Arabidopsis thaliana]
  misc_feature (126)..(231): Homolog of NCBI NO: 30688969 NR Description: expressed protein [Arabidopsis thaliana]
  misc_feature (21)..(242): Homolog of NCBI NO: 38637289 NR Description: putative HMG type nucleosome/chromatin assembly
  misc_feature (21)..(261): Homolog of NCBI NO: 9759080 NR Description: gene_id:K19M13.4~unknown protein [Arabidopsis
  misc_feature (21)..(261): Homolog of NCBI NO: 18420676 NR Description: expressed protein [Arabidopsis thaliana]
ILEHEKYSQIFSILTEKKEEMAGPSTTSNAPKQRKRVEAETSSNTSTTLRRAKDGSAFALCEGCNKSVAVALISMHNCSLDAKIRVNLEAQVVETQAEAKKKPAEKKKTTSDGPKPKRLKKTNDEKKSSSTSNKPKRPLTAFFIFMSDFRKTFKSEHNGSLAKDAAKIGGEKWKSLTEEEKKVYLDKAAELKAEYNKSLESNDADEEEEDEEKQSDDVDDAEEKQVDDDDEVEEKEVENTDDDKKEAEGKEEEEEEILDDY

SEQ ID NO: 43590 - protein, 241 aa, Arabidopsis thaliana
  peptide (1)..(241): Ceres Seq. ID no. 13492490
  misc_feature (115)..(183): Pfam Name: HMG (high mobility group) box Pfam Description: HMG (high mobility group) box
  misc_feature (82)..(223): Homolog of NCBI NO: 18394900 NR Description: expressed protein [Arabidopsis thaliana]
  misc_feature (86)..(209): Homolog of NCBI NO: 7446212 NR Description: high mobility group protein - potato
  misc_feature (69)..(223): Homolog of NCBI NO: 729737 NR Description: HMG1/2-LIKE PROTEIN
  misc_feature (86)..(223): Homolog of NCBI NO: 1052956 NR Description: high mobility group protein 2 HMG2 [Ipomoea nil]
  misc_feature (73)..(236): Homolog of NCBI NO: 15231065 NR Description: high mobility group protein 2-related
  misc_feature (32)..(91): Homolog of NCBI NO: 30688969 NR Description: expressed protein [Arabidopsis thaliana]
  misc_feature (106)..(211): Homolog of NCBI NO: 30688969 NR Description: expressed protein [Arabidopsis thaliana]
  misc_feature (1)..(222): Homolog of NCBI NO: 38637289 NR Description: putative HMG type nucleosome/chromatin assembly
  misc_feature (1)..(241): Homolog of NCBI NO: 9759080 NR Description: gene_id:K19M13.4~unknown protein [Arabidopsis
  misc_feature (1)..(241): Homolog of NCBI NO: 18420676 NR Description: expressed protein [Arabidopsis thaliana]
MAGPSTTSNAPKQRKRVEAETSSNTSTTLRRAKDGSAFALCEGCNKSVAVALISMHNCSLDAKIRVNLEAQVVETQAEAKKKPAEKKKTTSDGPKPKRLKKTNDEKKSSSTSNKPKRPLTAFFIFMSDFRKTFKSEHNGSLAKDAAKIGGEKWKSLTEEEKKVYLDKAAELKAEYNKSLESNDADEEEEDEEKQSDDVDDAEEKQVDDDDEVEEKEVENTDDDKKEAEGKEEEEEEILDDY

SEQ ID NO: 43591 - protein, 187 aa, Arabidopsis thaliana
  peptide (1)..(187): Ceres Seq. ID no. 13492491
  misc_feature (61)..(129): Pfam Name: HMG (high mobility group) box Pfam Description: HMG (high mobility group) box
  misc_feature (28)..(169): Homolog of NCBI NO: 18394900 NR Description: expressed protein [Arabidopsis thaliana]
  misc_feature (32)..(155): Homolog of NCBI NO: 7446212 NR Description: high mobility group protein - potato
  misc_feature (15)..(169): Homolog of NCBI NO: 729737 NR Description: HMG1/2-LIKE PROTEIN
  misc_feature (32)..(169): Homolog of NCBI NO: 1052956 NR Description: high mobility group protein 2 HMG2 [Ipomoea nil]
  misc_feature (19)..(182): Homolog of NCBI NO: 15231065 NR Description: high mobility group protein 2-related
  misc_feature (1)..(37): Homolog of NCBI NO: 30688969 NR Description: expressed protein [Arabidopsis thaliana]
  misc_feature (52)..(157): Homolog of NCBI NO: 30688969 NR Description: expressed protein [Arabidopsis thaliana]
  misc_feature (1)..(168): Homolog of NCBI NO: 38637289 NR Description: putative HMG type nucleosome/chromatin assembly
  misc_feature (1)..(187): Homolog of NCBI NO: 9759080 NR Description: gene_id:K19M13.4~unknown protein [Arabidopsis
  misc_feature (1)..(187): Homolog of NCBI NO: 18420676 NR Description: expressed protein [Arabidopsis thaliana]
MHNCSLDAKIRVNLEAQVVETQAEAKKKPAEKKKTTSDGPKPKRLKKTNDEKKSSSTSNKPKRPLTAFFIFMSDFRKTFKSEHNGSLAKDAAKIGGEKWKSLTEEEKKVYLDKAAELKAEYNKSLESNDADEEEEDEEKQSDDVDDAEEKQVDDDDEVEEKEVENTDDDKKEAEGKEEEEEEILDDY

SEQ ID NO: 43592 - DNA, 1610 bp, Arabidopsis thaliana; identical to SEQ ID NO: 39634
  misc_feature (1)..(1610): Ceres Seq. ID no. 13580607
  misc_feature: MA Experiment ID: 20000179 Result: Down-regulated in Transcription
  misc_feature: MA Experiment 20000179 PARAMETER Experiment Name: At_Germinating_Seeds_P Parameter: Age (hr) Value: 6 vs. 0
  misc_feature: MA Experiment 20000179 PARAMETER Experiment Name: At_Germinating_Seeds_P Parameter: Tissue Value: Germinating Seeds
  misc_feature: MA Experiment ID: 20000180 Result: Down-regulated in Transcription
  misc_feature: MA Experiment 20000180 PARAMETER Experiment Name: At_Germinating_Seeds_P Parameter: Age (hr) Value: 24 vs. 0
  misc_feature: MA Experiment 20000180 PARAMETER Experiment Name: At_Germinating_Seeds_P Parameter: Tissue Value: Germinating Seeds
  misc_feature: MA Experiment ID: 20000182 Result: Up-regulated in Transcription
  misc_feature: MA Experiment 20000182 PARAMETER Experiment Name: At_2mM_SA_P Parameter: Age (day) Value: 14
  misc_feature: MA Experiment 20000182 PARAMETER Experiment Name: At_2mM_SA_P Parameter: Organism Value: A. thaliana
  misc_feature: MA Experiment 20000182 PARAMETER Experiment Name: At_2mM_SA_P Parameter: Plant Line Value: WS
  misc_feature: MA Experiment 20000182 PARAMETER Experiment Name: At_2mM_SA_P Parameter: Timepoint (hr) Value: 6
  misc_feature: MA Experiment 20000182 PARAMETER Experiment Name: At_2mM_SA_P Parameter: Tissue Value: Aerial
  misc_feature: MA Experiment 20000182 PARAMETER Experiment Name: At_2mM_SA_P Parameter: Treatment Value: 2mM SA vs. No Treatment
  misc_feature: MA Experiment ID: 20000234 Result: Down-regulated in Transcription
  misc_feature: MA Experiment 20000234 PARAMETER Experiment Name: At_Siliques_P Parameter: Age (day) Value: 21
  misc_feature: MA Experiment 20000234 PARAMETER Experiment Name: At_Siliques_P Parameter: Organism Value: A. thaliana
  misc_feature: MA Experiment 20000234 PARAMETER Experiment Name: At_Siliques_P Parameter: Plant Line Value: WS
  misc_feature: MA Experiment 20000234 PARAMETER Experiment Name: At_Siliques_P Parameter: Tissue Value: Less Than 5mm Siliques vs. Whole Plant
  misc_feature: MA Experiment ID: 20000235 Result: Down-regulated in Transcription
  misc_feature: MA Experiment 20000235 PARAMETER Experiment Name: At_Siliques_P Parameter: Age (day) Value: 21
  misc_feature: MA Experiment 20000235 PARAMETER Experiment Name: At_Siliques_P Parameter: Organism Value: A. thaliana
  misc_feature: MA Experiment 20000235 PARAMETER Experiment Name: At_Siliques_P Parameter: Plant Line Value: WS
  misc_feature: MA Experiment 20000235 PARAMETER Experiment Name: At_Siliques_P Parameter: Tissue Value: 5-10mm Siliques vs. Whole Plant
  misc_feature: MA Experiment ID: 20000267 Result: Down-regulated in Transcription
  misc_feature: MA Experiment 20000267 PARAMETER Experiment Name: At_Drought_P Parameter: Age (day) Value: 7
  misc_feature: MA Experiment 20000267 PARAMETER Experiment Name: At_Drought_P Parameter: Organism Value: A. thaliana
  misc_feature: MA Experiment 20000267 PARAMETER Experiment Name: At_Drought_P Parameter: Plant Line Value: WS
  misc_feature: MA Experiment 20000267 PARAMETER Experiment Name: At_Drought_P Parameter: Timepoint (hr) Value: 6
  misc_feature: MA Experiment 20000267 PARAMETER Experiment Name: At_Drought_P Parameter: Tissue Value: Whole Plant
  misc_feature: MA Experiment 20000267 PARAMETER Experiment Name: At_Drought_P Parameter: Treatment Value: Drought vs. No Drought
  misc_feature: MA Experiment ID: 20000308 Result: Down-regulated in Transcription
  misc_feature: MA Experiment 20000308 PARAMETER Experiment Name: At_100mM_NaCl__P Parameter: Age (day) Value: 17
  misc_feature: MA Experiment 20000308 PARAMETER Experiment Name: At_100mM_NaCl__P Parameter: Organism Value: A. thaliana
  misc_feature: MA Experiment 20000308 PARAMETER Experiment Name: At_100mM_NaCl__P Parameter: Plant Line Value: WS
  misc_feature: MA Experiment 20000308 PARAMETER Experiment Name: At_100mM_NaCl__P Parameter: Timepoint (hr) Value: 72
  misc_feature: MA Experiment 20000308 PARAMETER Experiment Name: At_100mM_NaCl__P Parameter: Tissue Value: Whole Plant
  misc_feature: MA Experiment 20000308 PARAMETER Experiment Name: At_100mM_NaCl__P Parameter: Treatment Value: 100mM NaCl vs. No Treatment
  misc_feature: MA Experiment ID: 20000456 Result: Up-regulated in Transcription
  misc_feature: MA Experiment 20000456 PARAMETER Experiment Name: At_100uM_BA_P Parameter: Age (day) Value: 14
  misc_feature: MA Experiment 20000456 PARAMETER Experiment Name: At_100uM_BA_P Parameter: Organism Value: A. thaliana
  misc_feature: MA Experiment 20000456 PARAMETER Experiment Name: At_100uM_BA_P Parameter: Plant Line Value: WS
  misc_feature: MA Experiment 20000456 PARAMETER Experiment Name: At_100uM_BA_P Parameter: Timepoint (hr) Value: 6
  misc_feature: MA Experiment 20000456 PARAMETER Experiment Name: At_100uM_BA_P Parameter: Tissue Value: Aerial
  misc_feature: MA Experiment 20000456 PARAMETER Experiment Name: At_100uM_BA_P Parameter: Treatment Value: 100uM BA vs. No Treatment
  misc_feature: MA Experiment ID: 20000527 Result: Down-regulated in Transcription
  misc_feature: MA Experiment 20000527 PARAMETER Experiment Name: At_10percent_PEG_P Parameter: Age (day) Value: 20
  misc_feature: MA Experiment 20000527 PARAMETER Experiment Name: At_10percent_PEG_P Parameter: Organism Value: A. thaliana
  misc_feature: MA Experiment 20000527 PARAMETER Experiment Name: At_10percent_PEG_P Parameter: Plant Line Value: WS
  misc_feature: MA Experiment 20000527 PARAMETER Experiment Name: At_10percent_PEG_P Parameter: Timepoint (day) Value: 20
  misc_feature: MA Experiment 20000527 PARAMETER Experiment Name: At_10percent_PEG_P Parameter: Tissue Value: Whole Plant
  misc_feature: MA Experiment 20000527 PARAMETER Experiment Name: At_10percent_PEG_P Parameter: Treatment Value: 10percent PEG vs. No Treatment
  misc_feature: MA Experiment ID: 20000709 Result: Up-regulated in Transcription
  misc_feature: MA Experiment 20000709 PARAMETER Experiment Name: At_15mM_NH4NO3_L-to-H_P Parameter: Age (hr) Value: 14
  misc_feature: MA Experiment 20000709 PARAMETER Experiment Name: At_15mM_NH4NO3_L-to-H_P Parameter: Organism Value: A. thaliana
  misc_feature: MA Experiment 20000709 PARAMETER Experiment Name: At_15mM_NH4NO3_L-to-H_P Parameter: Plant Line Value: WS
  misc_feature: MA Experiment 20000709 PARAMETER Experiment Name: At_15mM_NH4NO3_L-to-H_P Parameter: Timepoint (hr) Value: 4
  misc_feature: MA Experiment 20000709 PARAMETER Experiment Name: At_15mM_NH4NO3_L-to-H_P Parameter: Tissue Value: Aerial
  misc_feature: MA Experiment 20000709 PARAMETER Experiment Name: At_15mM_NH4NO3_L-to-H_P Parameter: Treatment Value: 15mM NH4NO3 vs. 30mM Mannitol
  misc_feature: MA Experiment ID: 20000794 Result: Up-regulated in Transcription
  misc_feature: MA Experiment 20000794 PARAMETER Experiment Name: At_Petals_P Parameter: Age (day) Value: 23-25 days
  misc_feature: MA Experiment 20000794 PARAMETER Experiment Name: At_Petals_P Parameter: Plant Line Value: WS
  misc_feature: MA Experiment 20000794 PARAMETER Experiment Name: At_Petals_P Parameter: Tissue Value: Petals vs. Whole plant
  misc_feature: MA Experiment ID: 20001247 Result: Down-regulated in Transcription
  misc_feature: MA Experiment 20001247 PARAMETER Experiment Name: At_Far-red-induction_P Parameter: Age (day) Value: 7
  misc_feature: MA Experiment 20001247 PARAMETER Experiment Name: At_Far-red-induction_P Parameter: Light Value: Far-red vs. White
  misc_feature: MA Experiment 20001247 PARAMETER Experiment Name: At_Far-red-induction_P Parameter: Organism Value: A. thaliana
  misc_feature: MA Experiment 20001247 PARAMETER Experiment Name: At_Far-red-induction_P Parameter: Plant Line Value: Columbia
  misc_feature: MA Experiment 20001247 PARAMETER Experiment Name: At_Far-red-induction_P Parameter: Timepoint (hr) Value: 1
  misc_feature: MA Experiment 20001247 PARAMETER Experiment Name: At_Far-red-induction_P Parameter: Tissue Value: Whole Plant
  misc_feature: MA Experiment ID: 20001248 Result: Down-regulated in Transcription
  misc_feature: MA Experiment 20001248 PARAMETER Experiment Name: At_Far-red-induction_P Parameter: Age (day) Value: 7
  misc_feature: MA Experiment 20001248 PARAMETER Experiment Name: At_Far-red-induction_P Parameter: Light Value: Far-red vs. White
  misc_feature: MA Experiment 20001248 PARAMETER Experiment Name: At_Far-red-induction_P Parameter: Organism Value: A. thaliana
  misc_feature: MA Experiment 20001248 PARAMETER Experiment Name: At_Far-red-induction_P Parameter: Plant Line Value: Columbia
  misc_feature: MA Experiment 20001248 PARAMETER Experiment Name: At_Far-red-induction_P Parameter: Timepoint (hr) Value: 4
  misc_feature: MA Experiment 20001248 PARAMETER Experiment Name: At_Far-red-induction_P Parameter: Tissue Value: Whole Plant
  misc_feature: MA Experiment ID: 20001450 Result: Down-regulated in Transcription
  misc_feature: MA Experiment 20001450 PARAMETER Experiment Name: At_Far-red-induction_P Parameter: Age (day) Value: 7
  misc_feature: MA Experiment 20001450 PARAMETER Experiment Name: At_Far-red-induction_P Parameter: Light Value: Far-red vs. White
  misc_feature: MA Experiment 20001450 PARAMETER Experiment Name: At_Far-red-induction_P Parameter: Organism Value: A. thaliana
  misc_feature: MA Experiment 20001450 PARAMETER Experiment Name: At_Far-red-induction_P Parameter: Plant Line Value: Columbia
  misc_feature: MA Experiment 20001450 PARAMETER Experiment Name: At_Far-red-induction_P Parameter: Timepoint (hr) Value: 8
  misc_feature: MA Experiment 20001450 PARAMETER Experiment Name: At_Far-red-induction_P Parameter: Tissue Value: Whole Plant
  misc_feature: MA Experiment ID: 20001451 Result: Down-regulated in Transcription
  misc_feature: MA Experiment 20001451 PARAMETER Experiment Name: At_Far-red-induction_P Parameter: Age (day) Value: 7
  misc_feature: MA Experiment 20001451 PARAMETER Experiment Name: At_Far-red-induction_P Parameter: Light Value: Far-red vs. White
  misc_feature: MA Experiment 20001451 PARAMETER Experiment Name: At_Far-red-induction_P Parameter: Organism Value: A. thaliana
  misc_feature: MA Experiment 20001451 PARAMETER Experiment Name: At_Far-red-induction_P Parameter: Plant Line Value: Columbia
  misc_feature: MA Experiment 20001451 PARAMETER Experiment Name: At_Far-red-induction_P Parameter: Timepoint (hr) Value: 24
  misc_feature: MA Experiment 20001451 PARAMETER Experiment Name: At_Far-red-induction_P Parameter: Tissue Value: Whole Plant
  misc_feature: MA Experiment ID: 20001557 Result: Up-regulated in Transcription
  misc_feature: MA Experiment 20001557 PARAMETER Experiment Name: At_Drought_Soil_Dry_P Parameter: Age (day) Value: 27
  misc_feature: MA Experiment 20001557 PARAMETER Experiment Name: At_Drought_Soil_Dry_P Parameter: Organism Value: A. thaliana
  misc_feature: MA Experiment 20001557 PARAMETER Experiment Name: At_Drought_Soil_Dry_P Parameter: Plant Line Value: WS
  misc_feature: MA Experiment 20001557 PARAMETER Experiment Name: At_Drought_Soil_Dry_P Parameter: Post Timepoint (hr) Value: 3
  misc_feature: MA Experiment 20001557 PARAMETER Experiment Name: At_Drought_Soil_Dry_P Parameter: Post-Treatment Value: Re-Water vs. No Drought
  misc_feature: MA Experiment 20001557 PARAMETER Experiment Name: At_Drought_Soil_Dry_P Parameter: Timepoint (day) Value: 13
  misc_feature: MA Experiment 20001557 PARAMETER Experiment Name: At_Drought_Soil_Dry_P Parameter: Treatment Value: Drought vs. No Drought
  misc_feature: MA Experiment ID: 20001560 Result: Up-regulated in Transcription
  misc_feature: MA Experiment 20001560 PARAMETER Experiment Name: At_Drought_Soil_Dry_P Parameter: Age (day) Value: 28
  misc_feature: MA Experiment 20001560 PARAMETER Experiment Name: At_Drought_Soil_Dry_P Parameter: Organism Value: A. thaliana
  misc_feature: MA Experiment 20001560 PARAMETER Experiment Name: At_Drought_Soil_Dry_P Parameter: Plant Line Value: WS
  misc_feature: MA Experiment 20001560 PARAMETER Experiment Name: At_Drought_Soil_Dry_P Parameter: Post Timepoint (hr) Value: None
  misc_feature: MA Experiment 20001560 PARAMETER Experiment Name: At_Drought_Soil_Dry_P Parameter: Post-Treatment Value: None
  misc_feature: MA Experiment 20001560 PARAMETER Experiment Name: At_Drought_Soil_Dry_P Parameter: Timepoint (day) Value: 14
  misc_feature: MA Experiment 20001560 PARAMETER Experiment Name: At_Drought_Soil_Dry_P Parameter: Treatment Value: Drought vs. No Drought
  misc_feature: MA Experiment ID: 20001905 Result: Up-regulated in Transcription
  misc_feature: MA Experiment 20001905 PARAMETER Experiment Name: At_Drought_Reproduction_P Parameter: Age (day) Value: 40
  misc_feature: MA Experiment 20001905 PARAMETER Experiment Name: At_Drought_Reproduction_P Parameter: Organism Value: A. thaliana
  misc_feature: MA Experiment 20001905 PARAMETER Experiment Name: At_Drought_Reproduction_P Parameter: Plant Line Value: WS
  misc_feature: MA Experiment 20001905 PARAMETER Experiment Name: At_Drought_Reproduction_P Parameter: Timepoint (day) Value: 10
  misc_feature: MA Experiment 20001905 PARAMETER Experiment Name: At_Drought_Reproduction_P Parameter: Tissue Value: Rosettes
  misc_feature: MA Experiment 20001905 PARAMETER Experiment Name: At_Drought_Reproduction_P Parameter: Treatment Value: Drought vs. No Drought
  misc_feature: MA Experiment ID: 20001908 Result: Up-regulated in Transcription
  misc_feature: MA Experiment 20001908 PARAMETER Experiment Name: At_Drought_Reproduction_P Parameter: Age (day) Value: 40
  misc_feature: MA Experiment 20001908 PARAMETER Experiment Name: At_Drought_Reproduction_P Parameter: Organism Value: A. thaliana
  misc_feature: MA Experiment 20001908 PARAMETER Experiment Name: At_Drought_Reproduction_P Parameter: Plant Line Value: WS
  misc_feature: MA Experiment 20001908 PARAMETER Experiment Name: At_Drought_Reproduction_P Parameter: Timepoint (day) Value: 10
  misc_feature: MA Experiment 20001908 PARAMETER Experiment Name: At_Drought_Reproduction_P Parameter: Tissue Value: Siliques
  misc_feature: MA Experiment 20001908 PARAMETER Experiment Name: At_Drought_Reproduction_P Parameter: Treatment Value: Drought vs. No Drought

SEQ ID NO: 43593 - protein, 287 aa, Arabidopsis thaliana; identical to SEQ ID NO: 39635
  peptide (1)..(287): Ceres Seq. ID no. 13580608
  misc_feature (1)..(273): Pfam Name: UDP-glucoronosyl and UDP-glucosyl transferase Pfam Description: UDP-glucoronosyl and UDP-glucosyl transferase
  misc_feature (1)..(273): Pfam Name: UDP-glucoronosyl and UDP-glucosyl transferase Pfam Description: UDP-glucoronosyl and UDP-glucosyl transferase
  misc_feature (1)..(273): Pfam Name: UDP-glucoronosyl and UDP-glucosyl transferase Pfam Description: UDP-glucoronosyl and UDP-glucosyl transferase
  misc_feature (1)..(269): Homolog of NCBI NO: 4115559 NR Description: UDP-glucose:anthocysnin 5-O-glucosyltransferase
  misc_feature (3)..(268): Homolog of NCBI NO: 16604440 NR Description: AT4g15550/dl3815c [Arabidopsis thaliana]
  misc_feature (3)..(268): Homolog of NCBI NO: 7433892 NR Description: hypothetical protein - Arabidopsis thaliana
  misc_feature (3)..(269): Homolog of NCBI NO: 6683052 NR Description: anthocyanin 5-O-glucosyltransferase [Petunia x
  misc_feature (3)..(273): Homolog of NCBI NO: 14192682 NR Description: cold-induced glucosyl transferase [Solanum
  misc_feature (1)..(269): Homolog of NCBI NO: 4115559 NR Description: UDP-glucose:anthocysnin 5-O-glucosyltransferase
  misc_feature (3)..(268): Homolog of NCBI NO: 7433892 NR Description: hypothetical protein - Arabidopsis thaliana
  misc_feature (3)..(273): Homolog of NCBI NO: 14192682 NR Description: cold-induced glucosyl transferase [Solanum
  misc_feature (3)..(269): Homolog of NCBI NO: 6683052 NR Description: anthocyanin 5-O-glucosyltransferase [Petunia x
  misc_feature (3)..(268): Homolog of NCBI NO: 7433892 NR Description: hypothetical protein - Arabidopsis thaliana
  misc_feature (3)..(268): Homolog of NCBI NO: 16604440 NR Description: AT4g15550/dl3815c [Arabidopsis thaliana]
  misc_feature (1)..(269): Homolog of NCBI NO: 4115559 NR Description: UDP-glucose:anthocysnin 5-O-glucosyltransferase
  misc_feature (1)..(287): Homolog of NCBI NO: 18390540 NR Description: UDP-glucose transferase(UGT1) [Arabidopsis
  misc_feature (1)..(269): Homolog of NCBI NO: 15220556 NR Description: glycosyltransferase family [Arabidopsis thaliana]
  misc_feature (3)..(268): Homolog of NCBI NO: 18414478 NR Description: UDP-glucose:indole-3-acetate
  misc_feature (3)..(268): Homolog of NCBI NO: 2149127 NR Description: UDP-glucose:indole-3-acetate
  misc_feature (3)..(269): Homolog of NCBI NO: 20146093 NR Description: glucosyltransferase NTGT2 [Nicotiana tabacum]
  misc_feature (1)..(287): Homolog of NCBI NO: 18390540 NR Description: UDP-glucose transferase(UGT1) [Arabidopsis
  misc_feature (1)..(269): Homolog of NCBI NO: 15220556 NR Description: glycosyltransferase family [Arabidopsis thaliana]
  misc_feature (3)..(268): Homolog of NCBI NO: 18414478 NR Description: UDP-glucose:indole-3-acetate
  misc_feature (3)..(268): Homolog of NCBI NO: 2149127 NR Description: UDP-glucose:indole-3-acetate
  misc_feature (3)..(269): Homolog of NCBI NO: 20146093 NR Description: glucosyltransferase NTGT2 [Nicotiana tabacum]
  misc_feature (3)..(273): Homolog of NCBI NO: 14192682 NR Description: cold-induced glucosyl transferase [Solanum
  misc_feature (3)..(269): Homolog of NCBI NO: 6683052 NR Description: anthocyanin 5-O-glucosyltransferase [Petunia x
  misc_feature (3)..(268): Homolog of NCBI NO: 16604440 NR Description: AT4g15550/dl3815c [Arabidopsis thaliana]
  misc_feature (3)..(269): Homolog of NCBI NO: 20146093 NR Description: glucosyltransferase NTGT2 [Nicotiana tabacum]
  misc_feature (3)..(268): Homolog of NCBI NO: 2149127 NR Description: UDP-glucose:indole-3-acetate
  misc_feature (3)..(268): Homolog of NCBI NO: 18414478 NR Description: UDP-glucose:indole-3-acetate
  misc_feature (1)..(269): Homolog of NCBI NO: 15220556 NR Description: glycosyltransferase family [Arabidopsis thaliana]
  misc_feature (1)..(287): Homolog of NCBI NO: 18390540 NR Description: UDP-glucose transferase(UGT1) [Arabidopsis

SEQ ID NO: 43594 - protein, 282 aa, Arabidopsis thaliana; identical to SEQ ID NO: 39636
  peptide (1)..(282): Ceres Seq. ID no. 13580609
  misc_feature (1)..(268): Pfam Name: UDP-glucoronosyl and UDP-glucosyl transferase Pfam Description: UDP-glucoronosyl and UDP-glucosyl transferase
  misc_feature (1)..(268): Pfam Name: UDP-glucoronosyl and UDP-glucosyl transferase Pfam Description: UDP-glucoronosyl and UDP-glucosyl transferase
  misc_feature (1)..(268): Pfam Name: UDP-glucoronosyl and UDP-glucosyl transferase Pfam Description: UDP-glucoronosyl and UDP-glucosyl transferase
  misc_feature (1)..(264): Homolog of NCBI NO: 4115559 NR Description: UDP-glucose:anthocysnin 5-O-glucosyltransferase
  misc_feature (1)..(263): Homolog of NCBI NO: 16604440 NR Description: AT4g15550/dl3815c [Arabidopsis thaliana]
  misc_feature (1)..(263): Homolog of NCBI NO: 7433892 NR Description: hypothetical protein - Arabidopsis thaliana
  misc_feature (1)..(264): Homolog of NCBI NO: 6683052 NR Description: anthocyanin 5-O-glucosyltransferase [Petunia x
  misc_feature (1)..(268): Homolog of NCBI NO: 14192682 NR Description: cold-induced glucosyl transferase [Solanum
  misc_feature (1)..(264): Homolog of NCBI NO: 4115559 NR Description: UDP-glucose:anthocysnin 5-O-glucosyltransferase
  misc_feature (1)..(263): Homolog of NCBI NO: 7433892 NR Description: hypothetical protein - Arabidopsis thaliana
  misc_feature (1)..(268): Homolog of NCBI NO: 14192682 NR Description: cold-induced glucosyl transferase [Solanum
  misc_feature (1)..(264): Homolog of NCBI NO: 6683052 NR Description: anthocyanin 5-O-glucosyltransferase [Petunia x
  misc_feature (1)..(263): Homolog of NCBI NO: 7433892 NR Description: hypothetical protein - Arabidopsis thaliana
  misc_feature (1)..(263): Homolog of NCBI NO: 16604440 NR Description: AT4g15550/dl3815c [Arabidopsis thaliana]
  misc_feature (1)..(264): Homolog of NCBI NO: 4115559 NR Description: UDP-glucose:anthocysnin 5-O-glucosyltransferase
  misc_feature (1)..(282): Homolog of NCBI NO: 18390540 NR Description: UDP-glucose transferase(UGT1) [Arabidopsis
  misc_feature (1)..(264): Homolog of NCBI NO: 15220556 NR Description: glycosyltransferase family [Arabidopsis thaliana]
  misc_feature (1)..(263): Homolog of NCBI NO: 18414478 NR Description: UDP-glucose:indole-3-acetate
  misc_feature (1)..(263): Homolog of NCBI NO: 2149127 NR Description: UDP-glucose:indole-3-acetate
  misc_feature (1)..(264): Homolog of NCBI NO: 20146093 NR Description: glucosyltransferase NTGT2 [Nicotiana tabacum]
  misc_feature (1)..(282): Homolog of NCBI NO: 18390540 NR Description: UDP-glucose transferase(UGT1) [Arabidopsis
  misc_feature (1)..(264): Homolog of NCBI NO: 15220556 NR Description: glycosyltransferase family [Arabidopsis thaliana]
  misc_feature (1)..(263): Homolog of NCBI NO: 18414478 NR Description: UDP-glucose:indole-3-acetate
  misc_feature (1)..(263): Homolog of NCBI NO: 2149127 NR Description: UDP-glucose:indole-3-acetate
  misc_feature (1)..(264): Homolog of NCBI NO: 20146093 NR Description: glucosyltransferase NTGT2 [Nicotiana tabacum]
  misc_feature (1)..(268): Homolog of NCBI NO: 14192682 NR Description: cold-induced glucosyl transferase [Solanum
  misc_feature (1)..(264): Homolog of NCBI NO: 6683052 NR Description: anthocyanin 5-O-glucosyltransferase [Petunia x
  misc_feature (1)..(263): Homolog of NCBI NO: 16604440 NR Description: AT4g15550/dl3815c [Arabidopsis thaliana]
  misc_feature (1)..(264): Homolog of NCBI NO: 20146093 NR Description: glucosyltransferase NTGT2 [Nicotiana tabacum]
  misc_feature (1)..(263): Homolog of NCBI NO: 2149127 NR Description: UDP-glucose:indole-3-acetate
  misc_feature (1)..(263): Homolog of NCBI NO: 18414478 NR Description: UDP-glucose:indole-3-acetate
  misc_feature (1)..(264): Homolog of NCBI NO: 15220556 NR Description: glycosyltransferase family [Arabidopsis thaliana]
  misc_feature (1)..(282): Homolog of NCBI NO: 18390540 NR Description: UDP-glucose transferase(UGT1) [Arabidopsis

SEQ ID NO: 43595 - protein, 281 aa, Arabidopsis thaliana; identical to SEQ ID NO: 39637
  peptide (1)..(281): Ceres Seq. ID no. 13580610
  misc_feature (1)..(267): Pfam Name: UDP-glucoronosyl and UDP-glucosyl transferase Pfam Description: UDP-glucoronosyl and UDP-glucosyl transferase
  misc_feature (1)..(267): Pfam Name: UDP-glucoronosyl and UDP-glucosyl transferase Pfam Description: UDP-glucoronosyl and UDP-glucosyl transferase
  misc_feature (1)..(267): Pfam Name: UDP-glucoronosyl and UDP-glucosyl transferase Pfam Description: UDP-glucoronosyl and UDP-glucosyl transferase
  misc_feature (1)..(263): Homolog of NCBI NO: 4115559 NR Description: UDP-glucose:anthocysnin 5-O-glucosyltransferase
  misc_feature (1)..(262): Homolog of NCBI NO: 16604440 NR Description: AT4g15550/dl3815c [Arabidopsis thaliana]
  misc_feature (1)..(262): Homolog of NCBI NO: 7433892 NR Description: hypothetical protein - Arabidopsis thaliana
  misc_feature (1)..(263): Homolog of NCBI NO: 6683052 NR Description: anthocyanin 5-O-glucosyltransferase [Petunia x
  misc_feature (1)..(267): Homolog of NCBI NO: 14192682 NR Description: cold-induced glucosyl transferase [Solanum
  misc_feature (1)..(263): Homolog of NCBI NO: 4115559 NR Description: UDP-glucose:anthocysnin 5-O-glucosyltransferase
  misc_feature (1)..(262): Homolog of NCBI NO: 7433892 NR Description: hypothetical protein - Arabidopsis thaliana
  misc_feature (1)..(267): Homolog of NCBI NO: 14192682 NR Description: cold-induced glucosyl transferase [Solanum
  misc_feature (1)..(263): Homolog of NCBI NO: 6683052 NR Description: anthocyanin 5-O-glucosyltransferase [Petunia x
  misc_feature (1)..(262): Homolog of NCBI NO: 7433892 NR Description: hypothetical protein - Arabidopsis thaliana
  misc_feature (1)..(262): Homolog of NCBI NO: 16604440 NR Description: AT4g15550/dl3815c [Arabidopsis thaliana]
  misc_feature (1)..(263): Homolog of NCBI NO: 4115559 NR Description: UDP-glucose:anthocysnin 5-O-glucosyltransferase
  misc_feature (1)..(281): Homolog of NCBI NO: 18390540 NR Description: UDP-glucose transferase(UGT1) [Arabidopsis
  misc_feature (1)..(263): Homolog of NCBI NO: 15220556 NR Description: glycosyltransferase family [Arabidopsis thaliana]
  misc_feature (1)..(262): Homolog of NCBI NO: 18414478 NR Description: UDP-glucose:indole-3-acetate
  misc_feature (1)..(262): Homolog of NCBI NO: 2149127 NR Description: UDP-glucose:indole-3-acetate
  misc_feature (1)..(263): Homolog of NCBI NO: 20146093 NR Description: glucosyltransferase NTGT2 [Nicotiana tabacum]
  misc_feature (1)..(281): Homolog of NCBI NO: 18390540 NR Description: UDP-glucose transferase(UGT1) [Arabidopsis
  misc_feature (1)..(263): Homolog of NCBI NO: 15220556 NR Description: glycosyltransferase family [Arabidopsis thaliana]
  misc_feature (1)..(262): Homolog of NCBI NO: 18414478 NR Description: UDP-glucose:indole-3-acetate
  misc_feature (1)..(262): Homolog of NCBI NO: 2149127 NR Description: UDP-glucose:indole-3-acetate
  misc_feature (1)..(263): Homolog of NCBI NO: 20146093 NR Description: glucosyltransferase NTGT2 [Nicotiana tabacum]
  misc_feature (1)..(267): Homolog of NCBI NO: 14192682 NR Description: cold-induced glucosyl transferase [Solanum
  misc_feature (1)..(263): Homolog of NCBI NO: 6683052 NR Description: anthocyanin 5-O-glucosyltransferase [Petunia x
  misc_feature (1)..(262): Homolog of NCBI NO: 16604440 NR Description: AT4g15550/dl3815c [Arabidopsis thaliana]
  misc_feature (1)..(263): Homolog of NCBI NO: 20146093 NR Description: glucosyltransferase NTGT2 [Nicotiana tabacum]
  misc_feature (1)..(262): Homolog of NCBI NO: 2149127 NR Description: UDP-glucose:indole-3-acetate
  misc_feature (1)..(262): Homolog of NCBI NO: 18414478 NR Description: UDP-glucose:indole-3-acetate
  misc_feature (1)..(263): Homolog of NCBI NO: 15220556 NR Description: glycosyltransferase family [Arabidopsis thaliana]
  misc_feature (1)..(281): Homolog of NCBI NO: 18390540 NR Description: UDP-glucose transferase(UGT1) [Arabidopsis

SEQ ID NO: 43596 - DNA, 915 bp, Arabidopsis thaliana
  misc_feature (1)..(915): Ceres Seq. ID no. 12325404
  misc_feature: MA Experiment ID: 108434 Result: Down-regulated in Transcription
  misc_feature: MA Experiment 108434 PARAMETER Experiment Name: At_Root_Tips_cDNA_P Parameter: Tissue Value: Root Tips
  misc_feature: MA Experiment ID: 108435 Result: Down-regulated in Transcription
  misc_feature: MA Experiment 108435 PARAMETER Experiment Name: At_stm_Mutants_cDNA_P Parameter: Plant Line Value: wt Landsburg vs stm
  misc_feature: MA Experiment 108435 PARAMETER Experiment Name: At_stm_Mutants_cDNA_P Parameter: Tissue Value: Shoot Apical Meristem Region
  misc_feature: MA Experiment ID: 108461 Result: Up-regulated in Transcription
  misc_feature: MA Experiment 108461 PARAMETER Experiment Name: At_Germinating_Seeds_cDNA_P Parameter: Age (day) Value: 1 vs. 0
  misc_feature: MA Experiment 108461 PARAMETER Experiment Name: At_Germinating_Seeds_cDNA_P Parameter: Tissue Value: Germinating Seeds
  misc_feature: MA Experiment ID: 108462 Result: Up-regulated in Transcription
  misc_feature: MA Experiment 108462 PARAMETER Experiment Name: At_Germinating_Seeds_cDNA_P Parameter: Age (day) Value: 2 vs. 0
  misc_feature: MA Experiment 108462 PARAMETER Experiment Name: At_Germinating_Seeds_cDNA_P Parameter: Tissue Value: Germinating Seeds
  misc_feature: MA Experiment ID: 108463 Result: Up-regulated in Transcription
  misc_feature: MA Experiment 108463 PARAMETER Experiment Name: At_Germinating_Seeds_cDNA_P Parameter: Age (day) Value: 3 vs. 0
  misc_feature: MA Experiment 108463 PARAMETER Experiment Name: At_Germinating_Seeds_cDNA_P Parameter: Tissue Value: Germinating Seeds
  misc_feature: MA Experiment ID: 108464 Result: Up-regulated in Transcription
  misc_feature: MA Experiment 108464 PARAMETER Experiment Name: At_Germinating_Seeds_cDNA_P Parameter: Age (day) Value: 4 vs. 0
  misc_feature: MA Experiment 108464 PARAMETER Experiment Name: At_Germinating_Seeds_cDNA_P Parameter: Tissue Value: Germinating Seeds
  misc_feature: MA Experiment ID: 108488 Result: Up-regulated in Transcription
  misc_feature: MA Experiment ID: 108595 Result: Down-regulated in Transcription
  misc_feature: MA Experiment 108595 PARAMETER Experiment Name: At_Ler-pi_Ovule_cDNA_P Parameter: Plant Line Value: null
  misc_feature: MA Experiment ID: 20000069 Result: Down-regulated in Transcription
  misc_feature: MA Experiment 20000069 PARAMETER Experiment Name: At_100uM_ABA_Mutants_cDNA_P Parameter: Plant Line Value: CS23
  misc_feature: MA Experiment 20000069 PARAMETER Experiment Name: At_100uM_ABA_Mutants_cDNA_P Parameter: Timepoint (hr) Value: 6
  misc_feature: MA Experiment 20000069 PARAMETER Experiment Name: At_100uM_ABA_Mutants_cDNA_P Parameter: Tissue Value: Aerial
  misc_feature: MA Experiment 20000069 PARAMETER Experiment Name: At_100uM_ABA_Mutants_cDNA_P Parameter: Treatment Value: 100uM ABA vs. No Treatment
  misc_feature: MA Experiment ID: 20000070 Result: Down-regulated in Transcription
  misc_feature: MA Experiment 20000070 PARAMETER Experiment Name: At_100uM_ABA_Mutants_cDNA_P Parameter: Plant Line Value: CS24
  misc_feature: MA Experiment 20000070 PARAMETER Experiment Name: At_100uM_ABA_Mutants_cDNA_P Parameter: Timepoint (hr) Value: 6
  misc_feature: MA Experiment 20000070 PARAMETER Experiment Name: At_100uM_ABA_Mutants_cDNA_P Parameter: Tissue Value: Aerial
  misc_feature: MA Experiment 20000070 PARAMETER Experiment Name: At_100uM_ABA_Mutants_cDNA_P Parameter: Treatment Value: 100uM ABA vs. No Treatment
  misc_feature: MA Experiment ID: 20000071 Result: Down-regulated in Transcription
  misc_feature: MA Experiment 20000071 PARAMETER Experiment Name: At_100uM_ABA_Mutants_cDNA_P Parameter: Plant Line Value: CS8104
  misc_feature: MA Experiment 20000071 PARAMETER Experiment Name: At_100uM_ABA_Mutants_cDNA_P Parameter: Timepoint (hr) Value: 6
  misc_feature: MA Experiment 20000071 PARAMETER Experiment Name: At_100uM_ABA_Mutants_cDNA_P Parameter: Tissue Value: Aerial
  misc_feature: MA Experiment 20000071 PARAMETER Experiment Name: At_100uM_ABA_Mutants_cDNA_P Parameter: Treatment Value: 100uM ABA vs. No Treatment
  misc_feature: MA Experiment ID: 20000072 Result: Down-regulated in Transcription
  misc_feature: MA Experiment 20000072 PARAMETER Experiment Name: At_100uM_ABA_Mutants_cDNA_P Parameter: Plant Line Value: CS8105
  misc_feature: MA Experiment 20000072 PARAMETER Experiment Name: At_100uM_ABA_Mutants_cDNA_P Parameter: Timepoint (hr) Value: 6
  misc_feature: MA Experiment 20000072 PARAMETER Experiment Name: At_100uM_ABA_Mutants_cDNA_P Parameter: Tissue Value: Aerial
  misc_feature: MA Experiment 20000072 PARAMETER Experiment Name: At_100uM_ABA_Mutants_cDNA_P Parameter: Treatment Value: 100uM ABA vs. No Treatment
  misc_feature: MA Experiment ID: 20000086 Result: Down-regulated in Transcription
  misc_feature: MA Experiment 20000086 PARAMETER Experiment Name: At_100uM_ABA_Mutants_cDNA_P Parameter: Plant Line Value: CS22
  misc_feature: MA Experiment 20000086 PARAMETER Experiment Name: At_100uM_ABA_Mutants_cDNA_P Parameter: Timepoint (hr) Value: 6
  misc_feature: MA Experiment 20000086 PARAMETER Experiment Name: At_100uM_ABA_Mutants_cDNA_P Parameter: Tissue Value: Aerial
  misc_feature: MA Experiment 20000086 PARAMETER Experiment Name: At_100uM_ABA_Mutants_cDNA_P Parameter: Treatment Value: 100uM ABA vs. No Treatment
  misc_feature: MA Experiment ID: 20000087 Result: Down-regulated in Transcription
  misc_feature: MA Experiment 20000087 PARAMETER Experiment Name: At_100uM_ABA_Mutants_cDNA_P Parameter: Plant Line Value: WS
  misc_feature: MA Experiment 20000087 PARAMETER Experiment Name: At_100uM_ABA_Mutants_cDNA_P Parameter: Timepoint (hr) Value: 6
  misc_feature: MA Experiment 20000087 PARAMETER Experiment Name: At_100uM_ABA_Mutants_cDNA_P Parameter: Tissue Value: Aerial
  misc_feature: MA Experiment 20000087 PARAMETER Experiment Name: At_100uM_ABA_Mutants_cDNA_P Parameter: Treatment Value: 100uM ABA vs. No Treatment
  misc_feature: MA Experiment ID: 20000113 Result: Up-regulated in Transcription
  misc_feature: MA Experiment 20000113 PARAMETER Experiment Name: At_42deg_Heat_cDNA_P Parameter: Temperature (deg C) Value: 42 vs. 22
  misc_feature: MA Experiment 20000113 PARAMETER Experiment Name: At_42deg_Heat_cDNA_P Parameter: Timepoint (hr) Value: 8
  misc_feature: MA Experiment 20000113 PARAMETER Experiment Name: At_42deg_Heat_cDNA_P Parameter: Tissue Value: Aerial
  misc_feature: MA Experiment ID: 20000117 Result: Down-regulated in Transcription
  misc_feature: MA Experiment 20000117 PARAMETER Experiment Name: At_100uM_ABA_Mutants_cDNA_P Parameter: Plant Line Value: Columbia
  misc_feature: MA Experiment 20000117 PARAMETER Experiment Name: At_100uM_ABA_Mutants_cDNA_P Parameter: Timepoint (hr) Value: 6
  misc_feature: MA Experiment 20000117 PARAMETER Experiment Name: At_100uM_ABA_Mutants_cDNA_P Parameter: Tissue Value: Aerial
  misc_feature: MA Experiment 20000117 PARAMETER Experiment Name: At_100uM_ABA_Mutants_cDNA_P Parameter: Treatment Value: 100uM ABA vs. No Treatment
  misc_feature: MA Experiment ID: 20000180 Result: Up-regulated in Transcription
  misc_feature: MA Experiment 20000180 PARAMETER Experiment Name: At_Germinating_Seeds_P Parameter: Age (hr) Value: 24 vs. 0
  misc_feature: MA Experiment 20000180 PARAMETER Experiment Name: At_Germinating_Seeds_P Parameter: Tissue Value: Germinating Seeds
  misc_feature: MA Experiment ID: 20000184 Result: Up-regulated in Transcription
  misc_feature: MA Experiment 20000184 PARAMETER Experiment Name: At_Shoots__P Parameter: Age (day) Value: 7
  misc_feature: MA Experiment 20000184 PARAMETER Experiment Name: At_Shoots__P Parameter: Tissue Value: Shoots vs. Whole Plant
  misc_feature: MA Experiment ID: 20000185 Result: Down-regulated in Transcription
  misc_feature: MA Experiment 20000185 PARAMETER Experiment Name: At_Roots__P Parameter: Age (day) Value: 7 vs. 21
  misc_feature: MA Experiment 20000185 PARAMETER Experiment Name: At_Roots__P Parameter: Organism Value: A. thaliana
  misc_feature: MA Experiment 20000185 PARAMETER Experiment Name: At_Roots__P Parameter: Tissue Value: Roots vs. Whole Plant
  misc_feature: MA Experiment ID: 20000438 Result: Up-regulated in Transcription
  misc_feature: MA Experiment 20000438 PARAMETER Experiment Name: At_Shoots__P Parameter: Age (day) Value: 14
  misc_feature: MA Experiment 20000438 PARAMETER Experiment Name: At_Shoots__P Parameter: Tissue Value: Shoots vs. Whole Plant
  misc_feature: MA Experiment ID: 20000439 Result: Down-regulated in Transcription
  misc_feature: MA Experiment 20000439 PARAMETER Experiment Name: At_Roots__P Parameter: Age (day) Value: 14 vs. 21
  misc_feature: MA Experiment 20000439 PARAMETER Experiment Name: At_Roots__P Parameter: Organism Value: A. thaliana
  misc_feature: MA Experiment 20000439 PARAMETER Experiment Name: At_Roots__P Parameter: Tissue Value: Roots vs. Whole Plant
  misc_feature: MA Experiment ID: 20000495 Result: Down-regulated in Transcription
  misc_feature: MA Experiment 20000495 PARAMETER Experiment Name: At_Guard_Cells_P Parameter: Harvest Date Value: 8/2/2002
  misc_feature: MA Experiment 20000495 PARAMETER Experiment Name: At_Guard_Cells_P Parameter: Organism Value: A. thaliana
  misc_feature: MA Experiment 20000495 PARAMETER Experiment Name: At_Guard_Cells_P Parameter: Tissue Value: Guard Cells vs. Leaves
  misc_feature: MA Experiment ID: 20000794 Result: Down-regulated in Transcription
  misc_feature: MA Experiment 20000794 PARAMETER Experiment Name: At_Petals_P Parameter: Age (day) Value: 23-25 days
  misc_feature: MA Experiment 20000794 PARAMETER Experiment Name: At_Petals_P Parameter: Plant Line Value: WS
  misc_feature: MA Experiment 20000794 PARAMETER Experiment Name: At_Petals_P Parameter: Tissue Value: Petals vs. Whole plant
  misc_feature: MA Experiment ID: 20001248 Result: Down-regulated in Transcription
  misc_feature: MA Experiment 20001248 PARAMETER Experiment Name: At_Far-red-induction_P Parameter: Age (day) Value: 7
  misc_feature: MA Experiment 20001248 PARAMETER Experiment Name: At_Far-red-induction_P Parameter: Light Value: Far-red vs. White
  misc_feature: MA Experiment 20001248 PARAMETER Experiment Name: At_Far-red-induction_P Parameter: Organism Value: A. thaliana
  misc_feature: MA Experiment 20001248 PARAMETER Experiment Name: At_Far-red-induction_P Parameter: Plant Line Value: Columbia
  misc_feature: MA Experiment 20001248 PARAMETER Experiment Name: At_Far-red-induction_P Parameter: Timepoint (hr) Value: 4
  misc_feature: MA Experiment 20001248 PARAMETER Experiment Name: At_Far-red-induction_P Parameter: Tissue Value: Whole Plant
  misc_feature: MA Experiment ID: 20001450 Result: Down-regulated in Transcription
  misc_feature: MA Experiment 20001450 PARAMETER Experiment Name: At_Far-red-induction_P Parameter: Age (day) Value: 7
  misc_feature: MA Experiment 20001450 PARAMETER Experiment Name: At_Far-red-induction_P Parameter: Light Value: Far-red vs. White
  misc_feature: MA Experiment 20001450 PARAMETER Experiment Name: At_Far-red-induction_P Parameter: Organism Value: A. thaliana
  misc_feature: MA Experiment 20001450 PARAMETER Experiment Name: At_Far-red-induction_P Parameter: Plant Line Value: Columbia
  misc_feature: MA Experiment 20001450 PARAMETER Experiment Name: At_Far-red-induction_P Parameter: Timepoint (hr) Value: 8
  misc_feature: MA Experiment 20001450 PARAMETER Experiment Name: At_Far-red-induction_P Parameter: Tissue Value: Whole Plant
  misc_feature: MA Experiment ID: 20001451 Result: Down-regulated in Transcription
  misc_feature: MA Experiment 20001451 PARAMETER Experiment Name: At_Far-red-induction_P Parameter: Age (day) Value: 7
  misc_feature: MA Experiment 20001451 PARAMETER Experiment Name: At_Far-red-induction_P Parameter: Light Value: Far-red vs. White
  misc_feature: MA Experiment 20001451 PARAMETER Experiment Name: At_Far-red-induction_P Parameter: Organism Value: A. thaliana
  misc_feature: MA Experiment 20001451 PARAMETER Experiment Name: At_Far-red-induction_P Parameter: Plant Line Value: Columbia
  misc_feature: MA Experiment 20001451 PARAMETER Experiment Name: At_Far-red-induction_P Parameter: Timepoint (hr) Value: 24
  misc_feature: MA Experiment 20001451 PARAMETER Experiment Name: At_Far-red-induction_P Parameter: Tissue Value: Whole Plant
  misc_feature: MA Experiment ID: 20001557 Result: Down-regulated in Transcription
  misc_feature: MA Experiment 20001557 PARAMETER Experiment Name: At_Drought_Soil_Dry_P Parameter: Age (day) Value: 27
  misc_feature: MA Experiment 20001557 PARAMETER Experiment Name: At_Drought_Soil_Dry_P Parameter: Organism Value: A. thaliana
  misc_feature: MA Experiment 20001557 PARAMETER Experiment Name: At_Drought_Soil_Dry_P Parameter: Plant Line Value: WS
  misc_feature: MA Experiment 20001557 PARAMETER Experiment Name: At_Drought_Soil_Dry_P Parameter: Post Timepoint (hr) Value: 3
  misc_feature: MA Experiment 20001557 PARAMETER Experiment Name: At_Drought_Soil_Dry_P Parameter: Post-Treatment Value: Re-Water vs. No Drought
  misc_feature: MA Experiment 20001557 PARAMETER Experiment Name: At_Drought_Soil_Dry_P Parameter: Timepoint (day) Value: 13
  misc_feature: MA Experiment 20001557 PARAMETER Experiment Name: At_Drought_Soil_Dry_P Parameter: Treatment Value: Drought vs. No Drought
  misc_feature: MA Experiment ID: 20001757 Result: Up-regulated in Transcription
  misc_feature: MA Experiment 20001757 PARAMETER Experiment Name: At_50mM_NH4NO3_L-to-H_P Parameter: Timepoint (hr) Value: 6
  misc_feature: MA Experiment 20001757 PARAMETER Experiment Name: At_50mM_NH4NO3_L-to-H_P Parameter: Tissue Value: Leaf
  misc_feature: MA Experiment 20001757 PARAMETER Experiment Name: At_50mM_NH4NO3_L-to-H_P Parameter: Treatment Value: 50mM NH4NO3 vs 100mM Mannitol
  misc_feature: MA Experiment ID: 20001905 Result: Down-regulated in Transcription
  misc_feature: MA Experiment 20001905 PARAMETER Experiment Name: At_Drought_Reproduction_P Parameter: Age (day) Value: 40
  misc_feature: MA Experiment 20001905 PARAMETER Experiment Name: At_Drought_Reproduction_P Parameter: Organism Value: A. thaliana
  misc_feature: MA Experiment 20001905 PARAMETER Experiment Name: At_Drought_Reproduction_P Parameter: Plant Line Value: WS
  misc_feature: MA Experiment 20001905 PARAMETER Experiment Name: At_Drought_Reproduction_P Parameter: Timepoint (day) Value: 10
  misc_feature: MA Experiment 20001905 PARAMETER Experiment Name: At_Drought_Reproduction_P Parameter: Tissue Value: Rosettes
  misc_feature: MA Experiment 20001905 PARAMETER Experiment Name: At_Drought_Reproduction_P Parameter: Treatment Value: Drought vs. No Drought
atcttcttcttctctgtttctctaagaagatagaacaatcccaagaatctcctcttatttgatcaaccatgtcgaatgtcttgctacgtatttgcatcgcctaaacctcttggcagattcatcaattcaaagtccggcggacggaaacttttcttctccgtcgttagagcttcttccgatgatgctgattgtaatgccgaagaatgtgctcccgagaaggaggtaggaacagtgagtatggaatggttagctggagagaagaccaaagtggtgggaacatttcctcctcggaagccgcgtggttggactggctatgtagagaaagatactgctggtcagactaatgtttactccattgagcctgcagtatatgttgcagagagcgcgattagctcaggtactgcaggatcatcggctgatggggctgagaacacagcagcaatcgtagcaggcattgctcttatcgcagtcgctgcagcttcctctatactcctccaagtcgggaaagatgccccaactcgacccaaagcagtggattacagtggacccgtctcttagctactacatcaacaagttcaagccttctgaaattgttcaaccttctaccccctccgtcacagaagccccaccggtggccgagctagaaacttcactgccagaaactccaccggtggctcagcaagaaacctcactgccggaaactatggctagtgaggctcagccagaggcgtcttttgttccaacaacaagtagtacctcttaggggcttagcctaggattatatctttgtgtaaaaatgagatgaagcatataccaagattatgcattctgttaatattcggatatacctatatgtatgtatacactctgtcactcttctctttgagtgaatgattatatcaaatctcaaatccc

SEQ ID NO: 43597 - protein, 160 aa, Arabidopsis thaliana
  peptide (1)..(160): Ceres Seq. ID no. 12325405
  misc_feature (4)..(158): Homolog of NCBI NO: 18415378 NR Description: expressed protein
  misc_feature (4)..(158): Homolog of NCBI NO: 21553857 NR Description: unknown [Arabidopsis thaliana]
MSCYVFASPKPLGRFINSKSGGRKLFFSVVRASSDDADCNAEECAPEKEVGTVSMEWLAGEKTKVVGTFPPRKPRGWTGYVEKDTAGQTNVYSIEPAVYVAESAISSGTAGSSADGAENTAAIVAGIALIAVAAASSILLQVGKDAPTRPKAVDYSGPVS

SEQ ID NO: 43598 - protein, 106 aa, Arabidopsis thaliana
  peptide (1)..(106): Ceres Seq. ID no. 12325406
  misc_feature (1)..(104): Homolog of NCBI NO: 18415378 NR Description: expressed protein
  misc_feature (1)..(104): Homolog of NCBI NO: 21553857 NR Description: unknown [Arabidopsis thaliana]
MEWLAGEKTKVVGTFPPRKPRGWTGYVEKDTAGQTNVYSIEPAVYVAESAISSGTAGSSADGAENTAAIVAGIALIAVAAASSILLQVGKDAPTRPKAVDYSGPVS

SEQ ID NO: 43599 - protein, 84 aa, Arabidopsis thaliana
  peptide (1)..(84): Ceres Seq. ID no. 12325407
  misc_feature (1)..(84): Homolog of NCBI NO: 18415378 NR Description: expressed protein
  misc_feature (1)..(84): Homolog of NCBI NO: 21553857 NR Description: unknown [Arabidopsis thaliana]
MPQLDPKQWITVDPSLSYYINKFKPSEIVQPSTPSVTEAPPVAELETSLPETPPVAQQETSLPETMASEAQPEASFVPTTSSTS

SEQ ID NO: 43600 - DNA, 1361 bp, Arabidopsis thaliana
  misc_feature (1)..(1361): Ceres Seq. ID no. 12738971
  misc_feature: MA Experiment ID: 20000185 Result: Down-regulated in Transcription
  misc_feature: MA Experiment 20000185 PARAMETER Experiment Name: At_Roots__P Parameter: Age (day) Value: 7 vs. 21
  misc_feature: MA Experiment 20000185 PARAMETER Experiment Name: At_Roots__P Parameter: Organism Value: A. thaliana
  misc_feature: MA Experiment 20000185 PARAMETER Experiment Name: At_Roots__P Parameter: Tissue Value: Roots vs. Whole Plant
  misc_feature: MA Experiment ID: 20000437 Result: Down-regulated in Transcription
  misc_feature: MA Experiment 20000437 PARAMETER Experiment Name: At_Drought_P Parameter: Age (day) Value: 8
  misc_feature: MA Experiment 20000437 PARAMETER Experiment Name: At_Drought_P Parameter: Organism Value: A. thaliana
  misc_feature: MA Experiment 20000437 PARAMETER Experiment Name: At_Drought_P Parameter: Plant Line Value: WS
  misc_feature: MA Experiment 20000437 PARAMETER Experiment Name: At_Drought_P Parameter: Timepoint (hr) Value: 24
  misc_feature: MA Experiment 20000437 PARAMETER Experiment Name: At_Drought_P Parameter: Tissue Value: Whole Plant
  misc_feature: MA Experiment 20000437 PARAMETER Experiment Name: At_Drought_P Parameter: Treatment Value: Drought vs. No Drought
  misc_feature: MA Experiment ID: 20000439 Result: Down-regulated in Transcription
  misc_feature: MA Experiment 20000439 PARAMETER Experiment Name: At_Roots__P Parameter: Age (day) Value: 14 vs. 21
  misc_feature: MA Experiment 20000439 PARAMETER Experiment Name: At_Roots__P Parameter: Organism Value: A. thaliana
  misc_feature: MA Experiment 20000439 PARAMETER Experiment Name: At_Roots__P Parameter: Tissue Value: Roots vs. Whole Plant
  misc_feature: MA Experiment ID: 20001905 Result: Down-regulated in Transcription
  misc_feature: MA Experiment 20001905 PARAMETER Experiment Name: At_Drought_Reproduction_P Parameter: Age (day) Value: 40
  misc_feature: MA Experiment 20001905 PARAMETER Experiment Name: At_Drought_Reproduction_P Parameter: Organism Value: A. thaliana
  misc_feature: MA Experiment 20001905 PARAMETER Experiment Name: At_Drought_Reproduction_P Parameter: Plant Line Value: WS
  misc_feature: MA Experiment 20001905 PARAMETER Experiment Name: At_Drought_Reproduction_P Parameter: Timepoint (day) Value: 10
  misc_feature: MA Experiment 20001905 PARAMETER Experiment Name: At_Drought_Reproduction_P Parameter: Tissue Value: Rosettes
  misc_feature: MA Experiment 20001905 PARAMETER Experiment Name: At_Drought_Reproduction_P Parameter: Treatment Value: Drought vs. No Drought
ggattagggagactcgcactcttcttcttcttctttgtacccagaaagaaagtgagctccaacaatggctgcttgcgctactcactcctctctcatgctagcatacgccgccgcatccactcgttcccaggaccttacccctactccatctcttttctcttttgccagctccagacccaaccacttgagcgtcccgcttcttctccttgggggttccagggaccggagatgtgctgctattgacagagcttccaaccacaagtttattgtctccgccgtggccgctgaggctgacctcgacacggaggaggacctggagcagaccgccaccgccgtccttgatccgcccaagcctaagaaaggaaaagccgctttggttctcaagagagatagaacaaggtctaagaggtttttggaaatccaaaagctaagggaaaccaaaaaggagtatgatgtcaacactgctatctctttgcttaaacaaactgccaacacaaggtttgttgagtctgttgaagcccatttccgtctcaacatcgatcctaagtacaatgaccagcagctgcgtgcaacggtgagcctgcctaagggaactggccagactgttatagtcgctgttcttgcacaaggtgagaaggttgatgaagccaaaagtgcaggggcagatattgtgggcagtgatgatttaatcgaacagattaaaggaggcttcatggagtttgacaagctgattgcatccccggatatgatggtcaaggttgctggcctgggaaagattcttggaccacgggggctcatgccaaatcccaaggctggtacagtcacagcgaacattccccaggctattgaagagttcaagaaggggaaagttgaattcagagcagacaaaactgggattgttcacattccatttgggaaagttaattttacagaggaagaccttctcataaacttccttgcagcagtgaaatcggtggagacaaacaagccaaagggagctaaaggagtgtactggaaaagcgctcacatatgctcgtcaatggggccttccatcaagttgaacataagagagatgatagacttcaagcctcccactgcgaactaatcgacaacgccatttgtaaatggggtccttttgggagacgggcaatgccagtgtagacagagaagagaaacaccaagtctagtctgttagtaatcttttcacgcctcactgctttgtatcactttgatggccatttacttcttgtcgttatttatttactattgcctattaaaatttggcaaggggctgtacatgtcaggacgcagaactctttagtactctctaaaagaaaagaccttacattgatctttaggct

SEQ ID NO: 43601 - protein, 346 aa, Arabidopsis thaliana
  peptide (1)..(346): Ceres Seq. ID no. 12738972
  misc_feature (125)..(329): Pfam Name: Ribosomal protein L1p/L10e family Pfam Description: Ribosomal protein L1p/L10e family
  misc_feature (113)..(341): Homolog of NCBI NO: 33239681 NR Description: Ribosomal protein L1
  misc_feature (113)..(341): Homolog of NCBI NO: 37521169 NR Description: 50S ribosomal protein L1 [Gloeobacter violaceus]
  misc_feature (113)..(341): Homolog of NCBI NO: 16330010 NR Description: 50S ribosomal protein L1 [Synechocystis sp. PCC
  misc_feature (113)..(339): Homolog of NCBI NO: 11467612 NR Description: ribosomal protein L1 [Guillardia theta]
  misc_feature (113)..(341): Homolog of NCBI NO: 17232793 NR Description: 50S ribosomal protein L1 [Nostoc sp. PCC 7120]
  misc_feature (89)..(264): Homolog of NCBI NO: 1350625 NR Description: 50S RIBOSOMAL PROTEIN L1, CHLOROPLAST PRECURSOR
  misc_feature (110)..(341): Homolog of NCBI NO: 22297840 NR Description: 50S ribosomal protein L1 [Thermosynechococcus
  misc_feature (3)..(344): Homolog of NCBI NO: 25453504 NR Description: ribosomal protein L1 [imported] - spinach
  misc_feature (1)..(346): Homolog of NCBI NO: 15229443 NR Description: chloroplast ribosomal L1 - like protein
  misc_feature (1)..(346): Homolog of NCBI NO: 25456457 NR Description: ribosomal protein L1 protein [imported] -
MAACATHSSLMLAYAAASTRSQDLTPTPSLFSFASSRPNHLSVPLLLLGGSRDRRCAAIDRASNHKFIVSAVAAEADLDTEEDLEQTATAVLDPPKPKKGKAALVLKRDRTRSKRFLEIQKLRETKKEYDVNTAISLLKQTANTRFVESVEAHFRLNIDPKYNDQQLRATVSLPKGTGQTVIVAVLAQGEKVDEAKSAGADIVGSDDLIEQIKGGFMEFDKLIASPDMMVKVAGLGKILGPRGLMPNPKAGTVTANIPQAIEEFKKGKVEFRADKTGIVHIPFGKVNFTEEDLLINFLAAVKSVETNKPKGAKGVYWKSAHICSSMGPSIKLNIREMIDFKPPTAN

SEQ ID NO: 43602 - protein, 336 aa, Arabidopsis thaliana
  peptide (1)..(336): Ceres Seq. ID no. 12738973
  misc_feature (115)..(319): Pfam Name: Ribosomal protein L1p/L10e family Pfam Description: Ribosomal protein L1p/L10e family
  misc_feature (103)..(331): Homolog of NCBI NO: 33239681 NR Description: Ribosomal protein L1
  misc_feature (103)..(331): Homolog of NCBI NO: 37521169 NR Description: 50S ribosomal protein L1 [Gloeobacter violaceus]
  misc_feature (103)..(331): Homolog of NCBI NO: 16330010 NR Description: 50S ribosomal protein L1 [Synechocystis sp. PCC
  misc_feature (103)..(329): Homolog of NCBI NO: 11467612 NR Description: ribosomal protein L1 [Guillardia theta]
  misc_feature (103)..(331): Homolog of NCBI NO: 17232793 NR Description: 50S ribosomal protein L1 [Nostoc sp. PCC 7120]
  misc_feature (79)..(254): Homolog of NCBI NO: 1350625 NR Description: 50S RIBOSOMAL PROTEIN L1, CHLOROPLAST PRECURSOR
  misc_feature (100)..(331): Homolog of NCBI NO: 22297840 NR Description: 50S ribosomal protein L1 [Thermosynechococcus
  misc_feature (1)..(334): Homolog of NCBI NO: 25453504 NR Description: ribosomal protein L1 [imported] - spinach
  misc_feature (1)..(336): Homolog of NCBI NO: 15229443 NR Description: chloroplast ribosomal L1 - like protein
  misc_feature (1)..(336): Homolog of NCBI NO: 25456457 NR Description: ribosomal protein L1 protein [imported] -
MLAYAAASTRSQDLTPTPSLFSFASSRPNHLSVPLLLLGGSRDRRCAAIDRASNHKFIVSAVAAEADLDTEEDLEQTATAVLDPPKPKKGKAALVLKRDRTRSKRFLEIQKLRETKKEYDVNTAISLLKQTANTRFVESVEAHFRLNIDPKYNDQQLRATVSLPKGTGQTVIVAVLAQGEKVDEAKSAGADIVGSDDLIEQIKGGFMEFDKLIASPDMMVKVAGLGKILGPRGLMPNPKAGTVTANIPQAIEEFKKGKVEFRADKTGIVHIPFGKVNFTEEDLLINFLAAVKSVETNKPKGAKGVYWKSAHICSSMGPSIKLNIREMIDFKPPTAN

SEQ ID NO: 43603 - DNA, 799 bp, Arabidopsis thaliana
  misc_feature (1)..(799): Ceres Seq. ID no. 13499998
  misc_feature: MA Experiment ID: 108462 Result: Up-regulated in Transcription
  misc_feature: MA Experiment 108462 PARAMETER Experiment Name: At_Germinating_Seeds_cDNA_P Parameter: Age (day) Value: 2 vs. 0
  misc_feature: MA Experiment 108462 PARAMETER Experiment Name: At_Germinating_Seeds_cDNA_P Parameter: Tissue Value: Germinating Seeds
  misc_feature: MA Experiment ID: 108463 Result: Up-regulated in Transcription
  misc_feature: MA Experiment 108463 PARAMETER Experiment Name: At_Germinating_Seeds_cDNA_P Parameter: Age (day) Value: 3 vs. 0
  misc_feature: MA Experiment 108463 PARAMETER Experiment Name: At_Germinating_Seeds_cDNA_P Parameter: Tissue Value: Germinating Seeds
  misc_feature: MA Experiment ID: 108464 Result: Up-regulated in Transcription
  misc_feature: MA Experiment 108464 PARAMETER Experiment Name: At_Germinating_Seeds_cDNA_P Parameter: Age (day) Value: 4 vs. 0
  misc_feature: MA Experiment 108464 PARAMETER Experiment Name: At_Germinating_Seeds_cDNA_P Parameter: Tissue Value: Germinating Seeds
  misc_feature: MA Experiment ID: 108488 Result: Down-regulated in Transcription
  misc_feature: MA Experiment ID: 108501 Result: Up-regulated in Transcription
  misc_feature: MA Experiment 108501 PARAMETER Experiment Name: At_ap2_floral_buds_cDNA_P Parameter: Plant Line Value: ap2 (Ler.)
  misc_feature: MA Experiment 108501 PARAMETER Experiment Name: At_ap2_floral_buds_cDNA_P Parameter: Tissue Value: Closed Flower
  misc_feature: MA Experiment ID: 108594 Result: Down-regulated in Transcription
  misc_feature: MA Experiment 108594 PARAMETER Experiment Name: At_Ler-rhl_Root_cDNA_P Parameter: Plant Line Value: null
  misc_feature: MA Experiment ID: 108608 Result: Up-regulated in Transcription
  misc_feature: MA Experiment 108608 PARAMETER Experiment Name: At_100uM_ABA_cDNA_P Parameter: Timepoint (hr) Value: 1
  misc_feature: MA Experiment 108608 PARAMETER Experiment Name: At_100uM_ABA_cDNA_P Parameter: Tissue Value: Aerial
  misc_feature: MA Experiment 108608 PARAMETER Experiment Name: At_100uM_ABA_cDNA_P Parameter: Treatment Value: 100uM ABA vs. No Treatment
  misc_feature: MA Experiment ID: 20000089 Result: Down-regulated in Transcription
  misc_feature: MA Experiment ID: 20000112 Result: Down-regulated in Transcription
  misc_feature: MA Experiment 20000112 PARAMETER Experiment Name: At_42deg_Heat_cDNA_P Parameter: Temperature (deg C) Value: 42 vs. 22
  misc_feature: MA Experiment 20000112 PARAMETER Experiment Name: At_42deg_Heat_cDNA_P Parameter: Timepoint (hr) Value: 2
  misc_feature: MA Experiment 20000112 PARAMETER Experiment Name: At_42deg_Heat_cDNA_P Parameter: Tissue Value: Aerial
  misc_feature: MA Experiment ID: 20000144 Result: Down-regulated in Transcription
  misc_feature: MA Experiment 20000144 PARAMETER Experiment Name: At_42deg_Heat_cDNA_P Parameter: Temperature (deg C) Value: 42 vs. 22
  misc_feature: MA Experiment 20000144 PARAMETER Experiment Name: At_42deg_Heat_cDNA_P Parameter: Timepoint (hr) Value: 1
  misc_feature: MA Experiment 20000144 PARAMETER Experiment Name: At_42deg_Heat_cDNA_P Parameter: Tissue Value: Aerial
  misc_feature: MA Experiment ID: 20000180 Result: Up-regulated in Transcription
  misc_feature: MA Experiment 20000180 PARAMETER Experiment Name: At_Germinating_Seeds_P Parameter: Age (hr) Value: 24 vs. 0
  misc_feature: MA Experiment 20000180 PARAMETER Experiment Name: At_Germinating_Seeds_P Parameter: Tissue Value: Germinating Seeds
  misc_feature: MA Experiment ID: 20000227 Result: Down-regulated in Transcription
  misc_feature: MA Experiment 20000227 PARAMETER Experiment Name: At_Root-Tips-vs-Tops_P Parameter: Tissue Value: Root Tips vs. Root Tops
  misc_feature: MA Experiment ID: 20000265 Result: Down-regulated in Transcription
  misc_feature: MA Experiment 20000265 PARAMETER Experiment Name: At_Open_Flower_P Parameter: Age (day) Value: 21
  misc_feature: MA Experiment 20000265 PARAMETER Experiment Name: At_Open_Flower_P Parameter: Plant Line Value: WS
  misc_feature: MA Experiment 20000265 PARAMETER Experiment Name: At_Open_Flower_P Parameter: Tissue Value: Closed Flower vs. Whole Plant
  misc_feature: MA Experiment ID: 20000444 Result: Up-regulated in Transcription
  misc_feature: MA Experiment 20000444 PARAMETER Experiment Name: At_100uM_NAA__P Parameter: Age (day) Value: 14
  misc_feature: MA Experiment 20000444 PARAMETER Experiment Name: At_100uM_NAA__P Parameter: Organism Value: A. thaliana
  misc_feature: MA Experiment 20000444 PARAMETER Experiment Name: At_100uM_NAA__P Parameter: Plant Line Value: WS
  misc_feature: MA Experiment 20000444 PARAMETER Experiment Name: At_100uM_NAA__P Parameter: Timepoint (hr) Value: 1
  misc_feature: MA Experiment 20000444 PARAMETER Experiment Name: At_100uM_NAA__P Parameter: Tissue Value: Aerial
  misc_feature: MA Experiment 20000444 PARAMETER Experiment Name: At_100uM_NAA__P Parameter: Treatment Value: 100uM NAA vs. No Treatment
  misc_feature: MA Experiment ID: 20000445 Result: Up-regulated in Transcription
  misc_feature: MA Experiment 20000445 PARAMETER Experiment Name: At_100uM_NAA__P Parameter: Age (day) Value: 14
  misc_feature: MA Experiment 20000445 PARAMETER Experiment Name: At_100uM_NAA__P Parameter: Organism Value: A. thaliana
  misc_feature: MA Experiment 20000445 PARAMETER Experiment Name: At_100uM_NAA__P Parameter: Plant Line Value: WS
  misc_feature: MA Experiment 20000445 PARAMETER Experiment Name: At_100uM_NAA__P Parameter: Timepoint (hr) Value: 6
  misc_feature: MA Experiment 20000445 PARAMETER Experiment Name: At_100uM_NAA__P Parameter: Tissue Value: Aerial
  misc_feature: MA Experiment 20000445 PARAMETER Experiment Name: At_100uM_NAA__P Parameter: Treatment Value: 100uM NAA vs. No Treatment
  misc_feature: MA Experiment ID: 20000794 Result: Up-regulated in Transcription
  misc_feature: MA Experiment 20000794 PARAMETER Experiment Name: At_Petals_P Parameter: Age (day) Value: 23-25 days
  misc_feature: MA Experiment 20000794 PARAMETER Experiment Name: At_Petals_P Parameter: Plant Line Value: WS
  misc_feature: MA Experiment 20000794 PARAMETER Experiment Name: At_Petals_P Parameter: Tissue Value: Petals vs. Whole plant
  misc_feature: MA Experiment ID: 20001457 Result: Down-regulated in Transcription
  misc_feature: MA Experiment 20001457 PARAMETER Experiment Name: At_50mM_NH4NO3_L-to-H_P Parameter: Age (day) Value: Undefined
  misc_feature: MA Experiment 20001457 PARAMETER Experiment Name: At_50mM_NH4NO3_L-to-H_P Parameter: Organism Value: Undefined
  misc_feature: MA Experiment 20001457 PARAMETER Experiment Name: At_50mM_NH4NO3_L-to-H_P Parameter: Plant Line Value: Undefined
  misc_feature: MA Experiment 20001457 PARAMETER Experiment Name: At_50mM_NH4NO3_L-to-H_P Parameter: Timepoint (hr) Value: 0.5
  misc_feature: MA Experiment 20001457 PARAMETER Experiment Name: At_50mM_NH4NO3_L-to-H_P Parameter: Tissue Value: Siliques
  misc_feature: MA Experiment 20001457 PARAMETER Experiment Name: At_50mM_NH4NO3_L-to-H_P Parameter: Treatment Value: 50mM NH4NO3 vs. 100mM Manitol
  misc_feature: MA Experiment ID: 20001554 Result: Up-regulated in Transcription
  misc_feature: MA Experiment 20001554 PARAMETER Experiment Name: At_Drought_Soil_Dry_P Parameter: Age (day) Value: 21
  misc_feature: MA Experiment 20001554 PARAMETER Experiment Name: At_Drought_Soil_Dry_P Parameter: Organism Value: A. thaliana
  misc_feature: MA Experiment 20001554 PARAMETER Experiment Name: At_Drought_Soil_Dry_P Parameter: Plant Line Value: WS
  misc_feature: MA Experiment 20001554 PARAMETER Experiment Name: At_Drought_Soil_Dry_P Parameter: Post Timepoint (hr) Value: None
  misc_feature: MA Experiment 20001554 PARAMETER Experiment Name: At_Drought_Soil_Dry_P Parameter: Post-Treatment Value: None
  misc_feature: MA Experiment 20001554 PARAMETER Experiment Name: At_Drought_Soil_Dry_P Parameter: Timepoint (day) Value: 7
  misc_feature: MA Experiment 20001554 PARAMETER Experiment Name: At_Drought_Soil_Dry_P Parameter: Treatment Value: Drought vs. No Drought
  misc_feature: MA Experiment ID: 20001555 Result: Up-regulated in Transcription
  misc_feature: MA Experiment 20001555 PARAMETER Experiment Name: At_Drought_Soil_Dry_P Parameter: Age (day) Value: 24
  misc_feature: MA Experiment 20001555 PARAMETER Experiment Name: At_Drought_Soil_Dry_P Parameter: Organism Value: A. thaliana
  misc_feature: MA Experiment 20001555 PARAMETER Experiment Name: At_Drought_Soil_Dry_P Parameter: Plant Line Value: WS
  misc_feature: MA Experiment 20001555 PARAMETER Experiment Name: At_Drought_Soil_Dry_P Parameter: Post Timepoint (hr) Value: None
  misc_feature: MA Experiment 20001555 PARAMETER Experiment Name: At_Drought_Soil_Dry_P Parameter: Post-Treatment Value: None
  misc_feature: MA Experiment 20001555 PARAMETER Experiment Name: At_Drought_Soil_Dry_P Parameter: Timepoint (day) Value: 10
  misc_feature: MA Experiment 20001555 PARAMETER Experiment Name: At_Drought_Soil_Dry_P Parameter: Treatment Value: Drought vs. No Drought
tttcccaactccttacgcgctctctctctatctctttagctttctctttctagcggcgaagccatgggttatccggtggggtacactgagctcctcctcccaagaatcttccttcacttactctctctcttaggcttaatacgaacactcatagacacgggttttcggatattgggtctacccgactttctcgaatccgacccggtttcatcgtcatcgtcatggctggaaccaccgtatatgtccacggcggcgcatcatcaccaagaaagctcatttttcttcccagtggcggcgaggctagctggagaaatcttgcccgtcatcagattctcggagctaactcgacccggattcggatccggatccgattgctgcgcggtgtgcctccacgagttcgagaacgatgacgagatccgacggctgacgaattgtcaacacatatttcaccggagctgtttagaccgttggatgatgggttataatcagatgacgtgtccactttgtagaacgccgtttatttctgatgagttacaagttgcttttaaccaacgagtttggtctgaatctgaacttctcgcagaatcaaattagaatctttcttgtttgggtggaattagtttctactaatgagaaaattaatttctatcttttttttttttttttttgtttaatctttagctgagtggttgatatatgtaaatataaaattataggtggtgatgcttagtaaattagaagaatgaaatttgtattatccgttgaggaaaaaaaagaaatgaatggaaatcttaatttt

SEQ ID NO: 43604 - protein, 176 aa, Arabidopsis thaliana
  peptide (1)..(176): Ceres Seq. ID no. 13499999
  misc_feature (105)..(148): Pfam Name: Zinc finger, C3HC4 type (RING finger) Pfam Description: Zinc finger, C3HC4 type (RING finger)
  misc_feature (11)..(176): Homolog of NCBI NO: 25456491 NR Description: RING-H2 zinc finger protein ATL4
  misc_feature (1)..(153): Homolog of NCBI NO: 34897812 NR Description: P0514G12.26 [Oryza sativa (japonica
  misc_feature (77)..(156): Homolog of NCBI NO: 11358776 NR Description: RING-H2 finger protein RHA1a [imported] -
  misc_feature (77)..(166): Homolog of NCBI NO: 15233352 NR Description: RING-H2 finger protein, putative [Arabidopsis
  misc_feature (77)..(170): Homolog of NCBI NO: 11358777 NR Description: RING-H2 finger protein RHA1b [imported] -
  misc_feature (58)..(170): Homolog of NCBI NO: 15233350 NR Description: RING-H2 finger protein RHA1b [Arabidopsis
  misc_feature (1)..(169): Homolog of NCBI NO: 15233117 NR Description: BRH1 RING finger protein [Arabidopsis thaliana]
  misc_feature (1)..(173): Homolog of NCBI NO: 15222553 NR Description: RING-H2 finger protein, putative [Arabidopsis
  misc_feature (1)..(176): Homolog of NCBI NO: 21554155 NR Description: RING zinc finger protein-like [Arabidopsis
  misc_feature (1)..(176): Homolog of NCBI NO: 15238072 NR Description: RING-H2 zinc finger protein, putative
MGYPVGYTELLLPRIFLHLLSLLGLIRTLIDTGFRILGLPDFLESDPVSSSSSWLEPPYMSTAAHHHQESSFFFPVAARLAGEILPVIRFSELTRPGFGSGSDCCAVCLHEFENDDEIRRLTNCQHIFHRSCLDRWMMGYNQMTCPLCRTPFISDELQVAFNQRVWSESELLAESN

SEQ ID NO: 43605 - protein, 117 aa, Arabidopsis thaliana
  peptide (1)..(117): Ceres Seq. ID no. 13500000
  misc_feature (46)..(89): Pfam Name: Zinc finger, C3HC4 type (RING finger) Pfam Description: Zinc finger, C3HC4 type (RING finger)
  misc_feature (1)..(117): Homolog of NCBI NO: 25456491 NR Description: RING-H2 zinc finger protein ATL4
  misc_feature (1)..(94): Homolog of NCBI NO: 34897812 NR Description: P0514G12.26 [Oryza sativa (japonica
  misc_feature (18)..(97): Homolog of NCBI NO: 11358776 NR Description: RING-H2 finger protein RHA1a [imported] -
  misc_feature (18)..(107): Homolog of NCBI NO: 15233352 NR Description: RING-H2 finger protein, putative [Arabidopsis
  misc_feature (18)..(111): Homolog of NCBI NO: 11358777 NR Description: RING-H2 finger protein RHA1b [imported] -
  misc_feature (1)..(111): Homolog of NCBI NO: 15233350 NR Description: RING-H2 finger protein RHA1b [Arabidopsis
  misc_feature (1)..(110): Homolog of NCBI NO: 15233117 NR Description: BRH1 RING finger protein [Arabidopsis thaliana]
  misc_feature (1)..(114): Homolog of NCBI NO: 15222553 NR Description: RING-H2 finger protein, putative [Arabidopsis
  misc_feature (1)..(117): Homolog of NCBI NO: 21554155 NR Description: RING zinc finger protein-like [Arabidopsis
  misc_feature (1)..(117): Homolog of NCBI NO: 15238072 NR Description: RING-H2 zinc finger protein, putative
MSTAAHHHQESSFFFPVAARLAGEILPVIRFSELTRPGFGSGSDCCAVCLHEFENDDEIRRLTNCQHIFHRSCLDRWMMGYNQMTCPLCRTPFISDELQVAFNQRVWSESELLAESN

SEQ ID NO: 43606 - DNA, 1577 bp, Arabidopsis thaliana
  misc_feature (1)..(1577): Ceres Seq. ID no. 12370816
  misc_feature: MA Experiment ID: 108573 Result: Up-regulated in Transcription
  misc_feature: MA Experiment 108573 PARAMETER Experiment Name: At_Drought_cDNA_P Parameter: Timepoint (hr) Value: 6
  misc_feature: MA Experiment 108573 PARAMETER Experiment Name: At_Drought_cDNA_P Parameter: Tissue Value: Aerial
  misc_feature: MA Experiment 108573 PARAMETER Experiment Name: At_Drought_cDNA_P Parameter: Treatment Value: Drought vs. No Drought
  misc_feature: MA Experiment ID: 108574 Result: Down-regulated in Transcription
  misc_feature: MA Experiment 108574 PARAMETER Experiment Name: At_Wounding__cDNA_P Parameter: Timepoint (hr) Value: 1
  misc_feature: MA Experiment 108574 PARAMETER Experiment Name: At_Wounding__cDNA_P Parameter: Tissue Value: Aerial
  misc_feature: MA Experiment 108574 PARAMETER Experiment Name: At_Wounding__cDNA_P Parameter: Treatment Value: Wounding vs. No Wounding
  misc_feature: MA Experiment ID: 108579 Result: Down-regulated in Transcription
  misc_feature: MA Experiment 108579 PARAMETER Experiment Name: At_4deg_Cold_cDNA_P Parameter: Temperature (deg C) Value: 4 vs. 22
  misc_feature: MA Experiment 108579 PARAMETER Experiment Name: At_4deg_Cold_cDNA_P Parameter: Timepoint (hr) Value: 6
  misc_feature: MA Experiment 108579 PARAMETER Experiment Name: At_4deg_Cold_cDNA_P Parameter: Tissue Value: Aerial
  misc_feature: MA Experiment ID: 20000071 Result: Up-regulated in Transcription
  misc_feature: MA Experiment 20000071 PARAMETER Experiment Name: At_100uM_ABA_Mutants_cDNA_P Parameter: Plant Line Value: CS8104
  misc_feature: MA Experiment 20000071 PARAMETER Experiment Name: At_100uM_ABA_Mutants_cDNA_P Parameter: Timepoint (hr) Value: 6
  misc_feature: MA Experiment 20000071 PARAMETER Experiment Name: At_100uM_ABA_Mutants_cDNA_P Parameter: Tissue Value: Aerial
  misc_feature: MA Experiment 20000071 PARAMETER Experiment Name: At_100uM_ABA_Mutants_cDNA_P Parameter: Treatment Value: 100uM ABA vs. No Treatment
  misc_feature: MA Experiment ID: 20000113 Result: Down-regulated in Transcription
  misc_feature: MA Experiment 20000113 PARAMETER Experiment Name: At_42deg_Heat_cDNA_P Parameter: Temperature (deg C) Value: 42 vs. 22
  misc_feature: MA Experiment 20000113 PARAMETER Experiment Name: At_42deg_Heat_cDNA_P Parameter: Timepoint (hr) Value: 8
  misc_feature: MA Experiment 20000113 PARAMETER Experiment Name: At_42deg_Heat_cDNA_P Parameter: Tissue Value: Aerial
  misc_feature: MA Experiment ID: 20000173 Result: Down-regulated in Transcription
  misc_feature: MA Experiment 20000173 PARAMETER Experiment Name: At_42deg_Heat_P Parameter: Age (day) Value: 14
  misc_feature: MA Experiment 20000173 PARAMETER Experiment Name: At_42deg_Heat_P Parameter: Organism Value: A. thaliana
  misc_feature: MA Experiment 20000173 PARAMETER Experiment Name: At_42deg_Heat_P Parameter: Plant Line Value: WS
  misc_feature: MA Experiment 20000173 PARAMETER Experiment Name: At_42deg_Heat_P Parameter: Temperature (deg C) Value: 42 vs. 22
  misc_feature: MA Experiment 20000173 PARAMETER Experiment Name: At_42deg_Heat_P Parameter: Timepoint (hr) Value: 6
  misc_feature: MA Experiment 20000173 PARAMETER Experiment Name: At_42deg_Heat_P Parameter: Tissue Value: Aerial
  misc_feature: MA Experiment ID: 20000224 Result: Down-regulated in Transcription
  misc_feature: MA Experiment ID: 20000794 Result: Up-regulated in Transcription
  misc_feature: MA Experiment 20000794 PARAMETER Experiment Name: At_Petals_P Parameter: Age (day) Value: 23-25 days
  misc_feature: MA Experiment 20000794 PARAMETER Experiment Name: At_Petals_P Parameter: Plant Line Value: WS
  misc_feature: MA Experiment 20000794 PARAMETER Experiment Name: At_Petals_P Parameter: Tissue Value: Petals vs. Whole plant
  misc_feature: MA Experiment ID: 20001248 Result: Up-regulated in Transcription
  misc_feature: MA Experiment 20001248 PARAMETER Experiment Name: At_Far-red-induction_P Parameter: Age (day) Value: 7
  misc_feature: MA Experiment 20001248 PARAMETER Experiment Name: At_Far-red-induction_P Parameter: Light Value: Far-red vs. White
  misc_feature: MA Experiment 20001248 PARAMETER Experiment Name: At_Far-red-induction_P Parameter: Organism Value: A. thaliana
  misc_feature: MA Experiment 20001248 PARAMETER Experiment Name: At_Far-red-induction_P Parameter: Plant Line Value: Columbia
  misc_feature: MA Experiment 20001248 PARAMETER Experiment Name: At_Far-red-induction_P Parameter: Timepoint (hr) Value: 4
  misc_feature: MA Experiment 20001248 PARAMETER Experiment Name: At_Far-red-induction_P Parameter: Tissue Value: Whole Plant
  misc_feature: MA Experiment ID: 20001450 Result: Up-regulated in Transcription
  misc_feature: MA Experiment 20001450 PARAMETER Experiment Name: At_Far-red-induction_P Parameter: Age (day) Value: 7
  misc_feature: MA Experiment 20001450 PARAMETER Experiment Name: At_Far-red-induction_P Parameter: Light Value: Far-red vs. White
  misc_feature: MA Experiment 20001450 PARAMETER Experiment Name: At_Far-red-induction_P Parameter: Organism Value: A. thaliana
  misc_feature: MA Experiment 20001450 PARAMETER Experiment Name: At_Far-red-induction_P Parameter: Plant Line Value: Columbia
  misc_feature: MA Experiment 20001450 PARAMETER Experiment Name: At_Far-red-induction_P Parameter: Timepoint (hr) Value: 8
  misc_feature: MA Experiment 20001450 PARAMETER Experiment Name: At_Far-red-induction_P Parameter: Tissue Value: Whole Plant
  misc_feature: MA Experiment ID: 20001451 Result: Up-regulated in Transcription
  misc_feature: MA Experiment 20001451 PARAMETER Experiment Name: At_Far-red-induction_P Parameter: Age (day) Value: 7
  misc_feature: MA Experiment 20001451 PARAMETER Experiment Name: At_Far-red-induction_P Parameter: Light Value: Far-red vs. White
  misc_feature: MA Experiment 20001451 PARAMETER Experiment Name: At_Far-red-induction_P Parameter: Organism Value: A. thaliana
  misc_feature: MA Experiment 20001451 PARAMETER Experiment Name: At_Far-red-induction_P Parameter: Plant Line Value: Columbia
  misc_feature: MA Experiment 20001451 PARAMETER Experiment Name: At_Far-red-induction_P Parameter: Timepoint (hr) Value: 24
  misc_feature: MA Experiment 20001451 PARAMETER Experiment Name: At_Far-red-induction_P Parameter: Tissue Value: Whole Plant
  misc_feature: MA Experiment ID: 20001557 Result: Down-regulated in Transcription
  misc_feature: MA Experiment 20001557 PARAMETER Experiment Name: At_Drought_Soil_Dry_P Parameter: Age (day) Value: 27
  misc_feature: MA Experiment 20001557 PARAMETER Experiment Name: At_Drought_Soil_Dry_P Parameter: Organism Value: A. thaliana
  misc_feature: MA Experiment 20001557 PARAMETER Experiment Name: At_Drought_Soil_Dry_P Parameter: Plant Line Value: WS
  misc_feature: MA Experiment 20001557 PARAMETER Experiment Name: At_Drought_Soil_Dry_P Parameter: Post Timepoint (hr) Value: 3
  misc_feature: MA Experiment 20001557 PARAMETER Experiment Name: At_Drought_Soil_Dry_P Parameter: Post-Treatment Value: Re-Water vs. No Drought
  misc_feature: MA Experiment 20001557 PARAMETER Experiment Name: At_Drought_Soil_Dry_P Parameter: Timepoint (day) Value: 13
  misc_feature: MA Experiment 20001557 PARAMETER Experiment Name: At_Drought_Soil_Dry_P Parameter: Treatment Value: Drought vs. No Drought
  misc_feature: MA Experiment ID: 20001558 Result: Down-regulated in Transcription
  misc_feature: MA Experiment 20001558 PARAMETER Experiment Name: At_Drought_Soil_Dry_P Parameter: Age (day) Value: 27
  misc_feature: MA Experiment 20001558 PARAMETER Experiment Name: At_Drought_Soil_Dry_P Parameter: Organism Value: A. thaliana
  misc_feature: MA Experiment 20001558 PARAMETER Experiment Name: At_Drought_Soil_Dry_P Parameter: Plant Line Value: WS
  misc_feature: MA Experiment 20001558 PARAMETER Experiment Name: At_Drought_Soil_Dry_P Parameter: Post Timepoint (hr) Value: 6
  misc_feature: MA Experiment 20001558 PARAMETER Experiment Name: At_Drought_Soil_Dry_P Parameter: Post-Treatment Value: Re-Water vs. No Drought
  misc_feature: MA Experiment 20001558 PARAMETER Experiment Name: At_Drought_Soil_Dry_P Parameter: Timepoint (day) Value: 13
  misc_feature: MA Experiment 20001558 PARAMETER Experiment Name: At_Drought_Soil_Dry_P Parameter: Treatment Value: Drought vs. No Drought
aattcaatcaaagtgtccaacagattcagtctatcgtgtcaagtgcctgtctctttcgttgcccaaatctccgatcaaattcgtccgtcgtgtttgcatggcgtttgctccgattctccgccgcgcctccgccgttaagaacctcttctctttaacaagactcgccgttggctctgccctctccactaggtctctccaaaccggagcctccggcgatgattctcaatcgatgggtgggtatcacgtgagccccggcggattcatgcgtggagccgtgtatcgcgagcccaataagcctctaaccatcgaagaatttcatattccccgccccaaatccaatgaaattctcatcaaaaccaaagcttgtggagtttgccactctgatcttcatgtgatgaaaggagagataccgttcgctagtccttgtgttattggtcatgagattactggtgaagttgttgaacatggtccacttactgatcacaagatcattaatagatttccaatcgggtctcgtgtagttggagctttcattatgccttgtggaacctgttcttattgtgctaagggccatgatgatctatgtgaagacttctttgcttacaacagagccaagggaactctttacgatggcgaaactcgtctctttttgcgacatgatgattcaccagtgtatatgtatagtatgggagggatggctgagtactgtgttacaccagctcatggtttagctcctctaccagagtctttgccctactctgaatctgccattctgggatgtgctgtttttacagcatatggtgctatggctcatgctgctgagatccgtcctggagattctattgcagttattggaattggtggtgtgggctccagttgtttgcagatcgcaagggcttttggagcctcggatatcattgctgtggatgttcaggatgataaattacagaaggccaagacacttggtgctactcatattgtcaatgctgctaaagaagatgctgttgaaaggataagagaaataaccggtgggatgggtgttgatgttgctgttgaagccttgggaaagcctcaaactttcatgcagtgcacactaagtgtgaaagatggtggaaaagctgtgatgattggactctcacaagctggttccgttggagaaattgacataaatcgacttgttcgtagaaagataaaagttataggatcttatggaggaagagcaagacaggatcttcctaaagtagtgaaattggcagagtcagggattttcaatctcacaaacgcagtctcaagtaaatacaagtttgaagatgcaggaaaagcatttcaagatctcaacgaaggcaaaatcgtgagccgaggtgttgttgagatactataaccaatatagccttttgattctggtttgtgaatgactgcttcacacctgtttcactgaggtctatttttagttgctacaatcttcagacaaggtcattgttaatctgatatttgtgtttgtttagacagtgaaaaggaaaaaaaaaaactgtagtaactggacaaaatttataattttactgtttttcatttctttc

SEQ ID NO: 43607 - protein, 459 aa, Arabidopsis thaliana
  peptide (1)..(459): Ceres Seq. ID no. 12370817
  misc_feature (89)..(457): Homolog of NCBI NO: 17989212 NR Description: ALCOHOL DEHYDROGENASE [Brucella melitensis]
  misc_feature (89)..(457): Homolog of NCBI NO: 23500153 NR Description: alcohol dehydrogenase, zinc-containing [Brucella
  misc_feature (88)..(456): Homolog of NCBI NO: 22978114 NR Description: hypothetical protein [Ralstonia metallidurans]
  misc_feature (70)..(456): Homolog of NCBI NO: 15966604 NR Description: PUTATIVE ZINC-TYPE ALCOHOL DEHYDROGENASE
  misc_feature (88)..(451): Homolog of NCBI NO: 15922376 NR Description: 361aa long hypothetical alcohol dehydrogenase
  misc_feature (88)..(451): Homolog of NCBI NO: 15897400 NR Description: Alcohol dehydrogenase (Zn containing) (adh-1)
  misc_feature (77)..(459): Homolog of NCBI NO: 10177043 NR Description: alcohol dehydrogenase-like protein [Arabidopsis
  misc_feature (33)..(459): Homolog of NCBI NO: 30697875 NR Description: oxidoreductase, zinc-binding dehydrogenase family
  misc_feature (33)..(459): Homolog of NCBI NO: 21554156 NR Description: alcohol dehydrogenase-like protein [Arabidopsis
  misc_feature (33)..(459): Homolog of NCBI NO: 30697873 NR Description: oxidoreductase, zinc-binding dehydrogenase family
IQSKCPTDSVYRVKCLSLSLPKSPIKFVRRVCMAFAPILRRASAVKNLFSLTRLAVGSALSTRSLQTGASGDDSQSMGGYHVSPGGFMRGAVYREPNKPLTIEEFHIPRPKSNEILIKTKACGVCHSDLHVMKGEIPFASPCVIGHEITGEVVEHGPLTDHKIINRFPIGSRVVGAFIMPCGTCSYCAKGHDDLCEDFFAYNRAKGTLYDGETRLFLRHDDSPVYMYSMGGMAEYCVTPAHGLAPLPESLPYSESAILGCAVFTAYGAMAHAAEIRPGDSIAVIGIGGVGSSCLQIARAFGASDIIAVDVQDDKLQKAKTLGATHIVNAAKEDAVERIREITGGMGVDVAVEALGKPQTFMQCTLSVKDGGKAVMIGLSQAGSVGEIDINRLVRRKIKVIGSYGGRARQDLPKVVKLAESGIFNLTNAVSSKYKFEDAGKAFQDLNEGKIVSRGVVEIL

SEQ ID NO: 43608 - protein, 427 aa, Arabidopsis thaliana
  peptide (1)..(427): Ceres Seq. ID no. 12370818
  misc_feature (57)..(425): Homolog of NCBI NO: 17989212 NR Description: ALCOHOL DEHYDROGENASE [Brucella melitensis]
  misc_feature (57)..(425): Homolog of NCBI NO: 23500153 NR Description: alcohol dehydrogenase, zinc-containing [Brucella
  misc_feature (56)..(424): Homolog of NCBI NO: 22978114 NR Description: hypothetical protein [Ralstonia metallidurans]
  misc_feature (38)..(424): Homolog of NCBI NO: 15966604 NR Description: PUTATIVE ZINC-TYPE ALCOHOL DEHYDROGENASE
  misc_feature (56)..(419): Homolog of NCBI NO: 15922376 NR Description: 361aa long hypothetical alcohol dehydrogenase
  misc_feature (56)..(419): Homolog of NCBI NO: 15897400 NR Description: Alcohol dehydrogenase (Zn containing) (adh-1)
  misc_feature (45)..(427): Homolog of NCBI NO: 10177043 NR Description: alcohol dehydrogenase-like protein [Arabidopsis
  misc_feature (1)..(427): Homolog of NCBI NO: 30697875 NR Description: oxidoreductase, zinc-binding dehydrogenase family
  misc_feature (1)..(427): Homolog of NCBI NO: 21554156 NR Description: alcohol dehydrogenase-like protein [Arabidopsis
  misc_feature (1)..(427): Homolog of NCBI NO: 30697873 NR Description: oxidoreductase, zinc-binding dehydrogenase family
MAFAPILRRASAVKNLFSLTRLAVGSALSTRSLQTGASGDDSQSMGGYHVSPGGFMRGAVYREPNKPLTIEEFHIPRPKSNEILIKTKACGVCHSDLHVMKGEIPFASPCVIGHEITGEVVEHGPLTDHKIINRFPIGSRVVGAFIMPCGTCSYCAKGHDDLCEDFFAYNRAKGTLYDGETRLFLRHDDSPVYMYSMGGMAEYCVTPAHGLAPLPESLPYSESAILGCAVFTAYGAMAHAAEIRPGDSIAVIGIGGVGSSCLQIARAFGASDIIAVDVQDDKLQKAKTLGATHIVNAAKEDAVERIREITGGMGVDVAVEALGKPQTFMQCTLSVKDGGKAVMIGLSQAGSVGEIDINRLVRRKIKVIGSYGGRARQDLPKVVKLAESGIFNLTNAVSSKYKFEDAGKAFQDLNEGKIVSRGVVEIL

SEQ ID NO: 43609 - protein, 383 aa, Arabidopsis thaliana
  peptide (1)..(383): Ceres Seq. ID no. 12370819
  misc_feature (13)..(381): Homolog of NCBI NO: 17989212 NR Description: ALCOHOL DEHYDROGENASE [Brucella melitensis]
  misc_feature (13)..(381): Homolog of NCBI NO: 23500153 NR Description: alcohol dehydrogenase, zinc-containing [Brucella
  misc_feature (12)..(380): Homolog of NCBI NO: 22978114 NR Description: hypothetical protein [Ralstonia metallidurans]
  misc_feature (1)..(380): Homolog of NCBI NO: 15966604 NR Description: PUTATIVE ZINC-TYPE ALCOHOL DEHYDROGENASE
  misc_feature (12)..(375): Homolog of NCBI NO: 15922376 NR Description: 361aa long hypothetical alcohol dehydrogenase
  misc_feature (12)..(375): Homolog of NCBI NO: 15897400 NR Description: Alcohol dehydrogenase (Zn containing) (adh-1)
  misc_feature (1)..(383): Homolog of NCBI NO: 10177043 NR Description: alcohol dehydrogenase-like protein [Arabidopsis
  misc_feature (1)..(383): Homolog of NCBI NO: 30697875 NR Description: oxidoreductase, zinc-binding dehydrogenase family
  misc_feature (1)..(383): Homolog of NCBI NO: 21554156 NR Description: alcohol dehydrogenase-like protein [Arabidopsis
  misc_feature (1)..(383): Homolog of NCBI NO: 30697873 NR Description: oxidoreductase, zinc-binding dehydrogenase family
MGGYHVSPGGFMRGAVYREPNKPLTIEEFHIPRPKSNEILIKTKACGVCHSDLHVMKGEIPFASPCVIGHEITGEVVEHGPLTDHKIINRFPIGSRVVGAFIMPCGTCSYCAKGHDDLCEDFFAYNRAKGTLYDGETRLFLRHDDSPVYMYSMGGMAEYCVTPAHGLAPLPESLPYSESAILGCAVFTAYGAMAHAAEIRPGDSIAVIGIGGVGSSCLQIARAFGASDIIAVDVQDDKLQKAKTLGATHIVNAAKEDAVERIREITGGMGVDVAVEALGKPQTFMQCTLSVKDGGKAVMIGLSQAGSVGEIDINRLVRRKIKVIGSYGGRARQDLPKVVKLAESGIFNLTNAVSSKYKFEDAGKAFQDLNEGKIVSRGVVEIL

SEQ ID NO: 43610 - DNA, 1521 bp, Arabidopsis thaliana; identical to SEQ ID NO: 28642
  misc_feature (1)..(1521): Ceres Seq. ID no. 13580594
  misc_feature: MA Experiment ID: 108433 Result: Up-regulated in Transcription
  misc_feature: MA Experiment 108433 PARAMETER Experiment Name: At_rhl_Mutant2_cDNA_P Parameter: Age (day) Value: 7
  misc_feature: MA Experiment 108433 PARAMETER Experiment Name: At_rhl_Mutant2_cDNA_P Parameter: Organism Value: A. thaliana
  misc_feature: MA Experiment 108433 PARAMETER Experiment Name: At_rhl_Mutant2_cDNA_P Parameter: Plant Line Value: rhl Mutant vs. wt landsburg
  misc_feature: MA Experiment 108433 PARAMETER Experiment Name: At_rhl_Mutant2_cDNA_P Parameter: Tissue Value: Roots
  misc_feature: MA Experiment ID: 108461 Result: Down-regulated in Transcription
  misc_feature: MA Experiment 108461 PARAMETER Experiment Name: At_Germinating_Seeds_cDNA_P Parameter: Age (day) Value: 1 vs. 0
  misc_feature: MA Experiment 108461 PARAMETER Experiment Name: At_Germinating_Seeds_cDNA_P Parameter: Tissue Value: Germinating Seeds
  misc_feature: MA Experiment ID: 108462 Result: Down-regulated in Transcription
  misc_feature: MA Experiment 108462 PARAMETER Experiment Name: At_Germinating_Seeds_cDNA_P Parameter: Age (day) Value: 2 vs. 0
  misc_feature: MA Experiment 108462 PARAMETER Experiment Name: At_Germinating_Seeds_cDNA_P Parameter: Tissue Value: Germinating Seeds
  misc_feature: MA Experiment ID: 108463 Result: Down-regulated in Transcription
  misc_feature: MA Experiment 108463 PARAMETER Experiment Name: At_Germinating_Seeds_cDNA_P Parameter: Age (day) Value: 3 vs. 0
  misc_feature: MA Experiment 108463 PARAMETER Experiment Name: At_Germinating_Seeds_cDNA_P Parameter: Tissue Value: Germinating Seeds
  misc_feature: MA Experiment ID: 108464 Result: Down-regulated in Transcription
  misc_feature: MA Experiment 108464 PARAMETER Experiment Name: At_Germinating_Seeds_cDNA_P Parameter: Age (day) Value: 4 vs. 0
  misc_feature: MA Experiment 108464 PARAMETER Experiment Name: At_Germinating_Seeds_cDNA_P Parameter: Tissue Value: Germinating Seeds
  misc_feature: MA Experiment ID: 108573 Result: Up-regulated in Transcription
  misc_feature: MA Experiment 108573 PARAMETER Experiment Name: At_Drought_cDNA_P Parameter: Timepoint (hr) Value: 6
  misc_feature: MA Experiment 108573 PARAMETER Experiment Name: At_Drought_cDNA_P Parameter: Tissue Value: Aerial
  misc_feature: MA Experiment 108573 PARAMETER Experiment Name: At_Drought_cDNA_P Parameter: Treatment Value: Drought vs. No Drought
  misc_feature: MA Experiment ID: 20000180 Result: Down-regulated in Transcription
  misc_feature: MA Experiment 20000180 PARAMETER Experiment Name: At_Germinating_Seeds_P Parameter: Age (hr) Value: 24 vs. 0
  misc_feature: MA Experiment 20000180 PARAMETER Experiment Name: At_Germinating_Seeds_P Parameter: Tissue Value: Germinating Seeds
  misc_feature: MA Experiment ID: 20000185 Result: Up-regulated in Transcription
  misc_feature: MA Experiment 20000185 PARAMETER Experiment Name: At_Roots__P Parameter: Age (day) Value: 7 vs. 21
  misc_feature: MA Experiment 20000185 PARAMETER Experiment Name: At_Roots__P Parameter: Organism Value: A. thaliana
  misc_feature: MA Experiment 20000185 PARAMETER Experiment Name: At_Roots__P Parameter: Tissue Value: Roots vs. Whole Plant
  misc_feature: MA Experiment ID: 20000235 Result: Up-regulated in Transcription
  misc_feature: MA Experiment 20000235 PARAMETER Experiment Name: At_Siliques_P Parameter: Age (day) Value: 21
  misc_feature: MA Experiment 20000235 PARAMETER Experiment Name: At_Siliques_P Parameter: Organism Value: A. thaliana
  misc_feature: MA Experiment 20000235 PARAMETER Experiment Name: At_Siliques_P Parameter: Plant Line Value: WS
  misc_feature: MA Experiment 20000235 PARAMETER Experiment Name: At_Siliques_P Parameter: Tissue Value: 5-10mm Siliques vs. Whole Plant
  misc_feature: MA Experiment ID: 20000439 Result: Up-regulated in Transcription
  misc_feature: MA Experiment 20000439 PARAMETER Experiment Name: At_Roots__P Parameter: Age (day) Value: 14 vs. 21
  misc_feature: MA Experiment 20000439 PARAMETER Experiment Name: At_Roots__P Parameter: Organism Value: A. thaliana
  misc_feature: MA Experiment 20000439 PARAMETER Experiment Name: At_Roots__P Parameter: Tissue Value: Roots vs. Whole Plant
  misc_feature: MA Experiment ID: 20000574 Result: Up-regulated in Transcription
  misc_feature: MA Experiment 20000574 PARAMETER Experiment Name: At_100uM_ABA_Mutants__P Parameter: Organism Value: A. thaliana
  misc_feature: MA Experiment 20000574 PARAMETER Experiment Name: At_100uM_ABA_Mutants__P Parameter: Plant Line Value: CS23 vs. Ler wt
  misc_feature: MA Experiment 20000574 PARAMETER Experiment Name: At_100uM_ABA_Mutants__P Parameter: Timepoint (hr) Value: N/A
  misc_feature: MA Experiment 20000574 PARAMETER Experiment Name: At_100uM_ABA_Mutants__P Parameter: Tissue Value: Whole Plant
  misc_feature: MA Experiment 20000574 PARAMETER Experiment Name: At_100uM_ABA_Mutants__P Parameter: Treatment Value: None

SEQ ID NO: 43611 - protein, 405 aa, Arabidopsis thaliana; identical to SEQ ID NO: 28643
  peptide (1)..(405): Ceres Seq. ID no. 15222734
  misc_feature (84)..(401): Pfam Name: Aminotransferase class I and II Pfam Description: Aminotransferase class I and II
  misc_feature (84)..(401): Pfam Name: Aminotransferase class I and II Pfam Description: Aminotransferase class I and II
  misc_feature (1)..(405): Homolog of NCBI NO: 693690 NR Description: aspartate aminotransferase
  misc_feature (1)..(405): Homolog of NCBI NO: 693690 NR Description: aspartate aminotransferase
  misc_feature (1)..(405): Homolog of NCBI NO: 15239772 NR Description: aspartate aminotransferase, cytoplasmic isozyme 1
  misc_feature (1)..(405): Homolog of NCBI NO: 15239772 NR Description: aspartate aminotransferase, cytoplasmic isozyme 1

SEQ ID NO: 43612 - DNA, 1693 bp, Arabidopsis thaliana; identical to SEQ ID NO: 20808
  misc_feature (1)..(1693): Ceres Seq. ID no. 13509182
  misc_feature: MA Experiment ID: 108434 Result: Up-regulated in Transcription
  misc_feature: MA Experiment 108434 PARAMETER Experiment Name: At_Root_Tips_cDNA_P Parameter: Tissue Value: Root Tips
  misc_feature: MA Experiment ID: 108435 Result: Up-regulated in Transcription
  misc_feature: MA Experiment 108435 PARAMETER Experiment Name: At_stm_Mutants_cDNA_P Parameter: Plant Line Value: wt Landsburg vs stm
  misc_feature: MA Experiment 108435 PARAMETER Experiment Name: At_stm_Mutants_cDNA_P Parameter: Tissue Value: Shoot Apical Meristem Region
  misc_feature: MA Experiment ID: 108461 Result: Down-regulated in Transcription
  misc_feature: MA Experiment 108461 PARAMETER Experiment Name: At_Germinating_Seeds_cDNA_P Parameter: Age (day) Value: 1 vs. 0
  misc_feature: MA Experiment 108461 PARAMETER Experiment Name: At_Germinating_Seeds_cDNA_P Parameter: Tissue Value: Germinating Seeds
  misc_feature: MA Experiment ID: 108462 Result: Down-regulated in Transcription
  misc_feature: MA Experiment 108462 PARAMETER Experiment Name: At_Germinating_Seeds_cDNA_P Parameter: Age (day) Value: 2 vs. 0
  misc_feature: MA Experiment 108462 PARAMETER Experiment Name: At_Germinating_Seeds_cDNA_P Parameter: Tissue Value: Germinating Seeds
  misc_feature: MA Experiment ID: 108463 Result: Down-regulated in Transcription
  misc_feature: MA Experiment 108463 PARAMETER Experiment Name: At_Germinating_Seeds_cDNA_P Parameter: Age (day) Value: 3 vs. 0
  misc_feature: MA Experiment 108463 PARAMETER Experiment Name: At_Germinating_Seeds_cDNA_P Parameter: Tissue Value: Germinating Seeds
  misc_feature: MA Experiment ID: 108464 Result: Down-regulated in Transcription
  misc_feature: MA Experiment 108464 PARAMETER Experiment Name: At_Germinating_Seeds_cDNA_P Parameter: Age (day) Value: 4 vs. 0
  misc_feature: MA Experiment 108464 PARAMETER Experiment Name: At_Germinating_Seeds_cDNA_P Parameter: Tissue Value: Germinating Seeds
  misc_feature: MA Experiment ID: 20000180 Result: Down-regulated in Transcription
  misc_feature: MA Experiment 20000180 PARAMETER Experiment Name: At_Germinating_Seeds_P Parameter: Age (hr) Value: 24 vs. 0
  misc_feature: MA Experiment 20000180 PARAMETER Experiment Name: At_Germinating_Seeds_P Parameter: Tissue Value: Germinating Seeds
  misc_feature: MA Experiment ID: 20001558 Result: Up-regulated in Transcription
  misc_feature: MA Experiment 20001558 PARAMETER Experiment Name: At_Drought_Soil_Dry_P Parameter: Age (day) Value: 27
  misc_feature: MA Experiment 20001558 PARAMETER Experiment Name: At_Drought_Soil_Dry_P Parameter: Organism Value: A. thaliana
  misc_feature: MA Experiment 20001558 PARAMETER Experiment Name: At_Drought_Soil_Dry_P Parameter: Plant Line Value: WS
  misc_feature: MA Experiment 20001558 PARAMETER Experiment Name: At_Drought_Soil_Dry_P Parameter: Post Timepoint (hr) Value: 6
  misc_feature: MA Experiment 20001558 PARAMETER Experiment Name: At_Drought_Soil_Dry_P Parameter: Post-Treatment Value: Re-Water vs. No Drought
  misc_feature: MA Experiment 20001558 PARAMETER Experiment Name: At_Drought_Soil_Dry_P Parameter: Timepoint (day) Value: 13
  misc_feature: MA Experiment 20001558 PARAMETER Experiment Name: At_Drought_Soil_Dry_P Parameter: Treatment Value: Drought vs. No Drought

SEQ ID NO: 43613 - protein, 458 aa, Arabidopsis thaliana; identical to SEQ ID NO: 20809
  peptide (1)..(458): Ceres Seq. ID no. 13509183
  misc_feature (90)..(297): Pfam Name: DEAD/DEAH box helicase Pfam Description: DEAD/DEAH box helicase
  misc_feature (90)..(297): Pfam Name: DEAD/DEAH box helicase Pfam Description: DEAD/DEAH box helicase
  misc_feature (42)..(277): Homolog of NCBI NO: 21040373 NR Description: DEAD/H (Asp-Glu-Ala-Asp/His) box polypeptide 39
  misc_feature (42)..(456): Homolog of NCBI NO: 16758334 NR Description: nuclear RNA helicase, DECD variant of DEAD box
  misc_feature (37)..(456): Homolog of NCBI NO: 28278325 NR Description: Unknown (protein for MGC:55433) [Danio rerio]
  misc_feature (115)..(458): Homolog of NCBI NO: 30683509 NR Description: DEAD/DEAH box helicase, putative [Arabidopsis
  misc_feature (34)..(458): Homolog of NCBI NO: 34913862 NR Description: putative DEAD BOX RNA helicase
  misc_feature (42)..(277): Homolog of NCBI NO: 21040373 NR Description: DEAD/H (Asp-Glu-Ala-Asp/His) box polypeptide 39
  misc_feature (37)..(456): Homolog of NCBI NO: 28278325 NR Description: Unknown (protein for MGC:55433) [Danio rerio]
  misc_feature (34)..(458): Homolog of NCBI NO: 34913862 NR Description: putative DEAD BOX RNA helicase
  misc_feature (8)..(458): Homolog of NCBI NO: 11358797 NR Description: RNA helicase RH15 [imported] - Arabidopsis
  misc_feature (32)..(458): Homolog of NCBI NO: 18416493 NR Description: DEAD/DEAH box helicase, putative [Arabidopsis
  misc_feature (32)..(458): Homolog of NCBI NO: 18416486 NR Description: DEAD/DEAH box helicase, putative [Arabidopsis
  misc_feature (32)..(455): Homolog of NCBI NO: 8953382 NR Description: DEAD BOX RNA helicase RH15 [Arabidopsis thaliana]
  misc_feature (32)..(455): Homolog of NCBI NO: 8953379 NR Description: DEAD BOX RNA helicase RH15-like protein
  misc_feature (115)..(458): Homolog of NCBI NO: 30683509 NR Description: DEAD/DEAH box helicase, putative [Arabidopsis
  misc_feature (42)..(456): Homolog of NCBI NO: 16758334 NR Description: nuclear RNA helicase, DECD variant of DEAD box
  misc_feature (32)..(455): Homolog of NCBI NO: 8953379 NR Description: DEAD BOX RNA helicase RH15-like protein
  misc_feature (32)..(455): Homolog of NCBI NO: 8953382 NR Description: DEAD BOX RNA helicase RH15 [Arabidopsis thaliana]
  misc_feature (32)..(458): Homolog of NCBI NO: 18416486 NR Description: DEAD/DEAH box helicase, putative [Arabidopsis
  misc_feature (32)..(458): Homolog of NCBI NO: 18416493 NR Description: DEAD/DEAH box helicase, putative [Arabidopsis
  misc_feature (8)..(458): Homolog of NCBI NO: 11358797 NR Description: RNA helicase RH15 [imported] - Arabidopsis

SEQ ID NO: 43614 - protein, 427 aa, Arabidopsis thaliana; identical to SEQ ID NO: 20810
  peptide (1)..(427): Ceres Seq. ID no. 13509184
  misc_feature (59)..(266): Pfam Name: DEAD/DEAH box helicase Pfam Description: DEAD/DEAH box helicase
  misc_feature (59)..(266): Pfam Name: DEAD/DEAH box helicase Pfam Description: DEAD/DEAH box helicase
  misc_feature (11)..(246): Homolog of NCBI NO: 21040373 NR Description: DEAD/H (Asp-Glu-Ala-Asp/His) box polypeptide 39
  misc_feature (11)..(425): Homolog of NCBI NO: 16758334 NR Description: nuclear RNA helicase, DECD variant of DEAD box
  misc_feature (6)..(425): Homolog of NCBI NO: 28278325 NR Description: Unknown (protein for MGC:55433) [Danio rerio]
  misc_feature (84)..(427): Homolog of NCBI NO: 30683509 NR Description: DEAD/DEAH box helicase, putative [Arabidopsis
  misc_feature (3)..(427): Homolog of NCBI NO: 34913862 NR Description: putative DEAD BOX RNA helicase
  misc_feature (11)..(246): Homolog of NCBI NO: 21040373 NR Description: DEAD/H (Asp-Glu-Ala-Asp/His) box polypeptide 39
  misc_feature (6)..(425): Homolog of NCBI NO: 28278325 NR Description: Unknown (protein for MGC:55433) [Danio rerio]
  misc_feature (3)..(427): Homolog of NCBI NO: 34913862 NR Description: putative DEAD BOX RNA helicase
  misc_feature (1)..(427): Homolog of NCBI NO: 11358797 NR Description: RNA helicase RH15 [imported] - Arabidopsis
  misc_feature (1)..(427): Homolog of NCBI NO: 18416493 NR Description: DEAD/DEAH box helicase, putative [Arabidopsis
  misc_feature (1)..(427): Homolog of NCBI NO: 18416486 NR Description: DEAD/DEAH box helicase, putative [Arabidopsis
  misc_feature (1)..(424): Homolog of NCBI NO: 8953382 NR Description: DEAD BOX RNA helicase RH15 [Arabidopsis thaliana]
  misc_feature (1)..(424): Homolog of NCBI NO: 8953379 NR Description: DEAD BOX RNA helicase RH15-like protein
  misc_feature (84)..(427): Homolog of NCBI NO: 30683509 NR Description: DEAD/DEAH box helicase, putative [Arabidopsis
  misc_feature (11)..(425): Homolog of NCBI NO: 16758334 NR Description: nuclear RNA helicase, DECD variant of DEAD box
  misc_feature (1)..(424): Homolog of NCBI NO: 8953379 NR Description: DEAD BOX RNA helicase RH15-like protein
  misc_feature (1)..(424): Homolog of NCBI NO: 8953382 NR Description: DEAD BOX RNA helicase RH15 [Arabidopsis thaliana]
  misc_feature (1)..(427): Homolog of NCBI NO: 18416486 NR Description: DEAD/DEAH box helicase, putative [Arabidopsis
  misc_feature (1)..(427): Homolog of NCBI NO: 18416493 NR Description: DEAD/DEAH box helicase, putative [Arabidopsis
  misc_feature (1)..(427): Homolog of NCBI NO: 11358797 NR Description: RNA helicase RH15 [imported] - Arabidopsis

SEQ ID NO: 43615 - protein, 344 aa, Arabidopsis thaliana; identical to SEQ ID NO: 20811
  peptide (1)..(344): Ceres Seq. ID no. 13509185
  misc_feature (1)..(183): Pfam Name: DEAD/DEAH box helicase Pfam Description: DEAD/DEAH box helicase
  misc_feature (1)..(183): Pfam Name: DEAD/DEAH box helicase Pfam Description: DEAD/DEAH box helicase
  misc_feature (1)..(163): Homolog of NCBI NO: 21040373 NR Description: DEAD/H (Asp-Glu-Ala-Asp/His) box polypeptide 39
  misc_feature (1)..(342): Homolog of NCBI NO: 16758334 NR Description: nuclear RNA helicase, DECD variant of DEAD box
  misc_feature (1)..(342): Homolog of NCBI NO: 28278325 NR Description: Unknown (protein for MGC:55433) [Danio rerio]
  misc_feature (1)..(344): Homolog of NCBI NO: 30683509 NR Description: DEAD/DEAH box helicase, putative [Arabidopsis
  misc_feature (1)..(344): Homolog of NCBI NO: 34913862 NR Description: putative DEAD BOX RNA helicase
  misc_feature (1)..(163): Homolog of NCBI NO: 21040373 NR Description: DEAD/H (Asp-Glu-Ala-Asp/His) box polypeptide 39
  misc_feature (1)..(342): Homolog of NCBI NO: 28278325 NR Description: Unknown (protein for MGC:55433) [Danio rerio]
  misc_feature (1)..(344): Homolog of NCBI NO: 34913862 NR Description: putative DEAD BOX RNA helicase
  misc_feature (1)..(344): Homolog of NCBI NO: 11358797 NR Description: RNA helicase RH15 [imported] - Arabidopsis
  misc_feature (1)..(344): Homolog of NCBI NO: 18416493 NR Description: DEAD/DEAH box helicase, putative [Arabidopsis
  misc_feature (1)..(344): Homolog of NCBI NO: 18416486 NR Description: DEAD/DEAH box helicase, putative [Arabidopsis
  misc_feature (1)..(341): Homolog of NCBI NO: 8953382 NR Description: DEAD BOX RNA helicase RH15 [Arabidopsis thaliana]
  misc_feature (1)..(341): Homolog of NCBI NO: 8953379 NR Description: DEAD BOX RNA helicase RH15-like protein
  misc_feature (1)..(344): Homolog of NCBI NO: 30683509 NR Description: DEAD/DEAH box helicase, putative [Arabidopsis
  misc_feature (1)..(342): Homolog of NCBI NO: 16758334 NR Description: nuclear RNA helicase, DECD variant of DEAD box
  misc_feature (1)..(341): Homolog of NCBI NO: 8953379 NR Description: DEAD BOX RNA helicase RH15-like protein
  misc_feature (1)..(341): Homolog of NCBI NO: 8953382 NR Description: DEAD BOX RNA helicase RH15 [Arabidopsis thaliana]
  misc_feature (1)..(344): Homolog of NCBI NO: 18416486 NR Description: DEAD/DEAH box helicase, putative [Arabidopsis
  misc_feature (1)..(344): Homolog of NCBI NO: 18416493 NR Description: DEAD/DEAH box helicase, putative [Arabidopsis
  misc_feature (1)..(344): Homolog of NCBI NO: 11358797 NR Description: RNA helicase RH15 [imported] - Arabidopsis

SEQ ID NO: 43616 - DNA, 2108 bp, Arabidopsis thaliana
  misc_feature (1)..(2108): Ceres Seq. ID no. 13493961
  misc_feature: MA Experiment ID: 108573 Result: Up-regulated in Transcription
  misc_feature: MA Experiment 108573 PARAMETER Experiment Name: At_Drought_cDNA_P Parameter: Timepoint (hr) Value: 6
  misc_feature: MA Experiment 108573 PARAMETER Experiment Name: At_Drought_cDNA_P Parameter: Tissue Value: Aerial
  misc_feature: MA Experiment 108573 PARAMETER Experiment Name: At_Drought_cDNA_P Parameter: Treatment Value: Drought vs. No Drought
  misc_feature: MA Experiment ID: 20000111 Result: Down-regulated in Transcription
  misc_feature: MA Experiment 20000111 PARAMETER Experiment Name: At_42deg_Heat_cDNA_P Parameter: Temperature (deg C) Value: 42 vs. 22
  misc_feature: MA Experiment 20000111 PARAMETER Experiment Name: At_42deg_Heat_cDNA_P Parameter: Timepoint (hr) Value: 6
  misc_feature: MA Experiment 20000111 PARAMETER Experiment Name: At_42deg_Heat_cDNA_P Parameter: Tissue Value: Aerial
  misc_feature: MA Experiment ID: 20000144 Result: Down-regulated in Transcription
  misc_feature: MA Experiment 20000144 PARAMETER Experiment Name: At_42deg_Heat_cDNA_P Parameter: Temperature (deg C) Value: 42 vs. 22
  misc_feature: MA Experiment 20000144 PARAMETER Experiment Name: At_42deg_Heat_cDNA_P Parameter: Timepoint (hr) Value: 1
  misc_feature: MA Experiment 20000144 PARAMETER Experiment Name: At_42deg_Heat_cDNA_P Parameter: Tissue Value: Aerial
  misc_feature: MA Experiment ID: 20000171 Result: Down-regulated in Transcription
  misc_feature: MA Experiment 20000171 PARAMETER Experiment Name: At_42deg_Heat_P Parameter: Age (day) Value: 14
  misc_feature: MA Experiment 20000171 PARAMETER Experiment Name: At_42deg_Heat_P Parameter: Organism Value: A. thaliana
  misc_feature: MA Experiment 20000171 PARAMETER Experiment Name: At_42deg_Heat_P Parameter: Plant Line Value: WS
  misc_feature: MA Experiment 20000171 PARAMETER Experiment Name: At_42deg_Heat_P Parameter: Temperature (deg C) Value: 42 vs. 22
  misc_feature: MA Experiment 20000171 PARAMETER Experiment Name: At_42deg_Heat_P Parameter: Timepoint (hr) Value: 1
  misc_feature: MA Experiment 20000171 PARAMETER Experiment Name: At_42deg_Heat_P Parameter: Tissue Value: Aerial
  misc_feature: MA Experiment ID: 20000173 Result: Down-regulated in Transcription
  misc_feature: MA Experiment 20000173 PARAMETER Experiment Name: At_42deg_Heat_P Parameter: Age (day) Value: 14
  misc_feature: MA Experiment 20000173 PARAMETER Experiment Name: At_42deg_Heat_P Parameter: Organism Value: A. thaliana
  misc_feature: MA Experiment 20000173 PARAMETER Experiment Name: At_42deg_Heat_P Parameter: Plant Line Value: WS
  misc_feature: MA Experiment 20000173 PARAMETER Experiment Name: At_42deg_Heat_P Parameter: Temperature (deg C) Value: 42 vs. 22
  misc_feature: MA Experiment 20000173 PARAMETER Experiment Name: At_42deg_Heat_P Parameter: Timepoint (hr) Value: 6
  misc_feature: MA Experiment 20000173 PARAMETER Experiment Name: At_42deg_Heat_P Parameter: Tissue Value: Aerial
  misc_feature: MA Experiment ID: 20000184 Result: Down-regulated in Transcription
  misc_feature: MA Experiment 20000184 PARAMETER Experiment Name: At_Shoots__P Parameter: Age (day) Value: 7
  misc_feature: MA Experiment 20000184 PARAMETER Experiment Name: At_Shoots__P Parameter: Tissue Value: Shoots vs. Whole Plant
  misc_feature: MA Experiment ID: 20000794 Result: Up-regulated in Transcription
  misc_feature: MA Experiment 20000794 PARAMETER Experiment Name: At_Petals_P Parameter: Age (day) Value: 23-25 days
  misc_feature: MA Experiment 20000794 PARAMETER Experiment Name: At_Petals_P Parameter: Plant Line Value: WS
  misc_feature: MA Experiment 20000794 PARAMETER Experiment Name: At_Petals_P Parameter: Tissue Value: Petals vs. Whole plant
acccccccccactccccccctcgcatcccgcgcacacccaccgaaacaggaccgcgcccggccgcgcgcccccgccctccctcactcacccataccgtgctccctcactcactcatcaaataacccgtgctcacacacacgctacccccgcacccaaccaacctatcaatcgacacacgcaagaccagcatgcaaacagcacaacaagctgccctgtctcactcccaaccccgcgagcgaactatctcacctccgggcggatcaaaagcgcgaactccctcgcaatcttatccacatctaactcccgaagacgcaagcacccgaatccaagaattagagaatataacaatgaaccaccacactacaattaatcccccccccccccccccgacaactaatcataggcttctccatcttcttgtctgcaggatgatgcaatttttcagacaattttcttccaaaatcttttcgtaattctgttttatttttcaacgttttaggtttttaccaatccgccgtagttatatccaacattaatttttttccctcttctcagaaaaaaataaaattcaactcatctctagagtttttaggttcttccaagaaattgaatttggaaggaggctttgatgggtttgaattttccataatcgtcccttgtttacgactcttgttgtttgaaaatgctatggctcgtgaggggatgttgttttgattttgggaaagtcttgtttgaatggtcacggcttttctgaacattcgcgtgttctttcttgtctcggctctgcttcgaaatgtctctcggccaagaaaatgttgatcctgttgaagtttcagggtcgcatgcttgcttatatgaacttttatgttctgagacacccaaatggactcctcttagggttgaagatttgcaaacatcttcttctgatcccagagatcggttggagaagttgctgaagcaacctgggaataaatattgtgctgactgtggctctcctgaaccaaaatgggtatcgttgagtcttggtgtatttatctgcattaagtgttctggtgtacacagaagtcttggagttcatatatcaaaggttctatcagtaaagctagacgagtggacagatgatcaggttgacatgcttgtaggttacggtggaaacacggcagtgaacgaaagattcgaagcttgcaacatcgaccagtcaaagaaaccaaaaccagattctactaatgaggaacgaaatgatttcattagaaaaaaatatgagcagcaccagtttatggatccaaaggatggtgctttgtgcacttatcagcagcctagcagaacaaacacttcaccaccgtctttatgttctgcaagccaccgttctacaaaaaaccgtattggtcatgcatttaggaatagctggggaagaagagaatctgatcacaaaggaccaaagaagagcaattccatggcaggtatggttgagtttgtggggttgattaaggttaacgtggtaaaaggaaccaaccttgcggttcgagacgtgatgaccagcgatccttatgttatccttgctcttggccaacaatcggtaaaaacacgggtgataaagaacaacttgaatcctgtgtggaatgagacgctaatgctttcgatacccgagcccatgcctcctctcaaagtgctagtgtacgacaaggatacattctcgacagatgatttcatgggagaggcagagatagacatacaaccattggtgagtgcagcaaaagcatacgagacatcgagcataaaggaaccgatgcagctgggaagttgggtggcgagcaaagagaacacattggtgagtgatggcataatcttacttgaagacgggaaagtgaaacaagacatttcacttaggctacaaaatgttgaaagaggtgttcttgagatccagcttgaatgtcttcctctcactcaatgatgatactttcttcttcatccctcttctttttttttttctttaaaagatttatttctaaatttatagtgaagaaaagatgctgctactttcttgttgttccacctcaaacaaaacctctgtaaaaaaacaacaccatgatttgatttgatgattctt

SEQ ID NO: 43617 - protein, 385 aa, Arabidopsis thaliana
  peptide (1)..(385): Ceres Seq. ID no. 13493962
  misc_feature (47)..(169): Pfam Name: Putative GTPase activating protein for Arf Pfam Description: Putative GTPase activating protein for Arf
  misc_feature (49)..(385): Homolog of NCBI NO: 7486586 NR Description: hypothetical protein F7J7.100 - Arabidopsis
  misc_feature (49)..(385): Homolog of NCBI NO: 21594052 NR Description: putative GTPase activating protein [Arabidopsis
  misc_feature (49)..(385): Homolog of NCBI NO: 18415638 NR Description: zinc finger and C2 domain protein (ZAC)
  misc_feature (49)..(164): Homolog of NCBI NO: 18412932 NR Description: zinc finger and C2 domain protein, putative
  misc_feature (183)..(385): Homolog of NCBI NO: 18412932 NR Description: zinc finger and C2 domain protein, putative
  misc_feature (49)..(164): Homolog of NCBI NO: 25407332 NR Description: hypothetical protein AT4g05330 [imported] -
  misc_feature (183)..(385): Homolog of NCBI NO: 25407332 NR Description: hypothetical protein AT4g05330 [imported] -
  misc_feature (48)..(385): Homolog of NCBI NO: 19386828 NR Description: putative zinc finger and C2 domain protein
  misc_feature (16)..(385): Homolog of NCBI NO: 6648206 NR Description: putative GTPase activating protein [Arabidopsis
  misc_feature (1)..(385): Homolog of NCBI NO: 30680493 NR Description: zinc finger and C2 domain protein, putative
MSLGQENVDPVEVSGSHACLYELLCSETPKWTPLRVEDLQTSSSDPRDRLEKLLKQPGNKYCADCGSPEPKWVSLSLGVFICIKCSGVHRSLGVHISKVLSVKLDEWTDDQVDMLVGYGGNTAVNERFEACNIDQSKKPKPDSTNEERNDFIRKKYEQHQFMDPKDGALCTYQQPSRTNTSPPSLCSASHRSTKNRIGHAFRNSWGRRESDHKGPKKSNSMAGMVEFVGLIKVNVVKGTNLAVRDVMTSDPYVILALGQQSVKTRVIKNNLNPVWNETLMLSIPEPMPPLKVLVYDKDTFSTDDFMGEAEIDIQPLVSAAKAYETSSIKEPMQLGSWVASKENTLVSDGIILLEDGKVKQDISLRLQNVERGVLEIQLECLPLTQ

SEQ ID NO: 43618 - protein, 272 aa, Arabidopsis thaliana
  peptide (1)..(272): Ceres Seq. ID no. 13493963
  misc_feature (1)..(56): Pfam Name: Putative GTPase activating protein for Arf Pfam Description: Putative GTPase activating protein for Arf
  misc_feature (1)..(272): Homolog of NCBI NO: 7486586 NR Description: hypothetical protein F7J7.100 - Arabidopsis
  misc_feature (1)..(272): Homolog of NCBI NO: 21594052 NR Description: putative GTPase activating protein [Arabidopsis
  misc_feature (1)..(272): Homolog of NCBI NO: 18415638 NR Description: zinc finger and C2 domain protein (ZAC)
  misc_feature (1)..(51): Homolog of NCBI NO: 18412932 NR Description: zinc finger and C2 domain protein, putative
  misc_feature (70)..(272): Homolog of NCBI NO: 18412932 NR Description: zinc finger and C2 domain protein, putative
  misc_feature (1)..(51): Homolog of NCBI NO: 25407332 NR Description: hypothetical protein AT4g05330 [imported] -
  misc_feature (70)..(272): Homolog of NCBI NO: 25407332 NR Description: hypothetical protein AT4g05330 [imported] -
  misc_feature (1)..(272): Homolog of NCBI NO: 19386828 NR Description: putative zinc finger and C2 domain protein
  misc_feature (1)..(272): Homolog of NCBI NO: 6648206 NR Description: putative GTPase activating protein [Arabidopsis
  misc_feature (1)..(272): Homolog of NCBI NO: 30680493 NR Description: zinc finger and C2 domain protein, putative
MLVGYGGNTAVNERFEACNIDQSKKPKPDSTNEERNDFIRKKYEQHQFMDPKDGALCTYQQPSRTNTSPPSLCSASHRSTKNRIGHAFRNSWGRRESDHKGPKKSNSMAGMVEFVGLIKVNVVKGTNLAVRDVMTSDPYVILALGQQSVKTRVIKNNLNPVWNETLMLSIPEPMPPLKVLVYDKDTFSTDDFMGEAEIDIQPLVSAAKAYETSSIKEPMQLGSWVASKENTLVSDGIILLEDGKVKQDISLRLQNVERGVLEIQLECLPLTQ

SEQ ID NO: 43619 - protein, 224 aa, Arabidopsis thaliana
  peptide (1)..(224): Ceres Seq. ID no. 13493964
  misc_feature (70)..(149): Pfam Name: C2 domain Pfam Description: C2 domain
  misc_feature (63)..(223): Homolog of NCBI NO: 18408493 NR Description: C2 domain-containing protein [Arabidopsis
  misc_feature (55)..(220): Homolog of NCBI NO: 15223248 NR Description: hypothetical protein [Arabidopsis thaliana]
  misc_feature (1)..(224): Homolog of NCBI NO: 7486586 NR Description: hypothetical protein F7J7.100 - Arabidopsis
  misc_feature (1)..(224): Homolog of NCBI NO: 21594052 NR Description: putative GTPase activating protein [Arabidopsis
  misc_feature (1)..(224): Homolog of NCBI NO: 18415638 NR Description: zinc finger and C2 domain protein (ZAC)
  misc_feature (22)..(224): Homolog of NCBI NO: 18412932 NR Description: zinc finger and C2 domain protein, putative
  misc_feature (22)..(224): Homolog of NCBI NO: 25407332 NR Description: hypothetical protein AT4g05330 [imported] -
  misc_feature (1)..(224): Homolog of NCBI NO: 19386828 NR Description: putative zinc finger and C2 domain protein
  misc_feature (1)..(224): Homolog of NCBI NO: 6648206 NR Description: putative GTPase activating protein [Arabidopsis
  misc_feature (1)..(224): Homolog of NCBI NO: 30680493 NR Description: zinc finger and C2 domain protein, putative
MDPKDGALCTYQQPSRTNTSPPSLCSASHRSTKNRIGHAFRNSWGRRESDHKGPKKSNSMAGMVEFVGLIKVNVVKGTNLAVRDVMTSDPYVILALGQQSVKTRVIKNNLNPVWNETLMLSIPEPMPPLKVLVYDKDTFSTDDFMGEAEIDIQPLVSAAKAYETSSIKEPMQLGSWVASKENTLVSDGIILLEDGKVKQDISLRLQNVERGVLEIQLECLPLTQ

SEQ ID NO: 43620 - DNA, 1192 bp, Arabidopsis thaliana
  misc_feature (1)..(1192): Ceres Seq. ID no. 12331001
  misc_feature: MA Experiment ID: 108434 Result: Down-regulated in Transcription
  misc_feature: MA Experiment 108434 PARAMETER Experiment Name: At_Root_Tips_cDNA_P Parameter: Tissue Value: Root Tips
  misc_feature: MA Experiment ID: 108595 Result: Down-regulated in Transcription
  misc_feature: MA Experiment 108595 PARAMETER Experiment Name: At_Ler-pi_Ovule_cDNA_P Parameter: Plant Line Value: null
  misc_feature: MA Experiment ID: 108608 Result: Down-regulated in Transcription
  misc_feature: MA Experiment 108608 PARAMETER Experiment Name: At_100uM_ABA_cDNA_P Parameter: Timepoint (hr) Value: 1
  misc_feature: MA Experiment 108608 PARAMETER Experiment Name: At_100uM_ABA_cDNA_P Parameter: Tissue Value: Aerial
  misc_feature: MA Experiment 108608 PARAMETER Experiment Name: At_100uM_ABA_cDNA_P Parameter: Treatment Value: 100uM ABA vs. No Treatment
  misc_feature: MA Experiment ID: 20000070 Result: Down-regulated in Transcription
  misc_feature: MA Experiment 20000070 PARAMETER Experiment Name: At_100uM_ABA_Mutants_cDNA_P Parameter: Plant Line Value: CS24
  misc_feature: MA Experiment 20000070 PARAMETER Experiment Name: At_100uM_ABA_Mutants_cDNA_P Parameter: Timepoint (hr) Value: 6
  misc_feature: MA Experiment 20000070 PARAMETER Experiment Name: At_100uM_ABA_Mutants_cDNA_P Parameter: Tissue Value: Aerial
  misc_feature: MA Experiment 20000070 PARAMETER Experiment Name: At_100uM_ABA_Mutants_cDNA_P Parameter: Treatment Value: 100uM ABA vs. No Treatment
  misc_feature: MA Experiment ID: 20000087 Result: Down-regulated in Transcription
  misc_feature: MA Experiment 20000087 PARAMETER Experiment Name: At_100uM_ABA_Mutants_cDNA_P Parameter: Plant Line Value: WS
  misc_feature: MA Experiment 20000087 PARAMETER Experiment Name: At_100uM_ABA_Mutants_cDNA_P Parameter: Timepoint (hr) Value: 6
  misc_feature: MA Experiment 20000087 PARAMETER Experiment Name: At_100uM_ABA_Mutants_cDNA_P Parameter: Tissue Value: Aerial
  misc_feature: MA Experiment 20000087 PARAMETER Experiment Name: At_100uM_ABA_Mutants_cDNA_P Parameter: Treatment Value: 100uM ABA vs. No Treatment
  misc_feature: MA Experiment ID: 20000117 Result: Down-regulated in Transcription
  misc_feature: MA Experiment 20000117 PARAMETER Experiment Name: At_100uM_ABA_Mutants_cDNA_P Parameter: Plant Line Value: Columbia
  misc_feature: MA Experiment 20000117 PARAMETER Experiment Name: At_100uM_ABA_Mutants_cDNA_P Parameter: Timepoint (hr) Value: 6
  misc_feature: MA Experiment 20000117 PARAMETER Experiment Name: At_100uM_ABA_Mutants_cDNA_P Parameter: Tissue Value: Aerial
  misc_feature: MA Experiment 20000117 PARAMETER Experiment Name: At_100uM_ABA_Mutants_cDNA_P Parameter: Treatment Value: 100uM ABA vs. No Treatment
  misc_feature: MA Experiment ID: 20000264 Result: Down-regulated in Transcription
  misc_feature: MA Experiment 20000264 PARAMETER Experiment Name: At_Open_Flower_P Parameter: Age (day) Value: 21
  misc_feature: MA Experiment 20000264 PARAMETER Experiment Name: At_Open_Flower_P Parameter: Plant Line Value: WS
  misc_feature: MA Experiment 20000264 PARAMETER Experiment Name: At_Open_Flower_P Parameter: Tissue Value: Open Flower vs. Whole Plant
  misc_feature: MA Experiment ID: 20000265 Result: Down-regulated in Transcription
  misc_feature: MA Experiment 20000265 PARAMETER Experiment Name: At_Open_Flower_P Parameter: Age (day) Value: 21
  misc_feature: MA Experiment 20000265 PARAMETER Experiment Name: At_Open_Flower_P Parameter: Plant Line Value: WS
  misc_feature: MA Experiment 20000265 PARAMETER Experiment Name: At_Open_Flower_P Parameter: Tissue Value: Closed Flower vs. Whole Plant
  misc_feature: MA Experiment ID: 20000794 Result: Down-regulated in Transcription
  misc_feature: MA Experiment 20000794 PARAMETER Experiment Name: At_Petals_P Parameter: Age (day) Value: 23-25 days
  misc_feature: MA Experiment 20000794 PARAMETER Experiment Name: At_Petals_P Parameter: Plant Line Value: WS
  misc_feature: MA Experiment 20000794 PARAMETER Experiment Name: At_Petals_P Parameter: Tissue Value: Petals vs. Whole plant
  misc_feature: MA Experiment ID: 20001911 Result: Up-regulated in Transcription
  misc_feature: MA Experiment 20001911 PARAMETER Experiment Name: At_Drought_Reproduction_P Parameter: Age (day) Value: 40
  misc_feature: MA Experiment 20001911 PARAMETER Experiment Name: At_Drought_Reproduction_P Parameter: Organism Value: A. thaliana
  misc_feature: MA Experiment 20001911 PARAMETER Experiment Name: At_Drought_Reproduction_P Parameter: Plant Line Value: WS
  misc_feature: MA Experiment 20001911 PARAMETER Experiment Name: At_Drought_Reproduction_P Parameter: Timepoint (day) Value: 10
  misc_feature: MA Experiment 20001911 PARAMETER Experiment Name: At_Drought_Reproduction_P Parameter: Tissue Value: Flowers
  misc_feature: MA Experiment 20001911 PARAMETER Experiment Name: At_Drought_Reproduction_P Parameter: Treatment Value: Drought vs. No Drought
attagagaagaaaaaaagaatggcgaatccttggtgggtagggaatgttgcgatcggtggagttgagagtccagtgacgtcatcagctccttctttgcaccacagaaacagtaacaacaacaacccaccgactatgactcgttcggatccaagattggaccatgacttcaccaccaacaacagtggaagccctaatactcagactcagagccaagaagaacagaacagcagagacgagcaaccagctgttgaacccggatccggatccgggtctacgggtcgtcgtcctagaggtagacctcctggttccaagaacaaaccaaagagtccagttgttgttaccaaagaaagccctaactctctccagagccatgttcttgagattgctacgggagctgacgtggcggaaagcttaaacgcctttgctcgtagacgcggccggggcgtttcggtgctgagcggtagtggtttggttactaatgttactctgcgtcagcctgctgcatccggtggagttgttagtttacgtggtcagtttgagatcttgtctatgtgtggggcttttcttcctacgtctggctctcctgctgcagccgctggtttaaccatttacttagctggagctcaaggtcaagttgtgggaggtggagttgctggcccgcttattgcctctggacccgttattgtgatagctgctacgttttgcaatgccacttatgagaggttaccgattgaggaagaacaacagcaagagcagccgcttcaactagaagatgggaagaagcagaaagaagagaatgatgataacgagagtgggaataacggaaacgaaggatcgatgcagccgccgatgtataatatgcctcctaattttatcccaaatggtcatcaaatggctcaacacgacgtgtattggggtggtcctccgcctcgtgctcctccttcgtattgattagttaaataggcggtggttggtgcgttctttttactggaatgattatattttccattaggatggttaggcttttgtttattaaagctatcaagtttcttttttttttacgaataattcggatgacaattagctagtgtttgtttgtttgttttgtggcggcttttctgacttgactattttgatcgtggatagctttgtatgaaagtgaattgattgtagaatcgtcttttgaatttt

SEQ ID NO: 43621 - protein, 316 aa, Arabidopsis thaliana
  peptide (1)..(316): Ceres Seq. ID no. 12331002
  misc_feature (69)..(304): Homolog of NCBI NO: 7486025 NR Description: hypothetical protein F23E12.50 - Arabidopsis
  misc_feature (32)..(294): Homolog of NCBI NO: 15236657 NR Description: hypothetical protein
  misc_feature (32)..(295): Homolog of NCBI NO: 38346718 NR Description: OSJNBa0086O06.16 [Oryza sativa (japonica
  misc_feature (64)..(310): Homolog of NCBI NO: 15225475 NR Description: putative AT-hook DNA-binding protein; protein id:
  misc_feature (50)..(308): Homolog of NCBI NO: 15223074 NR Description: unknown protein; protein id: At1g76500.1
  misc_feature (7)..(295): Homolog of NCBI NO: 18396925 NR Description: expressed protein
  misc_feature (75)..(314): Homolog of NCBI NO: 34902080 NR Description: unknown protein [Oryza sativa (japonica
  misc_feature (70)..(309): Homolog of NCBI NO: 21593180 NR Description: putative DNA-binding protein [Arabidopsis
  misc_feature (70)..(309): Homolog of NCBI NO: 18414224 NR Description: Expressed protein
  misc_feature (7)..(316): Homolog of NCBI NO: 15233302 NR Description: putative protein
LEKKKRMANPWWVGNVAIGGVESPVTSSAPSLHHRNSNNNNPPTMTRSDPRLDHDFTTNNSGSPNTQTQSQEEQNSRDEQPAVEPGSGSGSTGRRPRGRPPGSKNKPKSPVVVTKESPNSLQSHVLEIATGADVAESLNAFARRRGRGVSVLSGSGLVTNVTLRQPAASGGVVSLRGQFEILSMCGAFLPTSGSPAAAAGLTIYLAGAQGQVVGGGVAGPLIASGPVIVIAATFCNATYERLPIEEEQQQEQPLQLEDGKKQKEENDDNESGNNGNEGSMQPPMYNMPPNFIPNGHQMAQHDVYWGGPPPRAPPSY

SEQ ID NO: 43622 - protein, 310 aa, Arabidopsis thaliana
  peptide (1)..(310): Ceres Seq. ID no. 12331003
  misc_feature (63)..(298): Homolog of NCBI NO: 7486025 NR Description: hypothetical protein F23E12.50 - Arabidopsis
  misc_feature (26)..(288): Homolog of NCBI NO: 15236657 NR Description: hypothetical protein
  misc_feature (26)..(289): Homolog of NCBI NO: 38346718 NR Description: OSJNBa0086O06.16 [Oryza sativa (japonica
  misc_feature (58)..(304): Homolog of NCBI NO: 15225475 NR Description: putative AT-hook DNA-binding protein; protein id:
  misc_feature (44)..(302): Homolog of NCBI NO: 15223074 NR Description: unknown protein; protein id: At1g76500.1
  misc_feature (1)..(289): Homolog of NCBI NO: 18396925 NR Description: expressed protein
  misc_feature (69)..(308): Homolog of NCBI NO: 34902080 NR Description: unknown protein [Oryza sativa (japonica
  misc_feature (64)..(303): Homolog of NCBI NO: 21593180 NR Description: putative DNA-binding protein [Arabidopsis
  misc_feature (64)..(303): Homolog of NCBI NO: 18414224 NR Description: Expressed protein
  misc_feature (1)..(310): Homolog of NCBI NO: 15233302 NR Description: putative protein
MANPWWVGNVAIGGVESPVTSSAPSLHHRNSNNNNPPTMTRSDPRLDHDFTTNNSGSPNTQTQSQEEQNSRDEQPAVEPGSGSGSTGRRPRGRPPGSKNKPKSPVVVTKESPNSLQSHVLEIATGADVAESLNAFARRRGRGVSVLSGSGLVTNVTLRQPAASGGVVSLRGQFEILSMCGAFLPTSGSPAAAAGLTIYLAGAQGQVVGGGVAGPLIASGPVIVIAATFCNATYERLPIEEEQQQEQPLQLEDGKKQKEENDDNESGNNGNEGSMQPPMYNMPPNFIPNGHQMAQHDVYWGGPPPRAPPSY

SEQ ID NO: 43623 - protein, 272 aa, Arabidopsis thaliana
  peptide (1)..(272): Ceres Seq. ID no. 12331004
  misc_feature (25)..(260): Homolog of NCBI NO: 7486025 NR Description: hypothetical protein F23E12.50 - Arabidopsis
  misc_feature (1)..(250): Homolog of NCBI NO: 15236657 NR Description: hypothetical protein
  misc_feature (1)..(251): Homolog of NCBI NO: 38346718 NR Description: OSJNBa0086O06.16 [Oryza sativa (japonica
  misc_feature (20)..(266): Homolog of NCBI NO: 15225475 NR Description: putative AT-hook DNA-binding protein; protein id:
  misc_feature (6)..(264): Homolog of NCBI NO: 15223074 NR Description: unknown protein; protein id: At1g76500.1
  misc_feature (1)..(251): Homolog of NCBI NO: 18396925 NR Description: expressed protein
  misc_feature (31)..(270): Homolog of NCBI NO: 34902080 NR Description: unknown protein [Oryza sativa (japonica
  misc_feature (26)..(265): Homolog of NCBI NO: 21593180 NR Description: putative DNA-binding protein [Arabidopsis
  misc_feature (26)..(265): Homolog of NCBI NO: 18414224 NR Description: Expressed protein
  misc_feature (1)..(272): Homolog of NCBI NO: 15233302 NR Description: putative protein
MTRSDPRLDHDFTTNNSGSPNTQTQSQEEQNSRDEQPAVEPGSGSGSTGRRPRGRPPGSKNKPKSPVVVTKESPNSLQSHVLEIATGADVAESLNAFARRRGRGVSVLSGSGLVTNVTLRQPAASGGVVSLRGQFEILSMCGAFLPTSGSPAAAAGLTIYLAGAQGQVVGGGVAGPLIASGPVIVIAATFCNATYERLPIEEEQQQEQPLQLEDGKKQKEENDDNESGNNGNEGSMQPPMYNMPPNFIPNGHQMAQHDVYWGGPPPRAPPSY

SEQ ID NO: 43624 - DNA, 1211 bp, Arabidopsis thaliana
  misc_feature (1)..(1211): Ceres Seq. ID no. 13489559
  misc_feature: MA Experiment ID: 108573 Result: Up-regulated in Transcription
  misc_feature: MA Experiment 108573 PARAMETER Experiment Name: At_Drought_cDNA_P Parameter: Timepoint (hr) Value: 6
  misc_feature: MA Experiment 108573 PARAMETER Experiment Name: At_Drought_cDNA_P Parameter: Tissue Value: Aerial
  misc_feature: MA Experiment 108573 PARAMETER Experiment Name: At_Drought_cDNA_P Parameter: Treatment Value: Drought vs. No Drought
  misc_feature: MA Experiment ID: 20000111 Result: Down-regulated in Transcription
  misc_feature: MA Experiment 20000111 PARAMETER Experiment Name: At_42deg_Heat_cDNA_P Parameter: Temperature (deg C) Value: 42 vs. 22
  misc_feature: MA Experiment 20000111 PARAMETER Experiment Name: At_42deg_Heat_cDNA_P Parameter: Timepoint (hr) Value: 6
  misc_feature: MA Experiment 20000111 PARAMETER Experiment Name: At_42deg_Heat_cDNA_P Parameter: Tissue Value: Aerial
  misc_feature: MA Experiment ID: 20000113 Result: Down-regulated in Transcription
  misc_feature: MA Experiment 20000113 PARAMETER Experiment Name: At_42deg_Heat_cDNA_P Parameter: Temperature (deg C) Value: 42 vs. 22
  misc_feature: MA Experiment 20000113 PARAMETER Experiment Name: At_42deg_Heat_cDNA_P Parameter: Timepoint (hr) Value: 8
  misc_feature: MA Experiment 20000113 PARAMETER Experiment Name: At_42deg_Heat_cDNA_P Parameter: Tissue Value: Aerial
  misc_feature: MA Experiment ID: 20000185 Result: Down-regulated in Transcription
  misc_feature: MA Experiment 20000185 PARAMETER Experiment Name: At_Roots__P Parameter: Age (day) Value: 7 vs. 21
  misc_feature: MA Experiment 20000185 PARAMETER Experiment Name: At_Roots__P Parameter: Organism Value: A. thaliana
  misc_feature: MA Experiment 20000185 PARAMETER Experiment Name: At_Roots__P Parameter: Tissue Value: Roots vs. Whole Plant
  misc_feature: MA Experiment ID: 20000439 Result: Down-regulated in Transcription
  misc_feature: MA Experiment 20000439 PARAMETER Experiment Name: At_Roots__P Parameter: Age (day) Value: 14 vs. 21
  misc_feature: MA Experiment 20000439 PARAMETER Experiment Name: At_Roots__P Parameter: Organism Value: A. thaliana
  misc_feature: MA Experiment 20000439 PARAMETER Experiment Name: At_Roots__P Parameter: Tissue Value: Roots vs. Whole Plant
  misc_feature: MA Experiment ID: 20001558 Result: Down-regulated in Transcription
  misc_feature: MA Experiment 20001558 PARAMETER Experiment Name: At_Drought_Soil_Dry_P Parameter: Age (day) Value: 27
  misc_feature: MA Experiment 20001558 PARAMETER Experiment Name: At_Drought_Soil_Dry_P Parameter: Organism Value: A. thaliana
  misc_feature: MA Experiment 20001558 PARAMETER Experiment Name: At_Drought_Soil_Dry_P Parameter: Plant Line Value: WS
  misc_feature: MA Experiment 20001558 PARAMETER Experiment Name: At_Drought_Soil_Dry_P Parameter: Post Timepoint (hr) Value: 6
  misc_feature: MA Experiment 20001558 PARAMETER Experiment Name: At_Drought_Soil_Dry_P Parameter: Post-Treatment Value: Re-Water vs. No Drought
  misc_feature: MA Experiment 20001558 PARAMETER Experiment Name: At_Drought_Soil_Dry_P Parameter: Timepoint (day) Value: 13
  misc_feature: MA Experiment 20001558 PARAMETER Experiment Name: At_Drought_Soil_Dry_P Parameter: Treatment Value: Drought vs. No Drought
aagaaaaaaaatggcggaactgttgttggtggaaactcgaatcccacagcaaaagcactacgaatccaaaccattcccggcggtgatatcaccgccgtctgcttcgattccaattcctgctctgtctctcccactattcactcaaactatcaaaactcagaaacactatctcgattctctcttgcacgaatccggagcagtgctattcagaggttttccggtgaattccgccgatgatttcaacgacgtcgttgaagctttcggtttcgatgagcttccttacgtcggaggcgctgctcctcgcactagcgtcgtcggtcgtgtcttcactgctaatgaatctcctcctgatcagaagattccttttcaccacgagatggctcaggtattgatcaaaatcagatttggatttatgtgaatttgattttttacatctaaagttttgagctttattgaatttgattgatggtgtttgttaggttcgtgagtttccatcaaagttgttcttttactgtgagattgagcctaagtgtggtggagagactccaattgtgttgagtcatgttgtgtatgagagaatgaaagataaacatccagagtttgttcagagattagaggaacatggtttgctttatgttagggttttaggtgaagatgatgatccttcatctcccattggacgtggttggaaatctacattcttaacccatgacaagaaccttgctgagcaaagggcggttgatttgggaatgaaactggaatggacagaggatggtggagccaagacggtaatgggtccgattccggctatcaaatatgacgagtcgagaaaccgcaaagtatggtttaacagcatggtagctgcttatacgggatgggaggataagcggaatgatccaagaaaggctgtgacttttggggatggaaagcctttacctgcggatatagtccatgattgtcttaggattcttgaagaggaatgtgttgctgttccgtggcagagaggagatgttttgcttatagataactgggcggttcttcattctcgaagaccgtttgatcctcctcgtcgagttcttgcatcactctgcaaatagattatgttgtctttcatgcataaatcaaagctttggatttcgaatttagaggcaacaacaacactgtacatattttggatacatatatgtgggtacatagtaacccatttcctc

SEQ ID NO: 43625 - protein, 172 aa, Arabidopsis thaliana
  peptide (1)..(172): Ceres Seq. ID no. 13489560
  misc_feature (1)..(172): Homolog of NCBI NO: 28869349 NR Description: pyoverdine biosynthesis regulatory gene, putative
  misc_feature (1)..(170): Homolog of NCBI NO: 29830181 NR Description: putative SyrP-like protein [Streptomyces
  misc_feature (1)..(172): Homolog of NCBI NO: 9937235 NR Description: SyrP-like protein [Streptomyces verticillus]
  misc_feature (1)..(172): Homolog of NCBI NO: 23106239 NR Description: hypothetical protein [Azotobacter vinelandii]
  misc_feature (1)..(172): Homolog of NCBI NO: 26990914 NR Description: syrP protein, putative [Pseudomonas putida
  misc_feature (1)..(172): Homolog of NCBI NO: 23468981 NR Description: hypothetical protein [Pseudomonas syringae pv.
  misc_feature (1)..(172): Homolog of NCBI NO: 22985582 NR Description: hypothetical protein [Burkholderia fungorum]
  misc_feature (1)..(172): Homolog of NCBI NO: 23128425 NR Description: hypothetical protein [Nostoc punctiforme]
  misc_feature (1)..(170): Homolog of NCBI NO: 34906388 NR Description: P0710E05.6 [Oryza sativa (japonica
  misc_feature (1)..(172): Homolog of NCBI NO: 15232542 NR Description: expressed protein [Arabidopsis thaliana]
MKDKHPEFVQRLEEHGLLYVRVLGEDDDPSSPIGRGWKSTFLTHDKNLAEQRAVDLGMKLEWTEDGGAKTVMGPIPAIKYDESRNRKVWFNSMVAAYTGWEDKRNDPRKAVTFGDGKPLPADIVHDCLRILEEECVAVPWQRGDVLLIDNWAVLHSRRPFDPPRRVLASLCK

SEQ ID NO: 43626 - protein, 138 aa, Arabidopsis thaliana
  peptide (1)..(138): Ceres Seq. ID no. 13489561
  misc_feature (31)..(130): Homolog of NCBI NO: 28869349 NR Description: pyoverdine biosynthesis regulatory gene, putative
  misc_feature (60)..(127): Homolog of NCBI NO: 29830181 NR Description: putative SyrP-like protein [Streptomyces
  misc_feature (56)..(125): Homolog of NCBI NO: 9937235 NR Description: SyrP-like protein [Streptomyces verticillus]
  misc_feature (31)..(135): Homolog of NCBI NO: 23106239 NR Description: hypothetical protein [Azotobacter vinelandii]
  misc_feature (37)..(130): Homolog of NCBI NO: 26990914 NR Description: syrP protein, putative [Pseudomonas putida
  misc_feature (31)..(130): Homolog of NCBI NO: 23468981 NR Description: hypothetical protein [Pseudomonas syringae pv.
  misc_feature (7)..(127): Homolog of NCBI NO: 22985582 NR Description: hypothetical protein [Burkholderia fungorum]
  misc_feature (51)..(127): Homolog of NCBI NO: 23128425 NR Description: hypothetical protein [Nostoc punctiforme]
  misc_feature (11)..(129): Homolog of NCBI NO: 34906388 NR Description: P0710E05.6 [Oryza sativa (japonica
  misc_feature (4)..(129): Homolog of NCBI NO: 15232542 NR Description: expressed protein [Arabidopsis thaliana]
RKKMAELLLVETRIPQQKHYESKPFPAVISPPSASIPIPALSLPLFTQTIKTQKHYLDSLLHESGAVLFRGFPVNSADDFNDVVEAFGFDELPYVGGAAPRTSVVGRVFTANESPPDQKIPFHHEMAQVLIKIRFGFM

SEQ ID NO: 43627 - protein, 135 aa, Arabidopsis thaliana
  peptide (1)..(135): Ceres Seq. ID no. 13489562
  misc_feature (28)..(127): Homolog of NCBI NO: 28869349 NR Description: pyoverdine biosynthesis regulatory gene, putative
  misc_feature (57)..(124): Homolog of NCBI NO: 29830181 NR Description: putative SyrP-like protein [Streptomyces
  misc_feature (53)..(122): Homolog of NCBI NO: 9937235 NR Description: SyrP-like protein [Streptomyces verticillus]
  misc_feature (28)..(132): Homolog of NCBI NO: 23106239 NR Description: hypothetical protein [Azotobacter vinelandii]
  misc_feature (34)..(127): Homolog of NCBI NO: 26990914 NR Description: syrP protein, putative [Pseudomonas putida
  misc_feature (28)..(127): Homolog of NCBI NO: 23468981 NR Description: hypothetical protein [Pseudomonas syringae pv.
  misc_feature (4)..(124): Homolog of NCBI NO: 22985582 NR Description: hypothetical protein [Burkholderia fungorum]
  misc_feature (48)..(124): Homolog of NCBI NO: 23128425 NR Description: hypothetical protein [Nostoc punctiforme]
  misc_feature (8)..(126): Homolog of NCBI NO: 34906388 NR Description: P0710E05.6 [Oryza sativa (japonica
  misc_feature (1)..(126): Homolog of NCBI NO: 15232542 NR Description: expressed protein [Arabidopsis thaliana]
MAELLLVETRIPQQKHYESKPFPAVISPPSASIPIPALSLPLFTQTIKTQKHYLDSLLHESGAVLFRGFPVNSADDFNDVVEAFGFDELPYVGGAAPRTSVVGRVFTANESPPDQKIPFHHEMAQVLIKIRFGFM

SEQ ID NO: 43628 - DNA, 1213 bp, Arabidopsis thaliana
  misc_feature (1)..(1213): Ceres Seq. ID no. 5788431
  misc_feature: MA Experiment ID: 20000171 Result: Down-regulated in Transcription
  misc_feature: MA Experiment 20000171 PARAMETER Experiment Name: At_42deg_Heat_P Parameter: Age (day) Value: 14
  misc_feature: MA Experiment 20000171 PARAMETER Experiment Name: At_42deg_Heat_P Parameter: Organism Value: A. thaliana
  misc_feature: MA Experiment 20000171 PARAMETER Experiment Name: At_42deg_Heat_P Parameter: Plant Line Value: WS
  misc_feature: MA Experiment 20000171 PARAMETER Experiment Name: At_42deg_Heat_P Parameter: Temperature (deg C) Value: 42 vs. 22
  misc_feature: MA Experiment 20000171 PARAMETER Experiment Name: At_42deg_Heat_P Parameter: Timepoint (hr) Value: 1
  misc_feature: MA Experiment 20000171 PARAMETER Experiment Name: At_42deg_Heat_P Parameter: Tissue Value: Aerial
  misc_feature: MA Experiment ID: 20000173 Result: Down-regulated in Transcription
  misc_feature: MA Experiment 20000173 PARAMETER Experiment Name: At_42deg_Heat_P Parameter: Age (day) Value: 14
  misc_feature: MA Experiment 20000173 PARAMETER Experiment Name: At_42deg_Heat_P Parameter: Organism Value: A. thaliana
  misc_feature: MA Experiment 20000173 PARAMETER Experiment Name: At_42deg_Heat_P Parameter: Plant Line Value: WS
  misc_feature: MA Experiment 20000173 PARAMETER Experiment Name: At_42deg_Heat_P Parameter: Temperature (deg C) Value: 42 vs. 22
  misc_feature: MA Experiment 20000173 PARAMETER Experiment Name: At_42deg_Heat_P Parameter: Timepoint (hr) Value: 6
  misc_feature: MA Experiment 20000173 PARAMETER Experiment Name: At_42deg_Heat_P Parameter: Tissue Value: Aerial
  misc_feature: MA Experiment ID: 20000179 Result: Down-regulated in Transcription
  misc_feature: MA Experiment 20000179 PARAMETER Experiment Name: At_Germinating_Seeds_P Parameter: Age (hr) Value: 6 vs. 0
  misc_feature: MA Experiment 20000179 PARAMETER Experiment Name: At_Germinating_Seeds_P Parameter: Tissue Value: Germinating Seeds
  misc_feature: MA Experiment ID: 20000180 Result: Down-regulated in Transcription
  misc_feature: MA Experiment 20000180 PARAMETER Experiment Name: At_Germinating_Seeds_P Parameter: Age (hr) Value: 24 vs. 0
  misc_feature: MA Experiment 20000180 PARAMETER Experiment Name: At_Germinating_Seeds_P Parameter: Tissue Value: Germinating Seeds
  misc_feature: MA Experiment ID: 20000182 Result: Up-regulated in Transcription
  misc_feature: MA Experiment 20000182 PARAMETER Experiment Name: At_2mM_SA_P Parameter: Age (day) Value: 14
  misc_feature: MA Experiment 20000182 PARAMETER Experiment Name: At_2mM_SA_P Parameter: Organism Value: A. thaliana
  misc_feature: MA Experiment 20000182 PARAMETER Experiment Name: At_2mM_SA_P Parameter: Plant Line Value: WS
  misc_feature: MA Experiment 20000182 PARAMETER Experiment Name: At_2mM_SA_P Parameter: Timepoint (hr) Value: 6
  misc_feature: MA Experiment 20000182 PARAMETER Experiment Name: At_2mM_SA_P Parameter: Tissue Value: Aerial
  misc_feature: MA Experiment 20000182 PARAMETER Experiment Name: At_2mM_SA_P Parameter: Treatment Value: 2mM SA vs. No Treatment
  misc_feature: MA Experiment ID: 20000184 Result: Down-regulated in Transcription
  misc_feature: MA Experiment 20000184 PARAMETER Experiment Name: At_Shoots__P Parameter: Age (day) Value: 7
  misc_feature: MA Experiment 20000184 PARAMETER Experiment Name: At_Shoots__P Parameter: Tissue Value: Shoots vs. Whole Plant
  misc_feature: MA Experiment ID: 20000308 Result: Up-regulated in Transcription
  misc_feature: MA Experiment 20000308 PARAMETER Experiment Name: At_100mM_NaCl__P Parameter: Age (day) Value: 17
  misc_feature: MA Experiment 20000308 PARAMETER Experiment Name: At_100mM_NaCl__P Parameter: Organism Value: A. thaliana
  misc_feature: MA Experiment 20000308 PARAMETER Experiment Name: At_100mM_NaCl__P Parameter: Plant Line Value: WS
  misc_feature: MA Experiment 20000308 PARAMETER Experiment Name: At_100mM_NaCl__P Parameter: Timepoint (hr) Value: 72
  misc_feature: MA Experiment 20000308 PARAMETER Experiment Name: At_100mM_NaCl__P Parameter: Tissue Value: Whole Plant
  misc_feature: MA Experiment 20000308 PARAMETER Experiment Name: At_100mM_NaCl__P Parameter: Treatment Value: 100mM NaCl vs. No Treatment
  misc_feature: MA Experiment ID: 20000441 Result: Up-regulated in Transcription
  misc_feature: MA Experiment 20000441 PARAMETER Experiment Name: At_1uM_BR-BRZ__P Parameter: Tissue Value: Shoot Apices
  misc_feature: MA Experiment 20000441 PARAMETER Experiment Name: At_1uM_BR-BRZ__P Parameter: Treatment Value: 1uM BR vs. No Treatment
  misc_feature: MA Experiment ID: 20000445 Result: Up-regulated in Transcription
  misc_feature: MA Experiment 20000445 PARAMETER Experiment Name: At_100uM_NAA__P Parameter: Age (day) Value: 14
  misc_feature: MA Experiment 20000445 PARAMETER Experiment Name: At_100uM_NAA__P Parameter: Organism Value: A. thaliana
  misc_feature: MA Experiment 20000445 PARAMETER Experiment Name: At_100uM_NAA__P Parameter: Plant Line Value: WS
  misc_feature: MA Experiment 20000445 PARAMETER Experiment Name: At_100uM_NAA__P Parameter: Timepoint (hr) Value: 6
  misc_feature: MA Experiment 20000445 PARAMETER Experiment Name: At_100uM_NAA__P Parameter: Tissue Value: Aerial
  misc_feature: MA Experiment 20000445 PARAMETER Experiment Name: At_100uM_NAA__P Parameter: Treatment Value: 100uM NAA vs. No Treatment
  misc_feature: MA Experiment ID: 20000456 Result: Up-regulated in Transcription
  misc_feature: MA Experiment 20000456 PARAMETER Experiment Name: At_100uM_BA_P Parameter: Age (day) Value: 14
  misc_feature: MA Experiment 20000456 PARAMETER Experiment Name: At_100uM_BA_P Parameter: Organism Value: A. thaliana
  misc_feature: MA Experiment 20000456 PARAMETER Experiment Name: At_100uM_BA_P Parameter: Plant Line Value: WS
  misc_feature: MA Experiment 20000456 PARAMETER Experiment Name: At_100uM_BA_P Parameter: Timepoint (hr) Value: 6
  misc_feature: MA Experiment 20000456 PARAMETER Experiment Name: At_100uM_BA_P Parameter: Tissue Value: Aerial
  misc_feature: MA Experiment 20000456 PARAMETER Experiment Name: At_100uM_BA_P Parameter: Treatment Value: 100uM BA vs. No Treatment
  misc_feature: MA Experiment ID: 20000527 Result: Down-regulated in Transcription
  misc_feature: MA Experiment 20000527 PARAMETER Experiment Name: At_10percent_PEG_P Parameter: Age (day) Value: 20
  misc_feature: MA Experiment 20000527 PARAMETER Experiment Name: At_10percent_PEG_P Parameter: Organism Value: A. thaliana
  misc_feature: MA Experiment 20000527 PARAMETER Experiment Name: At_10percent_PEG_P Parameter: Plant Line Value: WS
  misc_feature: MA Experiment 20000527 PARAMETER Experiment Name: At_10percent_PEG_P Parameter: Timepoint (day) Value: 20
  misc_feature: MA Experiment 20000527 PARAMETER Experiment Name: At_10percent_PEG_P Parameter: Tissue Value: Whole Plant
  misc_feature: MA Experiment 20000527 PARAMETER Experiment Name: At_10percent_PEG_P Parameter: Treatment Value: 10percent PEG vs. No Treatment
  misc_feature: MA Experiment ID: 20000709 Result: Up-regulated in Transcription
  misc_feature: MA Experiment 20000709 PARAMETER Experiment Name: At_15mM_NH4NO3_L-to-H_P Parameter: Age (hr) Value: 14
  misc_feature: MA Experiment 20000709 PARAMETER Experiment Name: At_15mM_NH4NO3_L-to-H_P Parameter: Organism Value: A. thaliana
  misc_feature: MA Experiment 20000709 PARAMETER Experiment Name: At_15mM_NH4NO3_L-to-H_P Parameter: Plant Line Value: WS
  misc_feature: MA Experiment 20000709 PARAMETER Experiment Name: At_15mM_NH4NO3_L-to-H_P Parameter: Timepoint (hr) Value: 4
  misc_feature: MA Experiment 20000709 PARAMETER Experiment Name: At_15mM_NH4NO3_L-to-H_P Parameter: Tissue Value: Aerial
  misc_feature: MA Experiment 20000709 PARAMETER Experiment Name: At_15mM_NH4NO3_L-to-H_P Parameter: Treatment Value: 15mM NH4NO3 vs. 30mM Mannitol
  misc_feature: MA Experiment ID: 20001451 Result: Down-regulated in Transcription
  misc_feature: MA Experiment 20001451 PARAMETER Experiment Name: At_Far-red-induction_P Parameter: Age (day) Value: 7
  misc_feature: MA Experiment 20001451 PARAMETER Experiment Name: At_Far-red-induction_P Parameter: Light Value: Far-red vs. White
  misc_feature: MA Experiment 20001451 PARAMETER Experiment Name: At_Far-red-induction_P Parameter: Organism Value: A. thaliana
  misc_feature: MA Experiment 20001451 PARAMETER Experiment Name: At_Far-red-induction_P Parameter: Plant Line Value: Columbia
  misc_feature: MA Experiment 20001451 PARAMETER Experiment Name: At_Far-red-induction_P Parameter: Timepoint (hr) Value: 24
  misc_feature: MA Experiment 20001451 PARAMETER Experiment Name: At_Far-red-induction_P Parameter: Tissue Value: Whole Plant
  misc_feature: MA Experiment ID: 20001555 Result: Down-regulated in Transcription
  misc_feature: MA Experiment 20001555 PARAMETER Experiment Name: At_Drought_Soil_Dry_P Parameter: Age (day) Value: 24
  misc_feature: MA Experiment 20001555 PARAMETER Experiment Name: At_Drought_Soil_Dry_P Parameter: Organism Value: A. thaliana
  misc_feature: MA Experiment 20001555 PARAMETER Experiment Name: At_Drought_Soil_Dry_P Parameter: Plant Line Value: WS
  misc_feature: MA Experiment 20001555 PARAMETER Experiment Name: At_Drought_Soil_Dry_P Parameter: Post Timepoint (hr) Value: None
  misc_feature: MA Experiment 20001555 PARAMETER Experiment Name: At_Drought_Soil_Dry_P Parameter: Post-Treatment Value: None
  misc_feature: MA Experiment 20001555 PARAMETER Experiment Name: At_Drought_Soil_Dry_P Parameter: Timepoint (day) Value: 10
  misc_feature: MA Experiment 20001555 PARAMETER Experiment Name: At_Drought_Soil_Dry_P Parameter: Treatment Value: Drought vs. No Drought
  misc_feature: MA Experiment ID: 20001556 Result: Down-regulated in Transcription
  misc_feature: MA Experiment 20001556 PARAMETER Experiment Name: At_Drought_Soil_Dry_P Parameter: Age (day) Value: 26
  misc_feature: MA Experiment 20001556 PARAMETER Experiment Name: At_Drought_Soil_Dry_P Parameter: Organism Value: A. thaliana
  misc_feature: MA Experiment 20001556 PARAMETER Experiment Name: At_Drought_Soil_Dry_P Parameter: Plant Line Value: WS
  misc_feature: MA Experiment 20001556 PARAMETER Experiment Name: At_Drought_Soil_Dry_P Parameter: Post Timepoint (hr) Value: None
  misc_feature: MA Experiment 20001556 PARAMETER Experiment Name: At_Drought_Soil_Dry_P Parameter: Post-Treatment Value: None
  misc_feature: MA Experiment 20001556 PARAMETER Experiment Name: At_Drought_Soil_Dry_P Parameter: Timepoint (day) Value: 12
  misc_feature: MA Experiment 20001556 PARAMETER Experiment Name: At_Drought_Soil_Dry_P Parameter: Treatment Value: Drought vs. No Drought
  misc_feature: MA Experiment ID: 20001559 Result: Down-regulated in Transcription
  misc_feature: MA Experiment 20001559 PARAMETER Experiment Name: At_Drought_Soil_Dry_P Parameter: Age (day) Value: 28
  misc_feature: MA Experiment 20001559 PARAMETER Experiment Name: At_Drought_Soil_Dry_P Parameter: Organism Value: A. thaliana
  misc_feature: MA Experiment 20001559 PARAMETER Experiment Name: At_Drought_Soil_Dry_P Parameter: Plant Line Value: WS
  misc_feature: MA Experiment 20001559 PARAMETER Experiment Name: At_Drought_Soil_Dry_P Parameter: Post Timepoint (hr) Value: 29
  misc_feature: MA Experiment 20001559 PARAMETER Experiment Name: At_Drought_Soil_Dry_P Parameter: Post-Treatment Value: Re-Water vs. No Drought
  misc_feature: MA Experiment 20001559 PARAMETER Experiment Name: At_Drought_Soil_Dry_P Parameter: Timepoint (day) Value: 14
  misc_feature: MA Experiment 20001559 PARAMETER Experiment Name: At_Drought_Soil_Dry_P Parameter: Treatment Value: Drought vs. No Drought
  misc_feature: MA Experiment ID: 20001904 Result: Down-regulated in Transcription
  misc_feature: MA Experiment 20001904 PARAMETER Experiment Name: At_Drought_Reproduction_P Parameter: Age (day) Value: 37
  misc_feature: MA Experiment 20001904 PARAMETER Experiment Name: At_Drought_Reproduction_P Parameter: Organism Value: A. thaliana
  misc_feature: MA Experiment 20001904 PARAMETER Experiment Name: At_Drought_Reproduction_P Parameter: Plant Line Value: WS
  misc_feature: MA Experiment 20001904 PARAMETER Experiment Name: At_Drought_Reproduction_P Parameter: Timepoint (day) Value: 7
  misc_feature: MA Experiment 20001904 PARAMETER Experiment Name: At_Drought_Reproduction_P Parameter: Tissue Value: Rosettes
  misc_feature: MA Experiment 20001904 PARAMETER Experiment Name: At_Drought_Reproduction_P Parameter: Treatment Value: Drought vs. No Drought
  misc_feature: MA Experiment ID: 20001905 Result: Down-regulated in Transcription
  misc_feature: MA Experiment 20001905 PARAMETER Experiment Name: At_Drought_Reproduction_P Parameter: Age (day) Value: 40
  misc_feature: MA Experiment 20001905 PARAMETER Experiment Name: At_Drought_Reproduction_P Parameter: Organism Value: A. thaliana
  misc_feature: MA Experiment 20001905 PARAMETER Experiment Name: At_Drought_Reproduction_P Parameter: Plant Line Value: WS
  misc_feature: MA Experiment 20001905 PARAMETER Experiment Name: At_Drought_Reproduction_P Parameter: Timepoint (day) Value: 10
  misc_feature: MA Experiment 20001905 PARAMETER Experiment Name: At_Drought_Reproduction_P Parameter: Tissue Value: Rosettes
  misc_feature: MA Experiment 20001905 PARAMETER Experiment Name: At_Drought_Reproduction_P Parameter: Treatment Value: Drought vs. No Drought
caaagtttgtgatatagagctcgcacttgttttatattataccttgaccgtttggaatatttggacacattgttaggtccgatatgctccacatatgcctcttgtgttgcgaggaataacatgcacattcaaaggaggtttaagaacaggaattgttggaaggacaggaagcgggaaatcgactttgatacaaactcttttccgcattgtagaaccttcagctggagaaatcaggattgatggagtgaatattttgaccattgggttgcatgacttgcgtttaagactaagcatcataccccaagatccaaccatgtttgaaggaacaatgagaagtaacttggaccctcttgaagagtacacagatgatcaaatctgggaggtgcgtcggtttaaatctctgaaagtcgcacgttcttctttctttaactagtttaaacaatgttcagtcttggctaatgtttgcgcggtgttttaggctcttgacaagtgccaactaggagacgaggtgaggaaaaaagagcaaaagctcgattccagtgtgagcgagaatggagacaattggagtatgggtcagagacaactagtgtgtctcgggagagttcttctcaagagaagcaaaatcttggtgcttgatgaagccactgcttctgttgacactgcaactgacaatctgattcagaaaacgctaagagaacacttctcagactgtacagtgataaccattgcacacaggatatcttcagttattgacagcgacatggttctgcttctaagcaatggtttgtctgaaaaaaatctcaaattcattcgatggaacttgtgtgcatatgaaacattgagaaatgtcttgttgtgttctatttgcagggatcattgaggagtatgatacgccagtgagattactggaggataagtcttcctctttttctaagcttgtggctgagtacacctcaagatctagttccagtttcgattgaagcaaagactctgctattttcctgctgatgatgacgatgaagaaaaacttaggatgtctgaatctggtttagccacaacactagctggattatgattcacacaagaagaaacactatcttttgttaaaagcttttgttcttagtttatagcttctactactgttgaacccctaaaaacgattattctacatcgctagtttcaaatcaatgcaataaaagattgttcacttctg

SEQ ID NO: 43629 - protein, 112 aa, Arabidopsis thaliana
  peptide (1)..(112): Ceres Seq. ID no. 5788432
  misc_feature (15)..(96): Pfam Name: ABC transporter Pfam Description: ABC transporter
  misc_feature (1)..(96): Homolog of NCBI NO: 33329359 NR Description: multidrug resistance associated protein MRP2
  misc_feature (1)..(96): Homolog of NCBI NO: 10172596 NR Description: multidrug resistance-associated protein (MRP);
  misc_feature (1)..(96): Homolog of NCBI NO: 34910256 NR Description: putative MRP-like ABC transporter
  misc_feature (1)..(66): Homolog of NCBI NO: 30682473 NR Description: ABC transporter family protein [Arabidopsis
  misc_feature (1)..(96): Homolog of NCBI NO: 18031899 NR Description: ATP-binding cassette transporter MRP6
  misc_feature (1)..(96): Homolog of NCBI NO: 30682479 NR Description: ABC transporter protein MRP8 [Arabidopsis
  misc_feature (1)..(96): Homolog of NCBI NO: 30682486 NR Description: ABC transporter family protein [Arabidopsis
  misc_feature (1)..(96): Homolog of NCBI NO: 22759566 NR Description: multidrug-resistance related protein [Arabidopsis
  misc_feature (1)..(96): Homolog of NCBI NO: 25297465 NR Description: MRP-like ABC transporter [imported] - Arabidopsis
  misc_feature (1)..(96): Homolog of NCBI NO: 15230686 NR Description: ABC transporter family protein
MPLVLRGITCTFKGGLRTGIVGRTGSGKSTLIQTLFRIVEPSAGEIRIDGVNILTIGLHDLRLRLSIIPQDPTMFEGTMRSNLDPLEEYTDDQIWEVRRFKSLKVARSSFFN

SEQ ID NO: 43630 - protein, 103 aa, Arabidopsis thaliana
  peptide (1)..(103): Ceres Seq. ID no. 5788433
  misc_feature (1)..(72): Pfam Name: ABC transporter Pfam Description: ABC transporter
  misc_feature (1)..(74): Homolog of NCBI NO: 33329359 NR Description: multidrug resistance associated protein MRP2
  misc_feature (1)..(80): Homolog of NCBI NO: 10172596 NR Description: multidrug resistance-associated protein (MRP);
  misc_feature (1)..(74): Homolog of NCBI NO: 34910256 NR Description: putative MRP-like ABC transporter
  misc_feature (1)..(76): Homolog of NCBI NO: 30682473 NR Description: ABC transporter family protein [Arabidopsis
  misc_feature (1)..(77): Homolog of NCBI NO: 18031899 NR Description: ATP-binding cassette transporter MRP6
  misc_feature (1)..(77): Homolog of NCBI NO: 30682479 NR Description: ABC transporter protein MRP8 [Arabidopsis
  misc_feature (1)..(77): Homolog of NCBI NO: 30682486 NR Description: ABC transporter family protein [Arabidopsis
  misc_feature (1)..(77): Homolog of NCBI NO: 22759566 NR Description: multidrug-resistance related protein [Arabidopsis
  misc_feature (1)..(76): Homolog of NCBI NO: 25297465 NR Description: MRP-like ABC transporter [imported] - Arabidopsis
  misc_feature (1)..(76): Homolog of NCBI NO: 15230686 NR Description: ABC transporter family protein
MGQRQLVCLGRVLLKRSKILVLDEATASVDTATDNLIQKTLREHFSDCTVITIAHRISSVIDSDMVLLLSNGLSEKNLKFIRWNLCAYETLRNVLLCSICRDH

SEQ ID NO: 43631 - DNA, 1420 bp, Arabidopsis thaliana; identical to SEQ ID NO: 36272
  misc_feature (1)..(1420): Ceres Seq. ID no. 12580277
  misc_feature: MA Experiment ID: 20000179 Result: Up-regulated in Transcription
  misc_feature: MA Experiment 20000179 PARAMETER Experiment Name: At_Germinating_Seeds_P Parameter: Age (hr) Value: 6 vs. 0
  misc_feature: MA Experiment 20000179 PARAMETER Experiment Name: At_Germinating_Seeds_P Parameter: Tissue Value: Germinating Seeds
  misc_feature: MA Experiment ID: 20000180 Result: Up-regulated in Transcription
  misc_feature: MA Experiment 20000180 PARAMETER Experiment Name: At_Germinating_Seeds_P Parameter: Age (hr) Value: 24 vs. 0
  misc_feature: MA Experiment 20000180 PARAMETER Experiment Name: At_Germinating_Seeds_P Parameter: Tissue Value: Germinating Seeds
  misc_feature: MA Experiment ID: 20001905 Result: Down-regulated in Transcription
  misc_feature: MA Experiment 20001905 PARAMETER Experiment Name: At_Drought_Reproduction_P Parameter: Age (day) Value: 40
  misc_feature: MA Experiment 20001905 PARAMETER Experiment Name: At_Drought_Reproduction_P Parameter: Organism Value: A. thaliana
  misc_feature: MA Experiment 20001905 PARAMETER Experiment Name: At_Drought_Reproduction_P Parameter: Plant Line Value: WS
  misc_feature: MA Experiment 20001905 PARAMETER Experiment Name: At_Drought_Reproduction_P Parameter: Timepoint (day) Value: 10
  misc_feature: MA Experiment 20001905 PARAMETER Experiment Name: At_Drought_Reproduction_P Parameter: Tissue Value: Rosettes
  misc_feature: MA Experiment 20001905 PARAMETER Experiment Name: At_Drought_Reproduction_P Parameter: Treatment Value: Drought vs. No Drought

SEQ ID NO: 43632 - protein, 351 aa, Arabidopsis thaliana; identical to SEQ ID NO: 36273
  peptide (1)..(351): Ceres Seq. ID no. 12580278
  misc_feature (284)..(338): Pfam Name: SH3 domain Pfam Description: SH3 domain
  misc_feature (284)..(338): Pfam Name: SH3 domain Pfam Description: SH3 domain
  misc_feature (284)..(338): Pfam Name: SH3 domain Pfam Description: SH3 domain
  misc_feature (284)..(338): Pfam Name: SH3 domain Pfam Description: SH3 domain
  misc_feature (1)..(278): Homolog of NCBI NO: 18418491 NR Description: putative protein
  misc_feature (278)..(344): Homolog of NCBI NO: 15221714 NR Description: unknown protein
  misc_feature (1)..(273): Homolog of NCBI NO: 15221714 NR Description: unknown protein
  misc_feature (260)..(344): Homolog of NCBI NO: 34902022 NR Description: unknown protein [Oryza sativa (japonica
  misc_feature (1)..(266): Homolog of NCBI NO: 34902022 NR Description: unknown protein [Oryza sativa (japonica
  misc_feature (1)..(278): Homolog of NCBI NO: 18418491 NR Description: putative protein
  misc_feature (1)..(273): Homolog of NCBI NO: 15221714 NR Description: unknown protein
  misc_feature (1)..(266): Homolog of NCBI NO: 34902022 NR Description: unknown protein [Oryza sativa (japonica
  misc_feature (260)..(344): Homolog of NCBI NO: 34902022 NR Description: unknown protein [Oryza sativa (japonica
  misc_feature (1)..(273): Homolog of NCBI NO: 15221714 NR Description: unknown protein
  misc_feature (278)..(344): Homolog of NCBI NO: 15221714 NR Description: unknown protein
  misc_feature (1)..(278): Homolog of NCBI NO: 18418491 NR Description: putative protein
  misc_feature (1)..(351): Homolog of NCBI NO: 22328762 NR Description: putative protein
  misc_feature (1)..(351): Homolog of NCBI NO: 21928139 NR Description: AT4g18060/F15J5_30 [Arabidopsis thaliana]
  misc_feature (1)..(351): Homolog of NCBI NO: 16974680 NR Description: SH3 domain-containing protein 3 [Arabidopsis
  misc_feature (1)..(243): Homolog of NCBI NO: 7485521 NR Description: hypothetical protein F15J5.30 - Arabidopsis
  misc_feature (1)..(342): Homolog of NCBI NO: 22093679 NR Description: putative SH3(Src homology) domain-containing
  misc_feature (1)..(351): Homolog of NCBI NO: 22328762 NR Description: putative protein
  misc_feature (1)..(351): Homolog of NCBI NO: 21928139 NR Description: AT4g18060/F15J5_30 [Arabidopsis thaliana]
  misc_feature (1)..(351): Homolog of NCBI NO: 16974680 NR Description: SH3 domain-containing protein 3 [Arabidopsis
  misc_feature (1)..(243): Homolog of NCBI NO: 7485521 NR Description: hypothetical protein F15J5.30 - Arabidopsis
  misc_feature (1)..(342): Homolog of NCBI NO: 22093679 NR Description: putative SH3(Src homology) domain-containing
  misc_feature (1)..(266): Homolog of NCBI NO: 34902022 NR Description: unknown protein [Oryza sativa (japonica
  misc_feature (260)..(344): Homolog of NCBI NO: 34902022 NR Description: unknown protein [Oryza sativa (japonica
  misc_feature (1)..(273): Homolog of NCBI NO: 15221714 NR Description: unknown protein
  misc_feature (278)..(344): Homolog of NCBI NO: 15221714 NR Description: unknown protein
  misc_feature (1)..(278): Homolog of NCBI NO: 18418491 NR Description: putative protein
  misc_feature (1)..(351): Homolog of NCBI NO: 22328762 NR Description: putative protein
  misc_feature (1)..(351): Homolog of NCBI NO: 21928139 NR Description: AT4g18060/F15J5_30 [Arabidopsis thaliana]
  misc_feature (1)..(351): Homolog of NCBI NO: 16974680 NR Description: SH3 domain-containing protein 3 [Arabidopsis
  misc_feature (1)..(243): Homolog of NCBI NO: 7485521 NR Description: hypothetical protein F15J5.30 - Arabidopsis
  misc_feature (1)..(342): Homolog of NCBI NO: 22093679 NR Description: putative SH3(Src homology) domain-containing
  misc_feature (1)..(266): Homolog of NCBI NO: 34902022 NR Description: unknown protein [Oryza sativa (japonica
  misc_feature (260)..(344): Homolog of NCBI NO: 34902022 NR Description: unknown protein [Oryza sativa (japonica
  misc_feature (278)..(344): Homolog of NCBI NO: 15221714 NR Description: unknown protein
  misc_feature (1)..(342): Homolog of NCBI NO: 22093679 NR Description: putative SH3(Src homology) domain-containing
  misc_feature (1)..(243): Homolog of NCBI NO: 7485521 NR Description: hypothetical protein F15J5.30 - Arabidopsis
  misc_feature (1)..(351): Homolog of NCBI NO: 16974680 NR Description: SH3 domain-containing protein 3 [Arabidopsis
  misc_feature (1)..(351): Homolog of NCBI NO: 21928139 NR Description: AT4g18060/F15J5_30 [Arabidopsis thaliana]
  misc_feature (1)..(351): Homolog of NCBI NO: 22328762 NR Description: putative protein

SEQ ID NO: 43633 - protein, 315 aa, Arabidopsis thaliana; identical to SEQ ID NO: 36274
  peptide (1)..(315): Ceres Seq. ID no. 12580279
  misc_feature (248)..(302): Pfam Name: SH3 domain Pfam Description: SH3 domain
  misc_feature (248)..(302): Pfam Name: SH3 domain Pfam Description: SH3 domain
  misc_feature (248)..(302): Pfam Name: SH3 domain Pfam Description: SH3 domain
  misc_feature (248)..(302): Pfam Name: SH3 domain Pfam Description: SH3 domain
  misc_feature (1)..(242): Homolog of NCBI NO: 18418491 NR Description: putative protein
  misc_feature (242)..(308): Homolog of NCBI NO: 15221714 NR Description: unknown protein
  misc_feature (1)..(237): Homolog of NCBI NO: 15221714 NR Description: unknown protein
  misc_feature (224)..(308): Homolog of NCBI NO: 34902022 NR Description: unknown protein [Oryza sativa (japonica
  misc_feature (1)..(230): Homolog of NCBI NO: 34902022 NR Description: unknown protein [Oryza sativa (japonica
  misc_feature (1)..(242): Homolog of NCBI NO: 18418491 NR Description: putative protein
  misc_feature (1)..(237): Homolog of NCBI NO: 15221714 NR Description: unknown protein
  misc_feature (1)..(230): Homolog of NCBI NO: 34902022 NR Description: unknown protein [Oryza sativa (japonica
  misc_feature (224)..(308): Homolog of NCBI NO: 34902022 NR Description: unknown protein [Oryza sativa (japonica
  misc_feature (1)..(237): Homolog of NCBI NO: 15221714 NR Description: unknown protein
  misc_feature (242)..(308): Homolog of NCBI NO: 15221714 NR Description: unknown protein
  misc_feature (1)..(242): Homolog of NCBI NO: 18418491 NR Description: putative protein
  misc_feature (1)..(315): Homolog of NCBI NO: 22328762 NR Description: putative protein
  misc_feature (1)..(315): Homolog of NCBI NO: 21928139 NR Description: AT4g18060/F15J5_30 [Arabidopsis thaliana]
  misc_feature (1)..(315): Homolog of NCBI NO: 16974680 NR Description: SH3 domain-containing protein 3 [Arabidopsis
  misc_feature (1)..(207): Homolog of NCBI NO: 7485521 NR Description: hypothetical protein F15J5.30 - Arabidopsis
  misc_feature (1)..(306): Homolog of NCBI NO: 22093679 NR Description: putative SH3(Src homology) domain-containing
  misc_feature (1)..(315): Homolog of NCBI NO: 22328762 NR Description: putative protein
  misc_feature (1)..(315): Homolog of NCBI NO: 21928139 NR Description: AT4g18060/F15J5_30 [Arabidopsis thaliana]
  misc_feature (1)..(315): Homolog of NCBI NO: 16974680 NR Description: SH3 domain-containing protein 3 [Arabidopsis
  misc_feature (1)..(207): Homolog of NCBI NO: 7485521 NR Description: hypothetical protein F15J5.30 - Arabidopsis
  misc_feature (1)..(306): Homolog of NCBI NO: 22093679 NR Description: putative SH3(Src homology) domain-containing
  misc_feature (1)..(230): Homolog of NCBI NO: 34902022 NR Description: unknown protein [Oryza sativa (japonica
  misc_feature (224)..(308): Homolog of NCBI NO: 34902022 NR Description: unknown protein [Oryza sativa (japonica
  misc_feature (1)..(237): Homolog of NCBI NO: 15221714 NR Description: unknown protein
  misc_feature (242)..(308): Homolog of NCBI NO: 15221714 NR Description: unknown protein
  misc_feature (1)..(242): Homolog of NCBI NO: 18418491 NR Description: putative protein
  misc_feature (1)..(315): Homolog of NCBI NO: 22328762 NR Description: putative protein
  misc_feature (1)..(315): Homolog of NCBI NO: 21928139 NR Description: AT4g18060/F15J5_30 [Arabidopsis thaliana]
  misc_feature (1)..(315): Homolog of NCBI NO: 16974680 NR Description: SH3 domain-containing protein 3 [Arabidopsis
  misc_feature (1)..(207): Homolog of NCBI NO: 7485521 NR Description: hypothetical protein F15J5.30 - Arabidopsis
  misc_feature (1)..(306): Homolog of NCBI NO: 22093679 NR Description: putative SH3(Src homology) domain-containing
  misc_feature (1)..(230): Homolog of NCBI NO: 34902022 NR Description: unknown protein [Oryza sativa (japonica
  misc_feature (224)..(308): Homolog of NCBI NO: 34902022 NR Description: unknown protein [Oryza sativa (japonica
  misc_feature (242)..(308): Homolog of NCBI NO: 15221714 NR Description: unknown protein
  misc_feature (1)..(306): Homolog of NCBI NO: 22093679 NR Description: putative SH3(Src homology) domain-containing
  misc_feature (1)..(207): Homolog of NCBI NO: 7485521 NR Description: hypothetical protein F15J5.30 - Arabidopsis
  misc_feature (1)..(315): Homolog of NCBI NO: 16974680 NR Description: SH3 domain-containing protein 3 [Arabidopsis
  misc_feature (1)..(315): Homolog of NCBI NO: 21928139 NR Description: AT4g18060/F15J5_30 [Arabidopsis thaliana]
  misc_feature (1)..(315): Homolog of NCBI NO: 22328762 NR Description: putative protein

SEQ ID NO: 43634 - protein, 308 aa, Arabidopsis thaliana; identical to SEQ ID NO: 36275
  peptide (1)..(308): Ceres Seq. ID no. 12580280
  misc_feature (241)..(295): Pfam Name: SH3 domain Pfam Description: SH3 domain
  misc_feature (241)..(295): Pfam Name: SH3 domain Pfam Description: SH3 domain
  misc_feature (241)..(295): Pfam Name: SH3 domain Pfam Description: SH3 domain
  misc_feature (241)..(295): Pfam Name: SH3 domain Pfam Description: SH3 domain
  misc_feature (1)..(235): Homolog of NCBI NO: 18418491 NR Description: putative protein
  misc_feature (235)..(301): Homolog of NCBI NO: 15221714 NR Description: unknown protein
  misc_feature (1)..(230): Homolog of NCBI NO: 15221714 NR Description: unknown protein
  misc_feature (217)..(301): Homolog of NCBI NO: 34902022 NR Description: unknown protein [Oryza sativa (japonica
  misc_feature (1)..(223): Homolog of NCBI NO: 34902022 NR Description: unknown protein [Oryza sativa (japonica
  misc_feature (1)..(235): Homolog of NCBI NO: 18418491 NR Description: putative protein
  misc_feature (1)..(230): Homolog of NCBI NO: 15221714 NR Description: unknown protein
  misc_feature (1)..(223): Homolog of NCBI NO: 34902022 NR Description: unknown protein [Oryza sativa (japonica
  misc_feature (217)..(301): Homolog of NCBI NO: 34902022 NR Description: unknown protein [Oryza sativa (japonica
  misc_feature (1)..(230): Homolog of NCBI NO: 15221714 NR Description: unknown protein
  misc_feature (235)..(301): Homolog of NCBI NO: 15221714 NR Description: unknown protein
  misc_feature (1)..(235): Homolog of NCBI NO: 18418491 NR Description: putative protein
  misc_feature (1)..(308): Homolog of NCBI NO: 22328762 NR Description: putative protein
  misc_feature (1)..(308): Homolog of NCBI NO: 21928139 NR Description: AT4g18060/F15J5_30 [Arabidopsis thaliana]
  misc_feature (1)..(308): Homolog of NCBI NO: 16974680 NR Description: SH3 domain-containing protein 3 [Arabidopsis
  misc_feature (1)..(200): Homolog of NCBI NO: 7485521 NR Description: hypothetical protein F15J5.30 - Arabidopsis
  misc_feature (1)..(299): Homolog of NCBI NO: 22093679 NR Description: putative SH3(Src homology) domain-containing
  misc_feature (1)..(308): Homolog of NCBI NO: 22328762 NR Description: putative protein
  misc_feature (1)..(308): Homolog of NCBI NO: 21928139 NR Description: AT4g18060/F15J5_30 [Arabidopsis thaliana]
  misc_feature (1)..(308): Homolog of NCBI NO: 16974680 NR Description: SH3 domain-containing protein 3 [Arabidopsis
  misc_feature (1)..(200): Homolog of NCBI NO: 7485521 NR Description: hypothetical protein F15J5.30 - Arabidopsis
  misc_feature (1)..(299): Homolog of NCBI NO: 22093679 NR Description: putative SH3(Src homology) domain-containing
  misc_feature (1)..(223): Homolog of NCBI NO: 34902022 NR Description: unknown protein [Oryza sativa (japonica
  misc_feature (217)..(301): Homolog of NCBI NO: 34902022 NR Description: unknown protein [Oryza sativa (japonica
  misc_feature (1)..(230): Homolog of NCBI NO: 15221714 NR Description: unknown protein
  misc_feature (235)..(301): Homolog of NCBI NO: 15221714 NR Description: unknown protein
  misc_feature (1)..(235): Homolog of NCBI NO: 18418491 NR Description: putative protein
  misc_feature (1)..(308): Homolog of NCBI NO: 22328762 NR Description: putative protein
  misc_feature (1)..(308): Homolog of NCBI NO: 21928139 NR Description: AT4g18060/F15J5_30 [Arabidopsis thaliana]
  misc_feature (1)..(308): Homolog of NCBI NO: 16974680 NR Description: SH3 domain-containing protein 3 [Arabidopsis
  misc_feature (1)..(200): Homolog of NCBI NO: 7485521 NR Description: hypothetical protein F15J5.30 - Arabidopsis
  misc_feature (1)..(299): Homolog of NCBI NO: 22093679 NR Description: putative SH3(Src homology) domain-containing
  misc_feature (1)..(223): Homolog of NCBI NO: 34902022 NR Description: unknown protein [Oryza sativa (japonica
  misc_feature (217)..(301): Homolog of NCBI NO: 34902022 NR Description: unknown protein [Oryza sativa (japonica
  misc_feature (235)..(301): Homolog of NCBI NO: 15221714 NR Description: unknown protein
  misc_feature (1)..(299): Homolog of NCBI NO: 22093679 NR Description: putative SH3(Src homology) domain-containing
  misc_feature (1)..(200): Homolog of NCBI NO: 7485521 NR Description: hypothetical protein F15J5.30 - Arabidopsis
  misc_feature (1)..(308): Homolog of NCBI NO: 16974680 NR Description: SH3 domain-containing protein 3 [Arabidopsis
  misc_feature (1)..(308): Homolog of NCBI NO: 21928139 NR Description: AT4g18060/F15J5_30 [Arabidopsis thaliana]
  misc_feature (1)..(308): Homolog of NCBI NO: 22328762 NR Description: putative protein

SEQ ID NO: 43635 - DNA, 3276 bp, Arabidopsis thaliana
  misc_feature (1)..(3276): Ceres Seq. ID no. 13576594
  misc_feature: MA Experiment ID: 108461 Result: Up-regulated in Transcription
  misc_feature: MA Experiment 108461 PARAMETER Experiment Name: At_Germinating_Seeds_cDNA_P Parameter: Age (day) Value: 1 vs. 0
  misc_feature: MA Experiment 108461 PARAMETER Experiment Name: At_Germinating_Seeds_cDNA_P Parameter: Tissue Value: Germinating Seeds
  misc_feature: MA Experiment ID: 108464 Result: Up-regulated in Transcription
  misc_feature: MA Experiment 108464 PARAMETER Experiment Name: At_Germinating_Seeds_cDNA_P Parameter: Age (day) Value: 4 vs. 0
  misc_feature: MA Experiment 108464 PARAMETER Experiment Name: At_Germinating_Seeds_cDNA_P Parameter: Tissue Value: Germinating Seeds
  misc_feature: MA Experiment ID: 108488 Result: Up-regulated in Transcription
  misc_feature: MA Experiment ID: 108501 Result: Down-regulated in Transcription
  misc_feature: MA Experiment 108501 PARAMETER Experiment Name: At_ap2_floral_buds_cDNA_P Parameter: Plant Line Value: ap2 (Ler.)
  misc_feature: MA Experiment 108501 PARAMETER Experiment Name: At_ap2_floral_buds_cDNA_P Parameter: Tissue Value: Closed Flower
  misc_feature: MA Experiment ID: 108574 Result: Down-regulated in Transcription
  misc_feature: MA Experiment 108574 PARAMETER Experiment Name: At_Wounding__cDNA_P Parameter: Timepoint (hr) Value: 1
  misc_feature: MA Experiment 108574 PARAMETER Experiment Name: At_Wounding__cDNA_P Parameter: Tissue Value: Aerial
  misc_feature: MA Experiment 108574 PARAMETER Experiment Name: At_Wounding__cDNA_P Parameter: Treatment Value: Wounding vs. No Wounding
  misc_feature: MA Experiment ID: 108576 Result: Down-regulated in Transcription
  misc_feature: MA Experiment 108576 PARAMETER Experiment Name: At_42deg_Heat_cDNA_P Parameter: Temperature (deg C) Value: 42 vs. 22
  misc_feature: MA Experiment 108576 PARAMETER Experiment Name: At_42deg_Heat_cDNA_P Parameter: Timepoint (hr) Value: 1
  misc_feature: MA Experiment 108576 PARAMETER Experiment Name: At_42deg_Heat_cDNA_P Parameter: Tissue Value: Aerial
  misc_feature: MA Experiment ID: 108577 Result: Down-regulated in Transcription
  misc_feature: MA Experiment 108577 PARAMETER Experiment Name: At_42deg_Heat_cDNA_P Parameter: Temperature (deg C) Value: 42 vs. 22
  misc_feature: MA Experiment 108577 PARAMETER Experiment Name: At_42deg_Heat_cDNA_P Parameter: Timepoint (hr) Value: 6
  misc_feature: MA Experiment 108577 PARAMETER Experiment Name: At_42deg_Heat_cDNA_P Parameter: Tissue Value: Aerial
  misc_feature: MA Experiment ID: 108595 Result: Down-regulated in Transcription
  misc_feature: MA Experiment 108595 PARAMETER Experiment Name: At_Ler-pi_Ovule_cDNA_P Parameter: Plant Line Value: null
  misc_feature: MA Experiment ID: 108608 Result: Down-regulated in Transcription
  misc_feature: MA Experiment 108608 PARAMETER Experiment Name: At_100uM_ABA_cDNA_P Parameter: Timepoint (hr) Value: 1
  misc_feature: MA Experiment 108608 PARAMETER Experiment Name: At_100uM_ABA_cDNA_P Parameter: Tissue Value: Aerial
  misc_feature: MA Experiment 108608 PARAMETER Experiment Name: At_100uM_ABA_cDNA_P Parameter: Treatment Value: 100uM ABA vs. No Treatment
  misc_feature: MA Experiment ID: 20000070 Result: Down-regulated in Transcription
  misc_feature: MA Experiment 20000070 PARAMETER Experiment Name: At_100uM_ABA_Mutants_cDNA_P Parameter: Plant Line Value: CS24
  misc_feature: MA Experiment 20000070 PARAMETER Experiment Name: At_100uM_ABA_Mutants_cDNA_P Parameter: Timepoint (hr) Value: 6
  misc_feature: MA Experiment 20000070 PARAMETER Experiment Name: At_100uM_ABA_Mutants_cDNA_P Parameter: Tissue Value: Aerial
  misc_feature: MA Experiment 20000070 PARAMETER Experiment Name: At_100uM_ABA_Mutants_cDNA_P Parameter: Treatment Value: 100uM ABA vs. No Treatment
  misc_feature: MA Experiment ID: 20000111 Result: Down-regulated in Transcription
  misc_feature: MA Experiment 20000111 PARAMETER Experiment Name: At_42deg_Heat_cDNA_P Parameter: Temperature (deg C) Value: 42 vs. 22
  misc_feature: MA Experiment 20000111 PARAMETER Experiment Name: At_42deg_Heat_cDNA_P Parameter: Timepoint (hr) Value: 6
  misc_feature: MA Experiment 20000111 PARAMETER Experiment Name: At_42deg_Heat_cDNA_P Parameter: Tissue Value: Aerial
  misc_feature: MA Experiment ID: 20000112 Result: Down-regulated in Transcription
  misc_feature: MA Experiment 20000112 PARAMETER Experiment Name: At_42deg_Heat_cDNA_P Parameter: Temperature (deg C) Value: 42 vs. 22
  misc_feature: MA Experiment 20000112 PARAMETER Experiment Name: At_42deg_Heat_cDNA_P Parameter: Timepoint (hr) Value: 2
  misc_feature: MA Experiment 20000112 PARAMETER Experiment Name: At_42deg_Heat_cDNA_P Parameter: Tissue Value: Aerial
  misc_feature: MA Experiment ID: 20000113 Result: Down-regulated in Transcription
  misc_feature: MA Experiment 20000113 PARAMETER Experiment Name: At_42deg_Heat_cDNA_P Parameter: Temperature (deg C) Value: 42 vs. 22
  misc_feature: MA Experiment 20000113 PARAMETER Experiment Name: At_42deg_Heat_cDNA_P Parameter: Timepoint (hr) Value: 8
  misc_feature: MA Experiment 20000113 PARAMETER Experiment Name: At_42deg_Heat_cDNA_P Parameter: Tissue Value: Aerial
  misc_feature: MA Experiment ID: 20000144 Result: Down-regulated in Transcription
  misc_feature: MA Experiment 20000144 PARAMETER Experiment Name: At_42deg_Heat_cDNA_P Parameter: Temperature (deg C) Value: 42 vs. 22
  misc_feature: MA Experiment 20000144 PARAMETER Experiment Name: At_42deg_Heat_cDNA_P Parameter: Timepoint (hr) Value: 1
  misc_feature: MA Experiment 20000144 PARAMETER Experiment Name: At_42deg_Heat_cDNA_P Parameter: Tissue Value: Aerial
  misc_feature: MA Experiment ID: 20000185 Result: Down-regulated in Transcription
  misc_feature: MA Experiment 20000185 PARAMETER Experiment Name: At_Roots__P Parameter: Age (day) Value: 7 vs. 21
  misc_feature: MA Experiment 20000185 PARAMETER Experiment Name: At_Roots__P Parameter: Organism Value: A. thaliana
  misc_feature: MA Experiment 20000185 PARAMETER Experiment Name: At_Roots__P Parameter: Tissue Value: Roots vs. Whole Plant
  misc_feature: MA Experiment ID: 20000224 Result: Down-regulated in Transcription
  misc_feature: MA Experiment ID: 20000234 Result: Down-regulated in Transcription
  misc_feature: MA Experiment 20000234 PARAMETER Experiment Name: At_Siliques_P Parameter: Age (day) Value: 21
  misc_feature: MA Experiment 20000234 PARAMETER Experiment Name: At_Siliques_P Parameter: Organism Value: A. thaliana
  misc_feature: MA Experiment 20000234 PARAMETER Experiment Name: At_Siliques_P Parameter: Plant Line Value: WS
  misc_feature: MA Experiment 20000234 PARAMETER Experiment Name: At_Siliques_P Parameter: Tissue Value: Less Than 5mm Siliques vs. Whole Plant
  misc_feature: MA Experiment ID: 20000235 Result: Down-regulated in Transcription
  misc_feature: MA Experiment 20000235 PARAMETER Experiment Name: At_Siliques_P Parameter: Age (day) Value: 21
  misc_feature: MA Experiment 20000235 PARAMETER Experiment Name: At_Siliques_P Parameter: Organism Value: A. thaliana
  misc_feature: MA Experiment 20000235 PARAMETER Experiment Name: At_Siliques_P Parameter: Plant Line Value: WS
  misc_feature: MA Experiment 20000235 PARAMETER Experiment Name: At_Siliques_P Parameter: Tissue Value: 5-10mm Siliques vs. Whole Plant
  misc_feature: MA Experiment ID: 20000264 Result: Down-regulated in Transcription
  misc_feature: MA Experiment 20000264 PARAMETER Experiment Name: At_Open_Flower_P Parameter: Age (day) Value: 21
  misc_feature: MA Experiment 20000264 PARAMETER Experiment Name: At_Open_Flower_P Parameter: Plant Line Value: WS
  misc_feature: MA Experiment 20000264 PARAMETER Experiment Name: At_Open_Flower_P Parameter: Tissue Value: Open Flower vs. Whole Plant
  misc_feature: MA Experiment ID: 20000265 Result: Down-regulated in Transcription
  misc_feature: MA Experiment 20000265 PARAMETER Experiment Name: At_Open_Flower_P Parameter: Age (day) Value: 21
  misc_feature: MA Experiment 20000265 PARAMETER Experiment Name: At_Open_Flower_P Parameter: Plant Line Value: WS
  misc_feature: MA Experiment 20000265 PARAMETER Experiment Name: At_Open_Flower_P Parameter: Tissue Value: Closed Flower vs. Whole Plant
  misc_feature: MA Experiment ID: 20000267 Result: Down-regulated in Transcription
  misc_feature: MA Experiment 20000267 PARAMETER Experiment Name: At_Drought_P Parameter: Age (day) Value: 7
  misc_feature: MA Experiment 20000267 PARAMETER Experiment Name: At_Drought_P Parameter: Organism Value: A. thaliana
  misc_feature: MA Experiment 20000267 PARAMETER Experiment Name: At_Drought_P Parameter: Plant Line Value: WS
  misc_feature: MA Experiment 20000267 PARAMETER Experiment Name: At_Drought_P Parameter: Timepoint (hr) Value: 6
  misc_feature: MA Experiment 20000267 PARAMETER Experiment Name: At_Drought_P Parameter: Tissue Value: Whole Plant
  misc_feature: MA Experiment 20000267 PARAMETER Experiment Name: At_Drought_P Parameter: Treatment Value: Drought vs. No Drought
  misc_feature: MA Experiment ID: 20000268 Result: Down-regulated in Transcription
  misc_feature: MA Experiment 20000268 PARAMETER Experiment Name: At_100mM_NaCl__P Parameter: Age (day) Value: 14
  misc_feature: MA Experiment 20000268 PARAMETER Experiment Name: At_100mM_NaCl__P Parameter: Organism Value: A. thaliana
  misc_feature: MA Experiment 20000268 PARAMETER Experiment Name: At_100mM_NaCl__P Parameter: Plant Line Value: WS
  misc_feature: MA Experiment 20000268 PARAMETER Experiment Name: At_100mM_NaCl__P Parameter: Timepoint (hr) Value: 6
  misc_feature: MA Experiment 20000268 PARAMETER Experiment Name: At_100mM_NaCl__P Parameter: Tissue Value: Whole Plant
  misc_feature: MA Experiment 20000268 PARAMETER Experiment Name: At_100mM_NaCl__P Parameter: Treatment Value: 100mM NaCl vs. No Treatment
  misc_feature: MA Experiment ID: 20000286 Result: Down-regulated in Transcription
  misc_feature: MA Experiment 20000286 PARAMETER Experiment Name: At_Open_Flower_P Parameter: Age (day) Value: 21
  misc_feature: MA Experiment 20000286 PARAMETER Experiment Name: At_Open_Flower_P Parameter: Plant Line Value: WS
  misc_feature: MA Experiment 20000286 PARAMETER Experiment Name: At_Open_Flower_P Parameter: Tissue Value: Half Open vs. Whole Plant
  misc_feature: MA Experiment ID: 20000308 Result: Down-regulated in Transcription
  misc_feature: MA Experiment 20000308 PARAMETER Experiment Name: At_100mM_NaCl__P Parameter: Age (day) Value: 17
  misc_feature: MA Experiment 20000308 PARAMETER Experiment Name: At_100mM_NaCl__P Parameter: Organism Value: A. thaliana
  misc_feature: MA Experiment 20000308 PARAMETER Experiment Name: At_100mM_NaCl__P Parameter: Plant Line Value: WS
  misc_feature: MA Experiment 20000308 PARAMETER Experiment Name: At_100mM_NaCl__P Parameter: Timepoint (hr) Value: 72
  misc_feature: MA Experiment 20000308 PARAMETER Experiment Name: At_100mM_NaCl__P Parameter: Tissue Value: Whole Plant
  misc_feature: MA Experiment 20000308 PARAMETER Experiment Name: At_100mM_NaCl__P Parameter: Treatment Value: 100mM NaCl vs. No Treatment
  misc_feature: MA Experiment ID: 20000436 Result: Down-regulated in Transcription
  misc_feature: MA Experiment 20000436 PARAMETER Experiment Name: At_Drought_P Parameter: Age (day) Value: 7
  misc_feature: MA Experiment 20000436 PARAMETER Experiment Name: At_Drought_P Parameter: Organism Value: A. thaliana
  misc_feature: MA Experiment 20000436 PARAMETER Experiment Name: At_Drought_P Parameter: Plant Line Value: WS
  misc_feature: MA Experiment 20000436 PARAMETER Experiment Name: At_Drought_P Parameter: Timepoint (hr) Value: 12
  misc_feature: MA Experiment 20000436 PARAMETER Experiment Name: At_Drought_P Parameter: Tissue Value: Whole Plant
  misc_feature: MA Experiment 20000436 PARAMETER Experiment Name: At_Drought_P Parameter: Treatment Value: Drought vs. No Drought
  misc_feature: MA Experiment ID: 20000437 Result: Down-regulated in Transcription
  misc_feature: MA Experiment 20000437 PARAMETER Experiment Name: At_Drought_P Parameter: Age (day) Value: 8
  misc_feature: MA Experiment 20000437 PARAMETER Experiment Name: At_Drought_P Parameter: Organism Value: A. thaliana
  misc_feature: MA Experiment 20000437 PARAMETER Experiment Name: At_Drought_P Parameter: Plant Line Value: WS
  misc_feature: MA Experiment 20000437 PARAMETER Experiment Name: At_Drought_P Parameter: Timepoint (hr) Value: 24
  misc_feature: MA Experiment 20000437 PARAMETER Experiment Name: At_Drought_P Parameter: Tissue Value: Whole Plant
  misc_feature: MA Experiment 20000437 PARAMETER Experiment Name: At_Drought_P Parameter: Treatment Value: Drought vs. No Drought
  misc_feature: MA Experiment ID: 20000438 Result: Down-regulated in Transcription
  misc_feature: MA Experiment 20000438 PARAMETER Experiment Name: At_Shoots__P Parameter: Age (day) Value: 14
  misc_feature: MA Experiment 20000438 PARAMETER Experiment Name: At_Shoots__P Parameter: Tissue Value: Shoots vs. Whole Plant
  misc_feature: MA Experiment ID: 20000439 Result: Down-regulated in Transcription
  misc_feature: MA Experiment 20000439 PARAMETER Experiment Name: At_Roots__P Parameter: Age (day) Value: 14 vs. 21
  misc_feature: MA Experiment 20000439 PARAMETER Experiment Name: At_Roots__P Parameter: Organism Value: A. thaliana
  misc_feature: MA Experiment 20000439 PARAMETER Experiment Name: At_Roots__P Parameter: Tissue Value: Roots vs. Whole Plant
  misc_feature: MA Experiment ID: 20000441 Result: Up-regulated in Transcription
  misc_feature: MA Experiment 20000441 PARAMETER Experiment Name: At_1uM_BR-BRZ__P Parameter: Tissue Value: Shoot Apices
  misc_feature: MA Experiment 20000441 PARAMETER Experiment Name: At_1uM_BR-BRZ__P Parameter: Treatment Value: 1uM BR vs. No Treatment
  misc_feature: MA Experiment ID: 20000527 Result: Up-regulated in Transcription
  misc_feature: MA Experiment 20000527 PARAMETER Experiment Name: At_10percent_PEG_P Parameter: Age (day) Value: 20
  misc_feature: MA Experiment 20000527 PARAMETER Experiment Name: At_10percent_PEG_P Parameter: Organism Value: A. thaliana
  misc_feature: MA Experiment 20000527 PARAMETER Experiment Name: At_10percent_PEG_P Parameter: Plant Line Value: WS
  misc_feature: MA Experiment 20000527 PARAMETER Experiment Name: At_10percent_PEG_P Parameter: Timepoint (day) Value: 20
  misc_feature: MA Experiment 20000527 PARAMETER Experiment Name: At_10percent_PEG_P Parameter: Tissue Value: Whole Plant
  misc_feature: MA Experiment 20000527 PARAMETER Experiment Name: At_10percent_PEG_P Parameter: Treatment Value: 10percent PEG vs. No Treatment
  misc_feature: MA Experiment ID: 20000575 Result: Down-regulated in Transcription
  misc_feature: MA Experiment 20000575 PARAMETER Experiment Name: At_100uM_ABA_Mutants__P Parameter: Organism Value: A. thaliana
  misc_feature: MA Experiment 20000575 PARAMETER Experiment Name: At_100uM_ABA_Mutants__P Parameter: Plant Line Value: CS22
  misc_feature: MA Experiment 20000575 PARAMETER Experiment Name: At_100uM_ABA_Mutants__P Parameter: Timepoint (hr) Value: 6
  misc_feature: MA Experiment 20000575 PARAMETER Experiment Name: At_100uM_ABA_Mutants__P Parameter: Tissue Value: Whole Plant
  misc_feature: MA Experiment 20000575 PARAMETER Experiment Name: At_100uM_ABA_Mutants__P Parameter: Treatment Value: 1uM ABA vs. No Treatment
  misc_feature: MA Experiment ID: 20000794 Result: Up-regulated in Transcription
  misc_feature: MA Experiment 20000794 PARAMETER Experiment Name: At_Petals_P Parameter: Age (day) Value: 23-25 days
  misc_feature: MA Experiment 20000794 PARAMETER Experiment Name: At_Petals_P Parameter: Plant Line Value: WS
  misc_feature: MA Experiment 20000794 PARAMETER Experiment Name: At_Petals_P Parameter: Tissue Value: Petals vs. Whole plant
  misc_feature: MA Experiment ID: 20001248 Result: Up-regulated in Transcription
  misc_feature: MA Experiment 20001248 PARAMETER Experiment Name: At_Far-red-induction_P Parameter: Age (day) Value: 7
  misc_feature: MA Experiment 20001248 PARAMETER Experiment Name: At_Far-red-induction_P Parameter: Light Value: Far-red vs. White
  misc_feature: MA Experiment 20001248 PARAMETER Experiment Name: At_Far-red-induction_P Parameter: Organism Value: A. thaliana
  misc_feature: MA Experiment 20001248 PARAMETER Experiment Name: At_Far-red-induction_P Parameter: Plant Line Value: Columbia
  misc_feature: MA Experiment 20001248 PARAMETER Experiment Name: At_Far-red-induction_P Parameter: Timepoint (hr) Value: 4
  misc_feature: MA Experiment 20001248 PARAMETER Experiment Name: At_Far-red-induction_P Parameter: Tissue Value: Whole Plant
  misc_feature: MA Experiment ID: 20001450 Result: Up-regulated in Transcription
  misc_feature: MA Experiment 20001450 PARAMETER Experiment Name: At_Far-red-induction_P Parameter: Age (day) Value: 7
  misc_feature: MA Experiment 20001450 PARAMETER Experiment Name: At_Far-red-induction_P Parameter: Light Value: Far-red vs. White
  misc_feature: MA Experiment 20001450 PARAMETER Experiment Name: At_Far-red-induction_P Parameter: Organism Value: A. thaliana
  misc_feature: MA Experiment 20001450 PARAMETER Experiment Name: At_Far-red-induction_P Parameter: Plant Line Value: Columbia
  misc_feature: MA Experiment 20001450 PARAMETER Experiment Name: At_Far-red-induction_P Parameter: Timepoint (hr) Value: 8
  misc_feature: MA Experiment 20001450 PARAMETER Experiment Name: At_Far-red-induction_P Parameter: Tissue Value: Whole Plant
  misc_feature: MA Experiment ID: 20001451 Result: Up-regulated in Transcription
  misc_feature: MA Experiment 20001451 PARAMETER Experiment Name: At_Far-red-induction_P Parameter: Age (day) Value: 7
  misc_feature: MA Experiment 20001451 PARAMETER Experiment Name: At_Far-red-induction_P Parameter: Light Value: Far-red vs. White
  misc_feature: MA Experiment 20001451 PARAMETER Experiment Name: At_Far-red-induction_P Parameter: Organism Value: A. thaliana
  misc_feature: MA Experiment 20001451 PARAMETER Experiment Name: At_Far-red-induction_P Parameter: Plant Line Value: Columbia
  misc_feature: MA Experiment 20001451 PARAMETER Experiment Name: At_Far-red-induction_P Parameter: Timepoint (hr) Value: 24
  misc_feature: MA Experiment 20001451 PARAMETER Experiment Name: At_Far-red-induction_P Parameter: Tissue Value: Whole Plant
  misc_feature: MA Experiment ID: 20001555 Result: Down-regulated in Transcription
  misc_feature: MA Experiment 20001555 PARAMETER Experiment Name: At_Drought_Soil_Dry_P Parameter: Age (day) Value: 24
  misc_feature: MA Experiment 20001555 PARAMETER Experiment Name: At_Drought_Soil_Dry_P Parameter: Organism Value: A. thaliana
  misc_feature: MA Experiment 20001555 PARAMETER Experiment Name: At_Drought_Soil_Dry_P Parameter: Plant Line Value: WS
  misc_feature: MA Experiment 20001555 PARAMETER Experiment Name: At_Drought_Soil_Dry_P Parameter: Post Timepoint (hr) Value: None
  misc_feature: MA Experiment 20001555 PARAMETER Experiment Name: At_Drought_Soil_Dry_P Parameter: Post-Treatment Value: None
  misc_feature: MA Experiment 20001555 PARAMETER Experiment Name: At_Drought_Soil_Dry_P Parameter: Timepoint (day) Value: 10
  misc_feature: MA Experiment 20001555 PARAMETER Experiment Name: At_Drought_Soil_Dry_P Parameter: Treatment Value: Drought vs. No Drought
  misc_feature: MA Experiment ID: 20001556 Result: Down-regulated in Transcription
  misc_feature: MA Experiment 20001556 PARAMETER Experiment Name: At_Drought_Soil_Dry_P Parameter: Age (day) Value: 26
  misc_feature: MA Experiment 20001556 PARAMETER Experiment Name: At_Drought_Soil_Dry_P Parameter: Organism Value: A. thaliana
  misc_feature: MA Experiment 20001556 PARAMETER Experiment Name: At_Drought_Soil_Dry_P Parameter: Plant Line Value: WS
  misc_feature: MA Experiment 20001556 PARAMETER Experiment Name: At_Drought_Soil_Dry_P Parameter: Post Timepoint (hr) Value: None
  misc_feature: MA Experiment 20001556 PARAMETER Experiment Name: At_Drought_Soil_Dry_P Parameter: Post-Treatment Value: None
  misc_feature: MA Experiment 20001556 PARAMETER Experiment Name: At_Drought_Soil_Dry_P Parameter: Timepoint (day) Value: 12
  misc_feature: MA Experiment 20001556 PARAMETER Experiment Name: At_Drought_Soil_Dry_P Parameter: Treatment Value: Drought vs. No Drought
  misc_feature: MA Experiment ID: 20001559 Result: Down-regulated in Transcription
  misc_feature: MA Experiment 20001559 PARAMETER Experiment Name: At_Drought_Soil_Dry_P Parameter: Age (day) Value: 28
  misc_feature: MA Experiment 20001559 PARAMETER Experiment Name: At_Drought_Soil_Dry_P Parameter: Organism Value: A. thaliana
  misc_feature: MA Experiment 20001559 PARAMETER Experiment Name: At_Drought_Soil_Dry_P Parameter: Plant Line Value: WS
  misc_feature: MA Experiment 20001559 PARAMETER Experiment Name: At_Drought_Soil_Dry_P Parameter: Post Timepoint (hr) Value: 29
  misc_feature: MA Experiment 20001559 PARAMETER Experiment Name: At_Drought_Soil_Dry_P Parameter: Post-Treatment Value: Re-Water vs. No Drought
  misc_feature: MA Experiment 20001559 PARAMETER Experiment Name: At_Drought_Soil_Dry_P Parameter: Timepoint (day) Value: 14
  misc_feature: MA Experiment 20001559 PARAMETER Experiment Name: At_Drought_Soil_Dry_P Parameter: Treatment Value: Drought vs. No Drought
  misc_feature: MA Experiment ID: 20001560 Result: Down-regulated in Transcription
  misc_feature: MA Experiment 20001560 PARAMETER Experiment Name: At_Drought_Soil_Dry_P Parameter: Age (day) Value: 28
  misc_feature: MA Experiment 20001560 PARAMETER Experiment Name: At_Drought_Soil_Dry_P Parameter: Organism Value: A. thaliana
  misc_feature: MA Experiment 20001560 PARAMETER Experiment Name: At_Drought_Soil_Dry_P Parameter: Plant Line Value: WS
  misc_feature: MA Experiment 20001560 PARAMETER Experiment Name: At_Drought_Soil_Dry_P Parameter: Post Timepoint (hr) Value: None
  misc_feature: MA Experiment 20001560 PARAMETER Experiment Name: At_Drought_Soil_Dry_P Parameter: Post-Treatment Value: None
  misc_feature: MA Experiment 20001560 PARAMETER Experiment Name: At_Drought_Soil_Dry_P Parameter: Timepoint (day) Value: 14
  misc_feature: MA Experiment 20001560 PARAMETER Experiment Name: At_Drought_Soil_Dry_P Parameter: Treatment Value: Drought vs. No Drought
  misc_feature: MA Experiment ID: 20001756 Result: Up-regulated in Transcription
  misc_feature: MA Experiment 20001756 PARAMETER Experiment Name: At_50mM_NH4NO3_L-to-H_P Parameter: Timepoint (hr) Value: 4
  misc_feature: MA Experiment 20001756 PARAMETER Experiment Name: At_50mM_NH4NO3_L-to-H_P Parameter: Tissue Value: Leaf
  misc_feature: MA Experiment 20001756 PARAMETER Experiment Name: At_50mM_NH4NO3_L-to-H_P Parameter: Treatment Value: 50mM NH4NO3 vs 100mM Mannitol
  misc_feature: MA Experiment ID: 20001757 Result: Up-regulated in Transcription
  misc_feature: MA Experiment 20001757 PARAMETER Experiment Name: At_50mM_NH4NO3_L-to-H_P Parameter: Timepoint (hr) Value: 6
  misc_feature: MA Experiment 20001757 PARAMETER Experiment Name: At_50mM_NH4NO3_L-to-H_P Parameter: Tissue Value: Leaf
  misc_feature: MA Experiment 20001757 PARAMETER Experiment Name: At_50mM_NH4NO3_L-to-H_P Parameter: Treatment Value: 50mM NH4NO3 vs 100mM Mannitol
tccgaacaaaaaaaaaaacaagttttcttctttttacactcaagaatataaattccctgttctccagatcttttctcaagaaaatttaaagctttaacttaagaaagcttgaacctttctcttccaaccacatcttccttctttttatcctctagctcaacttagaaagaatagaataaagtggcaaaaccgaaagtgaaccaacttgtagtaaattaatagttatgggttcgaaacctaatgccatgaagaatgtggtggctatggcggcagtttctgctctgttccttctagggtttcttgtttgctctgtttctggttctgtctcttacgatagcagagccattaccatcaatggcaaaagaagaatccttatctctggatctattcactaccccagaagtactcctgagatgtggccagatctaattcggaaagcaaaggaaggaggcttagatgtgattcagacttatgtgttctggaatgggcatgagccatctcctggaaaatattatttcgagggcaactatgatttggttaagtttgtcaagttggtccaacaatctggactctatcttcatctaaggattggtccttatgtctgtgctgaatggaacttcggaggatttcctgtttggcttaagtacattccagggattagcttcagaacagataacggtcctttcaaggctcaaatgcaaagattcaccacgaagattgttaacatgatgaaagctgagaggctttttgaatctcaaggcggtcctataattctctctcagattgaaaatgaatatggaccaatggagtatgagcttggtgcaccgggccggtcatacaccaactgggcagctaagatggcggtggggctaggcactggtgtcccttgggtcatgtgcaaacaagacgatgctcccgaccccattatcaatgcttgcaatggcttctactgtgattacttctccccaaacaaggcttacaagcctaaaatgtggaccgaagcctggactggatggtttacaaagtttggaggcccagttccttaccgcccagctgaagatatggccttttccgttgcaaggtttatccaaaagggtggatctttcatcaactactatatgtatcatggtggaacaaactttggtcgaactgctggtggtccgtttatcgcaactagctatgattatgatgctcctcttgacgaatatggacttgaaaggcagcctaagtgggggcacttgaaagatttgcatagagcaattaagctgtgtgaaccagctttagtatcaggagagcccacaagaatgcctctcggaaactatcaagaggctcatgtgtacaaatcaaaatctggagcttgttctgcattcttagcaaattataatccaaaatcttacgccaaagtttctttcgggaacaatcactacaatctccctccgtggtctataagtattctcccagactgcaaaaacacagtttacaacacagccagggttggtgctcaaacttctaggatgaaaatggttcgggttcctgttcatggtggtttatcttggcaagcatacaatgaagacccatcaacttacatcgatgagtcattcacaatggtcggattagtggagcagataaacactacacgagacacttcggattacctgtggtacatgactgatgttaaagttgatgccaatgaaggatttttgaggaatggagatttgccgactcttactgttctatcagctggccatgctatgcatgtgtttatcaatggtcaattatctggatctgcatatggtagtttagactctcctaagctaacttttcggaaaggtgtgaatctaagagctggtttcaacaaaattgcgatactaagcattgctgttggtctcccgaatgtgggtccacattttgagacatggaatgctggagttttgggtccagtttcattgaacggtctcaatgggggacggagagatctatcatggcagaaatggacttataaggttggtcttaaaggagagtctctgagtcttcattcacttagtggtagctcatcggttgagtgggcagaaggtgcatttgttgcacagaagcaaccacttacttggtacaagacgactttctctgctccagctggagattcgccattggctgtagacatgggaagcatgggaaaaggtcaaatatggataaatgggcagagcctgggacgtcactggcctgcatataaagcagttggttcttgcagcgagtgttcttataccggaacattcagagaggacaagtgcttaagaaactgtggagaggcttctcaaagatggtaccatgtcccaaggtcgtggctaaaaccaagtggcaatctattggttgtctttgaggaatggggaggagacccgaacggaatcacgttggtcagaagagaagtggacagtgtatgtgcagatatctatgaatggcaatcaacgctggtgaactaccaattgcatgcttctggaaaagttaataaaccattgcatcccaaagcacatttacaatgcgggcccggacaaaagatcaccaccgtgaagtttgctagtttcgggacacctgaagggacttgtggtagttaccgtcaaggaagctgtcacgcccatcactcctatgacgctttcaacaaactttgtgttgggcagaactggtgttctgtaactgtagcaccggagatgtttggtggagatccgtgtccaaatgtgatgaagaaactcgcggtggaagccgtttgtgcttaaatgaaagcagacgcaacagcaatcaaaagactgtaaaggtggttacttacgcattcttacaggtttctgatggtattagtatgttttatgaagacaacagaagaagttggtatttttctagctccttattttatcacggtggaagttgtacaaagggacgcagcacgccgttcaacaatttgcagagttgtgatttatatgtaaataagcttgggaagggtttgttattgtaacccaagaaagaagatgaagaagaagaagaagcacattgagactggagaatctaagtccatgtgtagattcttttggtaggagcaaaactgggattagtttattctctgagttttgctttgaacgtgtttgttgttgctgttgttgtagtcgatactattagatgagacattctctgcaattatctcattgctaaatttatgtaatggtttttctttctttctatggaatgaagcatatcagtcttgaagtaaaccaatgtgtgaatcacccctcc

SEQ ID NO: 43636 - protein, 847 aa, Arabidopsis thaliana
  peptide (1)..(847): Ceres Seq. ID no. 13576595
  misc_feature (769)..(846): Pfam Name: Galactose binding lectin domain Pfam Description: Galactose binding lectin domain
  misc_feature (64)..(679): Homolog of NCBI NO: 22329242 NR Description: glycosyl hydrolase family 35 (beta-galactosidase)
  misc_feature (556)..(846): Homolog of NCBI NO: 37533066 NR Description: putative beta-galactosidase
  misc_feature (7)..(543): Homolog of NCBI NO: 37533066 NR Description: putative beta-galactosidase
  misc_feature (19)..(846): Homolog of NCBI NO: 34913498 NR Description: putative beta-galactosidase
  misc_feature (12)..(846): Homolog of NCBI NO: 37532876 NR Description: putative beta-galactosidase
  misc_feature (64)..(846): Homolog of NCBI NO: 30687930 NR Description: glycosyl hydrolase family 35 (beta-galactosidase)
  misc_feature (623)..(846): Homolog of NCBI NO: 25326168 NR Description: probable beta-galactosidase [imported] -
  misc_feature (22)..(679): Homolog of NCBI NO: 25326168 NR Description: probable beta-galactosidase [imported] -
  misc_feature (20)..(847): Homolog of NCBI NO: 30683905 NR Description: glycosyl hydrolase family 35 (beta-galactosidase)
  misc_feature (21)..(847): Homolog of NCBI NO: 18419821 NR Description: glycosyl hydrolase family 35 (beta-galactosidase)
MGSKPNAMKNVVAMAAVSALFLLGFLVCSVSGSVSYDSRAITINGKRRILISGSIHYPRSTPEMWPDLIRKAKEGGLDVIQTYVFWNGHEPSPGKYYFEGNYDLVKFVKLVQQSGLYLHLRIGPYVCAEWNFGGFPVWLKYIPGISFRTDNGPFKAQMQRFTTKIVNMMKAERLFESQGGPIILSQIENEYGPMEYELGAPGRSYTNWAAKMAVGLGTGVPWVMCKQDDAPDPIINACNGFYCDYFSPNKAYKPKMWTEAWTGWFTKFGGPVPYRPAEDMAFSVARFIQKGGSFINYYMYHGGTNFGRTAGGPFIATSYDYDAPLDEYGLERQPKWGHLKDLHRAIKLCEPALVSGEPTRMPLGNYQEAHVYKSKSGACSAFLANYNPKSYAKVSFGNNHYNLPPWSISILPDCKNTVYNTARVGAQTSRMKMVRVPVHGGLSWQAYNEDPSTYIDESFTMVGLVEQINTTRDTSDYLWYMTDVKVDANEGFLRNGDLPTLTVLSAGHAMHVFINGQLSGSAYGSLDSPKLTFRKGVNLRAGFNKIAILSIAVGLPNVGPHFETWNAGVLGPVSLNGLNGGRRDLSWQKWTYKVGLKGESLSLHSLSGSSSVEWAEGAFVAQKQPLTWYKTTFSAPAGDSPLAVDMGSMGKGQIWINGQSLGRHWPAYKAVGSCSECSYTGTFREDKCLRNCGEASQRWYHVPRSWLKPSGNLLVVFEEWGGDPNGITLVRREVDSVCADIYEWQSTLVNYQLHASGKVNKPLHPKAHLQCGPGQKITTVKFASFGTPEGTCGSYRQGSCHAHHSYDAFNKLCVGQNWCSVTVAPEMFGGDPCPNVMKKLAVEAVCA

SEQ ID NO: 43637 - protein, 840 aa, Arabidopsis thaliana
  peptide (1)..(840): Ceres Seq. ID no. 13576596
  misc_feature (762)..(839): Pfam Name: Galactose binding lectin domain Pfam Description: Galactose binding lectin domain
  misc_feature (57)..(672): Homolog of NCBI NO: 22329242 NR Description: glycosyl hydrolase family 35 (beta-galactosidase)
  misc_feature (549)..(839): Homolog of NCBI NO: 37533066 NR Description: putative beta-galactosidase
  misc_feature (1)..(536): Homolog of NCBI NO: 37533066 NR Description: putative beta-galactosidase
  misc_feature (12)..(839): Homolog of NCBI NO: 34913498 NR Description: putative beta-galactosidase
  misc_feature (5)..(839): Homolog of NCBI NO: 37532876 NR Description: putative beta-galactosidase
  misc_feature (57)..(839): Homolog of NCBI NO: 30687930 NR Description: glycosyl hydrolase family 35 (beta-galactosidase)
  misc_feature (616)..(839): Homolog of NCBI NO: 25326168 NR Description: probable beta-galactosidase [imported] -
  misc_feature (15)..(672): Homolog of NCBI NO: 25326168 NR Description: probable beta-galactosidase [imported] -
  misc_feature (13)..(840): Homolog of NCBI NO: 30683905 NR Description: glycosyl hydrolase family 35 (beta-galactosidase)
  misc_feature (14)..(840): Homolog of NCBI NO: 18419821 NR Description: glycosyl hydrolase family 35 (beta-galactosidase)
MKNVVAMAAVSALFLLGFLVCSVSGSVSYDSRAITINGKRRILISGSIHYPRSTPEMWPDLIRKAKEGGLDVIQTYVFWNGHEPSPGKYYFEGNYDLVKFVKLVQQSGLYLHLRIGPYVCAEWNFGGFPVWLKYIPGISFRTDNGPFKAQMQRFTTKIVNMMKAERLFESQGGPIILSQIENEYGPMEYELGAPGRSYTNWAAKMAVGLGTGVPWVMCKQDDAPDPIINACNGFYCDYFSPNKAYKPKMWTEAWTGWFTKFGGPVPYRPAEDMAFSVARFIQKGGSFINYYMYHGGTNFGRTAGGPFIATSYDYDAPLDEYGLERQPKWGHLKDLHRAIKLCEPALVSGEPTRMPLGNYQEAHVYKSKSGACSAFLANYNPKSYAKVSFGNNHYNLPPWSISILPDCKNTVYNTARVGAQTSRMKMVRVPVHGGLSWQAYNEDPSTYIDESFTMVGLVEQINTTRDTSDYLWYMTDVKVDANEGFLRNGDLPTLTVLSAGHAMHVFINGQLSGSAYGSLDSPKLTFRKGVNLRAGFNKIAILSIAVGLPNVGPHFETWNAGVLGPVSLNGLNGGRRDLSWQKWTYKVGLKGESLSLHSLSGSSSVEWAEGAFVAQKQPLTWYKTTFSAPAGDSPLAVDMGSMGKGQIWINGQSLGRHWPAYKAVGSCSECSYTGTFREDKCLRNCGEASQRWYHVPRSWLKPSGNLLVVFEEWGGDPNGITLVRREVDSVCADIYEWQSTLVNYQLHASGKVNKPLHPKAHLQCGPGQKITTVKFASFGTPEGTCGSYRQGSCHAHHSYDAFNKLCVGQNWCSVTVAPEMFGGDPCPNVMKKLAVEAVCA

SEQ ID NO: 43638 - protein, 834 aa, Arabidopsis thaliana
  peptide (1)..(834): Ceres Seq. ID no. 13576597
  misc_feature (756)..(833): Pfam Name: Galactose binding lectin domain Pfam Description: Galactose binding lectin domain
  misc_feature (51)..(666): Homolog of NCBI NO: 22329242 NR Description: glycosyl hydrolase family 35 (beta-galactosidase)
  misc_feature (543)..(833): Homolog of NCBI NO: 37533066 NR Description: putative beta-galactosidase
  misc_feature (1)..(530): Homolog of NCBI NO: 37533066 NR Description: putative beta-galactosidase
  misc_feature (6)..(833): Homolog of NCBI NO: 34913498 NR Description: putative beta-galactosidase
  misc_feature (1)..(833): Homolog of NCBI NO: 37532876 NR Description: putative beta-galactosidase
  misc_feature (51)..(833): Homolog of NCBI NO: 30687930 NR Description: glycosyl hydrolase family 35 (beta-galactosidase)
  misc_feature (610)..(833): Homolog of NCBI NO: 25326168 NR Description: probable beta-galactosidase [imported] -
  misc_feature (9)..(666): Homolog of NCBI NO: 25326168 NR Description: probable beta-galactosidase [imported] -
  misc_feature (7)..(834): Homolog of NCBI NO: 30683905 NR Description: glycosyl hydrolase family 35 (beta-galactosidase)
  misc_feature (8)..(834): Homolog of NCBI NO: 18419821 NR Description: glycosyl hydrolase family 35 (beta-galactosidase)
MAAVSALFLLGFLVCSVSGSVSYDSRAITINGKRRILISGSIHYPRSTPEMWPDLIRKAKEGGLDVIQTYVFWNGHEPSPGKYYFEGNYDLVKFVKLVQQSGLYLHLRIGPYVCAEWNFGGFPVWLKYIPGISFRTDNGPFKAQMQRFTTKIVNMMKAERLFESQGGPIILSQIENEYGPMEYELGAPGRSYTNWAAKMAVGLGTGVPWVMCKQDDAPDPIINACNGFYCDYFSPNKAYKPKMWTEAWTGWFTKFGGPVPYRPAEDMAFSVARFIQKGGSFINYYMYHGGTNFGRTAGGPFIATSYDYDAPLDEYGLERQPKWGHLKDLHRAIKLCEPALVSGEPTRMPLGNYQEAHVYKSKSGACSAFLANYNPKSYAKVSFGNNHYNLPPWSISILPDCKNTVYNTARVGAQTSRMKMVRVPVHGGLSWQAYNEDPSTYIDESFTMVGLVEQINTTRDTSDYLWYMTDVKVDANEGFLRNGDLPTLTVLSAGHAMHVFINGQLSGSAYGSLDSPKLTFRKGVNLRAGFNKIAILSIAVGLPNVGPHFETWNAGVLGPVSLNGLNGGRRDLSWQKWTYKVGLKGESLSLHSLSGSSSVEWAEGAFVAQKQPLTWYKTTFSAPAGDSPLAVDMGSMGKGQIWINGQSLGRHWPAYKAVGSCSECSYTGTFREDKCLRNCGEASQRWYHVPRSWLKPSGNLLVVFEEWGGDPNGITLVRREVDSVCADIYEWQSTLVNYQLHASGKVNKPLHPKAHLQCGPGQKITTVKFASFGTPEGTCGSYRQGSCHAHHSYDAFNKLCVGQNWCSVTVAPEMFGGDPCPNVMKKLAVEAVCA

SEQ ID NO: 43639 - DNA, 1313 bp, Arabidopsis thaliana
  misc_feature (1)..(1313): Ceres Seq. ID no. 12641113
  misc_feature: MA Experiment ID: 108434 Result: Down-regulated in Transcription
  misc_feature: MA Experiment 108434 PARAMETER Experiment Name: At_Root_Tips_cDNA_P Parameter: Tissue Value: Root Tips
  misc_feature: MA Experiment ID: 108463 Result: Up-regulated in Transcription
  misc_feature: MA Experiment 108463 PARAMETER Experiment Name: At_Germinating_Seeds_cDNA_P Parameter: Age (day) Value: 3 vs. 0
  misc_feature: MA Experiment 108463 PARAMETER Experiment Name: At_Germinating_Seeds_cDNA_P Parameter: Tissue Value: Germinating Seeds
  misc_feature: MA Experiment ID: 108464 Result: Up-regulated in Transcription
  misc_feature: MA Experiment 108464 PARAMETER Experiment Name: At_Germinating_Seeds_cDNA_P Parameter: Age (day) Value: 4 vs. 0
  misc_feature: MA Experiment 108464 PARAMETER Experiment Name: At_Germinating_Seeds_cDNA_P Parameter: Tissue Value: Germinating Seeds
  misc_feature: MA Experiment ID: 108469 Result: Up-regulated in Transcription
  misc_feature: MA Experiment ID: 108488 Result: Down-regulated in Transcription
  misc_feature: MA Experiment ID: 108572 Result: Up-regulated in Transcription
  misc_feature: MA Experiment 108572 PARAMETER Experiment Name: At_Drought_cDNA_P Parameter: Timepoint (hr) Value: 1
  misc_feature: MA Experiment 108572 PARAMETER Experiment Name: At_Drought_cDNA_P Parameter: Tissue Value: Aerial
  misc_feature: MA Experiment 108572 PARAMETER Experiment Name: At_Drought_cDNA_P Parameter: Treatment Value: Drought vs. No Drought
  misc_feature: MA Experiment ID: 108585 Result: Up-regulated in Transcription
  misc_feature: MA Experiment 108585 PARAMETER Experiment Name: At_5mM_NaNP_cDNA_P Parameter: Timepoint (hr) Value: 6
  misc_feature: MA Experiment 108585 PARAMETER Experiment Name: At_5mM_NaNP_cDNA_P Parameter: Tissue Value: Aerial
  misc_feature: MA Experiment 108585 PARAMETER Experiment Name: At_5mM_NaNP_cDNA_P Parameter: Treatment Value: null
  misc_feature: MA Experiment ID: 108594 Result: Down-regulated in Transcription
  misc_feature: MA Experiment 108594 PARAMETER Experiment Name: At_Ler-rhl_Root_cDNA_P Parameter: Plant Line Value: null
  misc_feature: MA Experiment ID: 108667 Result: Up-regulated in Transcription
  misc_feature: MA Experiment 108667 PARAMETER Experiment Name: At_2mM_SA_cDNA_P Parameter: Plant Line Value: WS
  misc_feature: MA Experiment 108667 PARAMETER Experiment Name: At_2mM_SA_cDNA_P Parameter: Timepoint (hr) Value: 1
  misc_feature: MA Experiment 108667 PARAMETER Experiment Name: At_2mM_SA_cDNA_P Parameter: Treatment Value: 2mM SA vs. No Treatment
  misc_feature: MA Experiment ID: 108668 Result: Up-regulated in Transcription
  misc_feature: MA Experiment 108668 PARAMETER Experiment Name: At_2mM_SA_cDNA_P Parameter: Plant Line Value: WS
  misc_feature: MA Experiment 108668 PARAMETER Experiment Name: At_2mM_SA_cDNA_P Parameter: Timepoint (hr) Value: 6
  misc_feature: MA Experiment 108668 PARAMETER Experiment Name: At_2mM_SA_cDNA_P Parameter: Treatment Value: 2mM SA vs. No Treatment
  misc_feature: MA Experiment ID: 20000182 Result: Up-regulated in Transcription
  misc_feature: MA Experiment 20000182 PARAMETER Experiment Name: At_2mM_SA_P Parameter: Age (day) Value: 14
  misc_feature: MA Experiment 20000182 PARAMETER Experiment Name: At_2mM_SA_P Parameter: Organism Value: A. thaliana
  misc_feature: MA Experiment 20000182 PARAMETER Experiment Name: At_2mM_SA_P Parameter: Plant Line Value: WS
  misc_feature: MA Experiment 20000182 PARAMETER Experiment Name: At_2mM_SA_P Parameter: Timepoint (hr) Value: 6
  misc_feature: MA Experiment 20000182 PARAMETER Experiment Name: At_2mM_SA_P Parameter: Tissue Value: Aerial
  misc_feature: MA Experiment 20000182 PARAMETER Experiment Name: At_2mM_SA_P Parameter: Treatment Value: 2mM SA vs. No Treatment
  misc_feature: MA Experiment ID: 20000234 Result: Down-regulated in Transcription
  misc_feature: MA Experiment 20000234 PARAMETER Experiment Name: At_Siliques_P Parameter: Age (day) Value: 21
  misc_feature: MA Experiment 20000234 PARAMETER Experiment Name: At_Siliques_P Parameter: Organism Value: A. thaliana
  misc_feature: MA Experiment 20000234 PARAMETER Experiment Name: At_Siliques_P Parameter: Plant Line Value: WS
  misc_feature: MA Experiment 20000234 PARAMETER Experiment Name: At_Siliques_P Parameter: Tissue Value: Less Than 5mm Siliques vs. Whole Plant
  misc_feature: MA Experiment ID: 20000709 Result: Up-regulated in Transcription
  misc_feature: MA Experiment 20000709 PARAMETER Experiment Name: At_15mM_NH4NO3_L-to-H_P Parameter: Age (hr) Value: 14
  misc_feature: MA Experiment 20000709 PARAMETER Experiment Name: At_15mM_NH4NO3_L-to-H_P Parameter: Organism Value: A. thaliana
  misc_feature: MA Experiment 20000709 PARAMETER Experiment Name: At_15mM_NH4NO3_L-to-H_P Parameter: Plant Line Value: WS
  misc_feature: MA Experiment 20000709 PARAMETER Experiment Name: At_15mM_NH4NO3_L-to-H_P Parameter: Timepoint (hr) Value: 4
  misc_feature: MA Experiment 20000709 PARAMETER Experiment Name: At_15mM_NH4NO3_L-to-H_P Parameter: Tissue Value: Aerial
  misc_feature: MA Experiment 20000709 PARAMETER Experiment Name: At_15mM_NH4NO3_L-to-H_P Parameter: Treatment Value: 15mM NH4NO3 vs. 30mM Mannitol
gatttatagcagaggaaagtgaaatcatgaaagggattctagggtttgaatacgggatagttcaggcgccattaggaccagatatctccggaccagagcttgtagccgccgtcgctaatgcaggagggattggtcttctcagatgtcctgattgggtaaattgcaactttttcgttttctttgatttttgtttatagatatattgaattatgtgaatcaatgaatcaggagtgtcctgattacttgagagagcttataagaaagacaaagacattgacagagaaaccatttgggatcggtgttgttcttgcgtttcctcatgatttgaacattaagacaatcttagaagagaaagtggctgtcttgcagctttattggggtgattgttcacaggagcttgtggatgatgctcactttgccggtgtcaaagttattcctcaggtggggaatgtcgaagaagctagaaaggctgttgctgtaggagtagacgccattattgtccaagggcgtgaagcaggtgggcatgttattggcaaggatggtctcttttcattgttgccaagagtggtggatttagttggggaacgcgatattcccgttattgctgctggaggaattgtggatggacgcggttatgttgcagctttgtcacttggggctcaaggggtctgtctaggcacaagatttgtggcgactcatgaaagctatgcacacccaatatacaaaaggaagttgattgaatatgaaaaaaccgaatacacggatgtatttggaagagcaaggtggcctggtgcgcctcaacgtgttctggagacgcctttctttgatgactggaggtctcttccggctcatgagaatgaagttaaccaacctattattggacgttccaccatacatggcgttgaaaaggagataagaagattttcaggaacagtaccaaacatgacgacaacaggcgacttagagagtatggctatgtatgcaggccaaagcgtaggccttatcaaggagattttaccggctggagaggtagtgaaaagtcttgtggaagaagctcaggctctgatcctccaaaagttcaacaatgctactactacatgatgcagtcccagcctcaaatcatgagaaaacataaactttactgcttttggaatcgggatgaaaatagtctcatctaatgtaaataaggtacataaacttctgtatctctcgtgttgttttcaactagaaaaattgtgtccatcatgtgtaatccagcaatagaccttgtgtattggattaagtatacttcttatggttgtttgtttcctgtg

SEQ ID NO: 43640 - protein, 293 aa, Arabidopsis thaliana
  peptide (1)..(293): Ceres Seq. ID no. 12641114
  misc_feature (1)..(278): Pfam Name: 2-nitropropane dioxygenase Pfam Description: 2-nitropropane dioxygenase
  misc_feature (7)..(283): Homolog of NCBI NO: 15896810 NR Description: Dioxygenase related to 2-nitropropane dioxygenase
  misc_feature (7)..(283): Homolog of NCBI NO: 16799884 NR Description: similar to oxidoreductases [Listeria innocua]
  misc_feature (7)..(283): Homolog of NCBI NO: 16802856 NR Description: similar to oxidoreductases [Listeria
  misc_feature (7)..(283): Homolog of NCBI NO: 23038509 NR Description: hypothetical protein [Oenococcus oeni MCW]
  misc_feature (7)..(283): Homolog of NCBI NO: 23025170 NR Description: hypothetical protein
  misc_feature (8)..(283): Homolog of NCBI NO: 20807921 NR Description: Dioxygenases related to 2-nitropropane
  misc_feature (6)..(283): Homolog of NCBI NO: 16127609 NR Description: conserved hypothetical protein [Caulobacter
  misc_feature (6)..(291): Homolog of NCBI NO: 38505809 NR Description: 2-nitropropane dioxygenase [Synechocystis sp. PCC
  misc_feature (1)..(293): Homolog of NCBI NO: 30697978 NR Description: 2-nitropropane dioxygenase-related protein
  misc_feature (1)..(293): Homolog of NCBI NO: 30697982 NR Description: 2-nitropropane dioxygenase-related protein
MNQECPDYLRELIRKTKTLTEKPFGIGVVLAFPHDLNIKTILEEKVAVLQLYWGDCSQELVDDAHFAGVKVIPQVGNVEEARKAVAVGVDAIIVQGREAGGHVIGKDGLFSLLPRVVDLVGERDIPVIAAGGIVDGRGYVAALSLGAQGVCLGTRFVATHESYAHPIYKRKLIEYEKTEYTDVFGRARWPGAPQRVLETPFFDDWRSLPAHENEVNQPIIGRSTIHGVEKEIRRFSGTVPNMTTTGDLESMAMYAGQSVGLIKEILPAGEVVKSLVEEAQALILQKFNNATTT

SEQ ID NO: 43641 - DNA, 1372 bp, Arabidopsis thaliana
  misc_feature (1)..(1372): Ceres Seq. ID no. 12336296
  misc_feature: MA Experiment ID: 108434 Result: Up-regulated in Transcription
  misc_feature: MA Experiment 108434 PARAMETER Experiment Name: At_Root_Tips_cDNA_P Parameter: Tissue Value: Root Tips
  misc_feature: MA Experiment ID: 108561 Result: Up-regulated in Transcription
  misc_feature: MA Experiment 108561 PARAMETER Experiment Name: At_100uM_ABA_cDNA_P Parameter: Timepoint (hr) Value: 6
  misc_feature: MA Experiment 108561 PARAMETER Experiment Name: At_100uM_ABA_cDNA_P Parameter: Tissue Value: Aerial
  misc_feature: MA Experiment 108561 PARAMETER Experiment Name: At_100uM_ABA_cDNA_P Parameter: Treatment Value: 100uM ABA vs. No Treatment
  misc_feature: MA Experiment ID: 108572 Result: Up-regulated in Transcription
  misc_feature: MA Experiment 108572 PARAMETER Experiment Name: At_Drought_cDNA_P Parameter: Timepoint (hr) Value: 1
  misc_feature: MA Experiment 108572 PARAMETER Experiment Name: At_Drought_cDNA_P Parameter: Tissue Value: Aerial
  misc_feature: MA Experiment 108572 PARAMETER Experiment Name: At_Drought_cDNA_P Parameter: Treatment Value: Drought vs. No Drought
  misc_feature: MA Experiment ID: 108573 Result: Up-regulated in Transcription
  misc_feature: MA Experiment 108573 PARAMETER Experiment Name: At_Drought_cDNA_P Parameter: Timepoint (hr) Value: 6
  misc_feature: MA Experiment 108573 PARAMETER Experiment Name: At_Drought_cDNA_P Parameter: Tissue Value: Aerial
  misc_feature: MA Experiment 108573 PARAMETER Experiment Name: At_Drought_cDNA_P Parameter: Treatment Value: Drought vs. No Drought
  misc_feature: MA Experiment ID: 108579 Result: Down-regulated in Transcription
  misc_feature: MA Experiment 108579 PARAMETER Experiment Name: At_4deg_Cold_cDNA_P Parameter: Temperature (deg C) Value: 4 vs. 22
  misc_feature: MA Experiment 108579 PARAMETER Experiment Name: At_4deg_Cold_cDNA_P Parameter: Timepoint (hr) Value: 6
  misc_feature: MA Experiment 108579 PARAMETER Experiment Name: At_4deg_Cold_cDNA_P Parameter: Tissue Value: Aerial
  misc_feature: MA Experiment ID: 108605 Result: Up-regulated in Transcription
  misc_feature: MA Experiment 108605 PARAMETER Experiment Name: At_100uM_ABA_cDNA_P Parameter: Timepoint (hr) Value: 6
  misc_feature: MA Experiment 108605 PARAMETER Experiment Name: At_100uM_ABA_cDNA_P Parameter: Tissue Value: Aerial
  misc_feature: MA Experiment 108605 PARAMETER Experiment Name: At_100uM_ABA_cDNA_P Parameter: Treatment Value: 100uM ABA vs. No Treatment
  misc_feature: MA Experiment ID: 108607 Result: Up-regulated in Transcription
  misc_feature: MA Experiment 108607 PARAMETER Experiment Name: At_100uM_ABA_cDNA_P Parameter: Timepoint (hr) Value: 4
  misc_feature: MA Experiment 108607 PARAMETER Experiment Name: At_100uM_ABA_cDNA_P Parameter: Tissue Value: Aerial
  misc_feature: MA Experiment 108607 PARAMETER Experiment Name: At_100uM_ABA_cDNA_P Parameter: Treatment Value: 100uM ABA vs. No Treatment
  misc_feature: MA Experiment ID: 108608 Result: Up-regulated in Transcription
  misc_feature: MA Experiment 108608 PARAMETER Experiment Name: At_100uM_ABA_cDNA_P Parameter: Timepoint (hr) Value: 1
  misc_feature: MA Experiment 108608 PARAMETER Experiment Name: At_100uM_ABA_cDNA_P Parameter: Tissue Value: Aerial
  misc_feature: MA Experiment 108608 PARAMETER Experiment Name: At_100uM_ABA_cDNA_P Parameter: Treatment Value: 100uM ABA vs. No Treatment
  misc_feature: MA Experiment ID: 20000111 Result: Up-regulated in Transcription
  misc_feature: MA Experiment 20000111 PARAMETER Experiment Name: At_42deg_Heat_cDNA_P Parameter: Temperature (deg C) Value: 42 vs. 22
  misc_feature: MA Experiment 20000111 PARAMETER Experiment Name: At_42deg_Heat_cDNA_P Parameter: Timepoint (hr) Value: 6
  misc_feature: MA Experiment 20000111 PARAMETER Experiment Name: At_42deg_Heat_cDNA_P Parameter: Tissue Value: Aerial
  misc_feature: MA Experiment ID: 20000113 Result: Up-regulated in Transcription
  misc_feature: MA Experiment 20000113 PARAMETER Experiment Name: At_42deg_Heat_cDNA_P Parameter: Temperature (deg C) Value: 42 vs. 22
  misc_feature: MA Experiment 20000113 PARAMETER Experiment Name: At_42deg_Heat_cDNA_P Parameter: Timepoint (hr) Value: 8
  misc_feature: MA Experiment 20000113 PARAMETER Experiment Name: At_42deg_Heat_cDNA_P Parameter: Tissue Value: Aerial
  misc_feature: MA Experiment ID: 20000166 Result: Up-regulated in Transcription
  misc_feature: MA Experiment 20000166 PARAMETER Experiment Name: At_100uM_ABA_P Parameter: Age (day) Value: 14
  misc_feature: MA Experiment 20000166 PARAMETER Experiment Name: At_100uM_ABA_P Parameter: Organism Value: A. thaliana
  misc_feature: MA Experiment 20000166 PARAMETER Experiment Name: At_100uM_ABA_P Parameter: Plant Line Value: WS
  misc_feature: MA Experiment 20000166 PARAMETER Experiment Name: At_100uM_ABA_P Parameter: Timepoint (hr) Value: 1
  misc_feature: MA Experiment 20000166 PARAMETER Experiment Name: At_100uM_ABA_P Parameter: Tissue Value: Aerial
  misc_feature: MA Experiment 20000166 PARAMETER Experiment Name: At_100uM_ABA_P Parameter: Treatment Value: 100uM ABA vs. No Treatment
  misc_feature: MA Experiment ID: 20000173 Result: Up-regulated in Transcription
  misc_feature: MA Experiment 20000173 PARAMETER Experiment Name: At_42deg_Heat_P Parameter: Age (day) Value: 14
  misc_feature: MA Experiment 20000173 PARAMETER Experiment Name: At_42deg_Heat_P Parameter: Organism Value: A. thaliana
  misc_feature: MA Experiment 20000173 PARAMETER Experiment Name: At_42deg_Heat_P Parameter: Plant Line Value: WS
  misc_feature: MA Experiment 20000173 PARAMETER Experiment Name: At_42deg_Heat_P Parameter: Temperature (deg C) Value: 42 vs. 22
  misc_feature: MA Experiment 20000173 PARAMETER Experiment Name: At_42deg_Heat_P Parameter: Timepoint (hr) Value: 6
  misc_feature: MA Experiment 20000173 PARAMETER Experiment Name: At_42deg_Heat_P Parameter: Tissue Value: Aerial
  misc_feature: MA Experiment ID: 20000185 Result: Up-regulated in Transcription
  misc_feature: MA Experiment 20000185 PARAMETER Experiment Name: At_Roots__P Parameter: Age (day) Value: 7 vs. 21
  misc_feature: MA Experiment 20000185 PARAMETER Experiment Name: At_Roots__P Parameter: Organism Value: A. thaliana
  misc_feature: MA Experiment 20000185 PARAMETER Experiment Name: At_Roots__P Parameter: Tissue Value: Roots vs. Whole Plant
  misc_feature: MA Experiment ID: 20000227 Result: Up-regulated in Transcription
  misc_feature: MA Experiment 20000227 PARAMETER Experiment Name: At_Root-Tips-vs-Tops_P Parameter: Tissue Value: Root Tips vs. Root Tops
  misc_feature: MA Experiment ID: 20000436 Result: Up-regulated in Transcription
  misc_feature: MA Experiment 20000436 PARAMETER Experiment Name: At_Drought_P Parameter: Age (day) Value: 7
  misc_feature: MA Experiment 20000436 PARAMETER Experiment Name: At_Drought_P Parameter: Organism Value: A. thaliana
  misc_feature: MA Experiment 20000436 PARAMETER Experiment Name: At_Drought_P Parameter: Plant Line Value: WS
  misc_feature: MA Experiment 20000436 PARAMETER Experiment Name: At_Drought_P Parameter: Timepoint (hr) Value: 12
  misc_feature: MA Experiment 20000436 PARAMETER Experiment Name: At_Drought_P Parameter: Tissue Value: Whole Plant
  misc_feature: MA Experiment 20000436 PARAMETER Experiment Name: At_Drought_P Parameter: Treatment Value: Drought vs. No Drought
  misc_feature: MA Experiment ID: 20000441 Result: Up-regulated in Transcription
  misc_feature: MA Experiment 20000441 PARAMETER Experiment Name: At_1uM_BR-BRZ__P Parameter: Tissue Value: Shoot Apices
  misc_feature: MA Experiment 20000441 PARAMETER Experiment Name: At_1uM_BR-BRZ__P Parameter: Treatment Value: 1uM BR vs. No Treatment
  misc_feature: MA Experiment ID: 20000495 Result: Up-regulated in Transcription
  misc_feature: MA Experiment 20000495 PARAMETER Experiment Name: At_Guard_Cells_P Parameter: Harvest Date Value: 8/2/2002
  misc_feature: MA Experiment 20000495 PARAMETER Experiment Name: At_Guard_Cells_P Parameter: Organism Value: A. thaliana
  misc_feature: MA Experiment 20000495 PARAMETER Experiment Name: At_Guard_Cells_P Parameter: Tissue Value: Guard Cells vs. Leaves
  misc_feature: MA Experiment ID: 20001911 Result: Up-regulated in Transcription
  misc_feature: MA Experiment 20001911 PARAMETER Experiment Name: At_Drought_Reproduction_P Parameter: Age (day) Value: 40
  misc_feature: MA Experiment 20001911 PARAMETER Experiment Name: At_Drought_Reproduction_P Parameter: Organism Value: A. thaliana
  misc_feature: MA Experiment 20001911 PARAMETER Experiment Name: At_Drought_Reproduction_P Parameter: Plant Line Value: WS
  misc_feature: MA Experiment 20001911 PARAMETER Experiment Name: At_Drought_Reproduction_P Parameter: Timepoint (day) Value: 10
  misc_feature: MA Experiment 20001911 PARAMETER Experiment Name: At_Drought_Reproduction_P Parameter: Tissue Value: Flowers
  misc_feature: MA Experiment 20001911 PARAMETER Experiment Name: At_Drought_Reproduction_P Parameter: Treatment Value: Drought vs. No Drought
aaaaatagctttcttcttttggccccttacccagagatagattcttatatactactgagaatcttcaatttctgcaacttttgtatctcttcctgatggagtcttcgagtccccaccatagtcacattgttgaggttaatgttggaaaatctgatgaagagagaataattgtggcgagtaaagtctgtggagaagcaccatgtgggttttcagattctaagaatgcttccggggatgctcacgaacgctctgcttctatgcggaagctttgtatcgccgtcgtgctgtgtctagtgttcatgagtgttgaagttgttggtgggattaaagccaatagtttagctatattaaccgatgcagctcatttgctctctgacgttgctgcctttgctatctccctcttctcattgtgggctgctggctgggaagcgactcctaggcagacttacgggttcttcaggattgagattttgggtgctcttgtatctatccagctcatttggttgctcacgggtattctggtttatgaagcgattatcagaattgttacagagaccagtgaggttaatggattcctcatgtttctggttgctgcctttggtctagtggtgaacatcataatggctgttctgctagggcatgatcatggtcacagtcatggacatgggcatggccacggccatgaccatcacaatcatagccatggggtgactgttaccactcatcaccatcatcacgatcatgaacatggccatagtcatggtcatggagaggacaagcatcatgctcatggggatgttactgagcaattgttggacaaatcgaagactcaagtcgcagcaaaagagaaaagaaagagaaacatcaatctccaaggagcttatctgcatgtccttggggattccatccagagtgttggtgttatgattggaggagctatcatttggtacaatccggaatggaagatagtggatctgatctgcacacttgccttttcggttattgtcctaggaacaaccatcaacatgattcgcaacattctagaagtattgatggagagtacacccagagagattgacgccacaaagctcgaaaagggtttgctcgaaatggaagaagtggtggctgttcatgagctccacatatgggctatcacagtgggaaaagtgctattggcttgccatgtcaatatcagaccagaagcagatgcagatatggtgctcaacaaggtaattgattacatccgcagggagtacaacattagtcatgtcacgatacaaatcgagcgctaaaagctaagtaagatctgatgaagggtttttgtatcagcattctcattaacaataaaatcaataaagtttctacatttttc

SEQ ID NO: 43642 - protein, 398 aa, Arabidopsis thaliana
  peptide (1)..(398): Ceres Seq. ID no. 12336297
  misc_feature (58)..(398): Pfam Name: Cation efflux family Pfam Description: Cation efflux family
  misc_feature (1)..(398): Homolog of NCBI NO: 40287444 NR Description: heavy metal transporter MTP1 [Thlaspi
  misc_feature (1)..(398): Homolog of NCBI NO: 40287440 NR Description: heavy metal transporter MTP1 [Thlaspi montanum]
  misc_feature (1)..(398): Homolog of NCBI NO: 28315876 NR Description: putative vacuolar metal-ion transport protein
  misc_feature (1)..(398): Homolog of NCBI NO: 39919138 NR Description: zinc transporter CDF1-3 [Arabidopsis halleri
  misc_feature (216)..(398): Homolog of NCBI NO: 40287448 NR Description: heavy metal transporter MTP2 [Arabis shortii]
  misc_feature (1)..(204): Homolog of NCBI NO: 40287448 NR Description: heavy metal transporter MTP2 [Arabis shortii]
  misc_feature (1)..(398): Homolog of NCBI NO: 40287442 NR Description: heavy metal transporter MTP1 [Thlaspi arvense]
  misc_feature (1)..(398): Homolog of NCBI NO: 40287446 NR Description: heavy metal transporter MTP1 [Arabis shortii]
  misc_feature (1)..(398): Homolog of NCBI NO: 4206640 NR Description: zinc transporter ZAT [Arabidopsis thaliana]
  misc_feature (1)..(398): Homolog of NCBI NO: 15226441 NR Description: putative zinc transporter
MESSSPHHSHIVEVNVGKSDEERIIVASKVCGEAPCGFSDSKNASGDAHERSASMRKLCIAVVLCLVFMSVEVVGGIKANSLAILTDAAHLLSDVAAFAISLFSLWAAGWEATPRQTYGFFRIEILGALVSIQLIWLLTGILVYEAIIRIVTETSEVNGFLMFLVAAFGLVVNIIMAVLLGHDHGHSHGHGHGHGHDHHNHSHGVTVTTHHHHHDHEHGHSHGHGEDKHHAHGDVTEQLLDKSKTQVAAKEKRKRNINLQGAYLHVLGDSIQSVGVMIGGAIIWYNPEWKIVDLICTLAFSVIVLGTTINMIRNILEVLMESTPREIDATKLEKGLLEMEEVVAVHELHIWAITVGKVLLACHVNIRPEADADMVLNKVIDYIRREYNISHVTIQIER

SEQ ID NO: 43643 - protein, 344 aa, Arabidopsis thaliana
  peptide (1)..(344): Ceres Seq. ID no. 12336298
  misc_feature (4)..(344): Pfam Name: Cation efflux family Pfam Description: Cation efflux family
  misc_feature (1)..(344): Homolog of NCBI NO: 40287444 NR Description: heavy metal transporter MTP1 [Thlaspi
  misc_feature (1)..(344): Homolog of NCBI NO: 40287440 NR Description: heavy metal transporter MTP1 [Thlaspi montanum]
  misc_feature (1)..(344): Homolog of NCBI NO: 28315876 NR Description: putative vacuolar metal-ion transport protein
  misc_feature (1)..(344): Homolog of NCBI NO: 39919138 NR Description: zinc transporter CDF1-3 [Arabidopsis halleri
  misc_feature (162)..(344): Homolog of NCBI NO: 40287448 NR Description: heavy metal transporter MTP2 [Arabis shortii]
  misc_feature (1)..(150): Homolog of NCBI NO: 40287448 NR Description: heavy metal transporter MTP2 [Arabis shortii]
  misc_feature (1)..(344): Homolog of NCBI NO: 40287442 NR Description: heavy metal transporter MTP1 [Thlaspi arvense]
  misc_feature (1)..(344): Homolog of NCBI NO: 40287446 NR Description: heavy metal transporter MTP1 [Arabis shortii]
  misc_feature (1)..(344): Homolog of NCBI NO: 4206640 NR Description: zinc transporter ZAT [Arabidopsis thaliana]
  misc_feature (1)..(344): Homolog of NCBI NO: 15226441 NR Description: putative zinc transporter
MRKLCIAVVLCLVFMSVEVVGGIKANSLAILTDAAHLLSDVAAFAISLFSLWAAGWEATPRQTYGFFRIEILGALVSIQLIWLLTGILVYEAIIRIVTETSEVNGFLMFLVAAFGLVVNIIMAVLLGHDHGHSHGHGHGHGHDHHNHSHGVTVTTHHHHHDHEHGHSHGHGEDKHHAHGDVTEQLLDKSKTQVAAKEKRKRNINLQGAYLHVLGDSIQSVGVMIGGAIIWYNPEWKIVDLICTLAFSVIVLGTTINMIRNILEVLMESTPREIDATKLEKGLLEMEEVVAVHELHIWAITVGKVLLACHVNIRPEADADMVLNKVIDYIRREYNISHVTIQIER

SEQ ID NO: 43644 - protein, 330 aa, Arabidopsis thaliana
  peptide (1)..(330): Ceres Seq. ID no. 12336299
  misc_feature (1)..(330): Pfam Name: Cation efflux family Pfam Description: Cation efflux family
  misc_feature (1)..(330): Homolog of NCBI NO: 40287444 NR Description: heavy metal transporter MTP1 [Thlaspi
  misc_feature (1)..(330): Homolog of NCBI NO: 40287440 NR Description: heavy metal transporter MTP1 [Thlaspi montanum]
  misc_feature (1)..(330): Homolog of NCBI NO: 28315876 NR Description: putative vacuolar metal-ion transport protein
  misc_feature (1)..(330): Homolog of NCBI NO: 39919138 NR Description: zinc transporter CDF1-3 [Arabidopsis halleri
  misc_feature (148)..(330): Homolog of NCBI NO: 40287448 NR Description: heavy metal transporter MTP2 [Arabis shortii]
  misc_feature (1)..(136): Homolog of NCBI NO: 40287448 NR Description: heavy metal transporter MTP2 [Arabis shortii]
  misc_feature (1)..(330): Homolog of NCBI NO: 40287442 NR Description: heavy metal transporter MTP1 [Thlaspi arvense]
  misc_feature (1)..(330): Homolog of NCBI NO: 40287446 NR Description: heavy metal transporter MTP1 [Arabis shortii]
  misc_feature (1)..(330): Homolog of NCBI NO: 4206640 NR Description: zinc transporter ZAT [Arabidopsis thaliana]
  misc_feature (1)..(330): Homolog of NCBI NO: 15226441 NR Description: putative zinc transporter
MSVEVVGGIKANSLAILTDAAHLLSDVAAFAISLFSLWAAGWEATPRQTYGFFRIEILGALVSIQLIWLLTGILVYEAIIRIVTETSEVNGFLMFLVAAFGLVVNIIMAVLLGHDHGHSHGHGHGHGHDHHNHSHGVTVTTHHHHHDHEHGHSHGHGEDKHHAHGDVTEQLLDKSKTQVAAKEKRKRNINLQGAYLHVLGDSIQSVGVMIGGAIIWYNPEWKIVDLICTLAFSVIVLGTTINMIRNILEVLMESTPREIDATKLEKGLLEMEEVVAVHELHIWAITVGKVLLACHVNIRPEADADMVLNKVIDYIRREYNISHVTIQIER

SEQ ID NO: 43645 - DNA, 1665 bp, Arabidopsis thaliana
  misc_feature (1)..(1665): Ceres Seq. ID no. 12348569
  misc_feature: MA Experiment ID: 108433 Result: Down-regulated in Transcription
  misc_feature: MA Experiment 108433 PARAMETER Experiment Name: At_rhl_Mutant2_cDNA_P Parameter: Age (day) Value: 7
  misc_feature: MA Experiment 108433 PARAMETER Experiment Name: At_rhl_Mutant2_cDNA_P Parameter: Organism Value: A. thaliana
  misc_feature: MA Experiment 108433 PARAMETER Experiment Name: At_rhl_Mutant2_cDNA_P Parameter: Plant Line Value: rhl Mutant vs. wt landsburg
  misc_feature: MA Experiment 108433 PARAMETER Experiment Name: At_rhl_Mutant2_cDNA_P Parameter: Tissue Value: Roots
  misc_feature: MA Experiment ID: 108461 Result: Down-regulated in Transcription
  misc_feature: MA Experiment 108461 PARAMETER Experiment Name: At_Germinating_Seeds_cDNA_P Parameter: Age (day) Value: 1 vs. 0
  misc_feature: MA Experiment 108461 PARAMETER Experiment Name: At_Germinating_Seeds_cDNA_P Parameter: Tissue Value: Germinating Seeds
  misc_feature: MA Experiment ID: 108462 Result: Down-regulated in Transcription
  misc_feature: MA Experiment 108462 PARAMETER Experiment Name: At_Germinating_Seeds_cDNA_P Parameter: Age (day) Value: 2 vs. 0
  misc_feature: MA Experiment 108462 PARAMETER Experiment Name: At_Germinating_Seeds_cDNA_P Parameter: Tissue Value: Germinating Seeds
  misc_feature: MA Experiment ID: 108464 Result: Down-regulated in Transcription
  misc_feature: MA Experiment 108464 PARAMETER Experiment Name: At_Germinating_Seeds_cDNA_P Parameter: Age (day) Value: 4 vs. 0
  misc_feature: MA Experiment 108464 PARAMETER Experiment Name: At_Germinating_Seeds_cDNA_P Parameter: Tissue Value: Germinating Seeds
  misc_feature: MA Experiment ID: 108585 Result: Up-regulated in Transcription
  misc_feature: MA Experiment 108585 PARAMETER Experiment Name: At_5mM_NaNP_cDNA_P Parameter: Timepoint (hr) Value: 6
  misc_feature: MA Experiment 108585 PARAMETER Experiment Name: At_5mM_NaNP_cDNA_P Parameter: Tissue Value: Aerial
  misc_feature: MA Experiment 108585 PARAMETER Experiment Name: At_5mM_NaNP_cDNA_P Parameter: Treatment Value: null
  misc_feature: MA Experiment ID: 108668 Result: Up-regulated in Transcription
  misc_feature: MA Experiment 108668 PARAMETER Experiment Name: At_2mM_SA_cDNA_P Parameter: Plant Line Value: WS
  misc_feature: MA Experiment 108668 PARAMETER Experiment Name: At_2mM_SA_cDNA_P Parameter: Timepoint (hr) Value: 6
  misc_feature: MA Experiment 108668 PARAMETER Experiment Name: At_2mM_SA_cDNA_P Parameter: Treatment Value: 2mM SA vs. No Treatment
  misc_feature: MA Experiment ID: 20000182 Result: Up-regulated in Transcription
  misc_feature: MA Experiment 20000182 PARAMETER Experiment Name: At_2mM_SA_P Parameter: Age (day) Value: 14
  misc_feature: MA Experiment 20000182 PARAMETER Experiment Name: At_2mM_SA_P Parameter: Organism Value: A. thaliana
  misc_feature: MA Experiment 20000182 PARAMETER Experiment Name: At_2mM_SA_P Parameter: Plant Line Value: WS
  misc_feature: MA Experiment 20000182 PARAMETER Experiment Name: At_2mM_SA_P Parameter: Timepoint (hr) Value: 6
  misc_feature: MA Experiment 20000182 PARAMETER Experiment Name: At_2mM_SA_P Parameter: Tissue Value: Aerial
  misc_feature: MA Experiment 20000182 PARAMETER Experiment Name: At_2mM_SA_P Parameter: Treatment Value: 2mM SA vs. No Treatment
  misc_feature: MA Experiment ID: 20000184 Result: Down-regulated in Transcription
  misc_feature: MA Experiment 20000184 PARAMETER Experiment Name: At_Shoots__P Parameter: Age (day) Value: 7
  misc_feature: MA Experiment 20000184 PARAMETER Experiment Name: At_Shoots__P Parameter: Tissue Value: Shoots vs. Whole Plant
  misc_feature: MA Experiment ID: 20000286 Result: Up-regulated in Transcription
  misc_feature: MA Experiment 20000286 PARAMETER Experiment Name: At_Open_Flower_P Parameter: Age (day) Value: 21
  misc_feature: MA Experiment 20000286 PARAMETER Experiment Name: At_Open_Flower_P Parameter: Plant Line Value: WS
  misc_feature: MA Experiment 20000286 PARAMETER Experiment Name: At_Open_Flower_P Parameter: Tissue Value: Half Open vs. Whole Plant
  misc_feature: MA Experiment ID: 20000438 Result: Down-regulated in Transcription
  misc_feature: MA Experiment 20000438 PARAMETER Experiment Name: At_Shoots__P Parameter: Age (day) Value: 14
  misc_feature: MA Experiment 20000438 PARAMETER Experiment Name: At_Shoots__P Parameter: Tissue Value: Shoots vs. Whole Plant
  misc_feature: MA Experiment ID: 20000495 Result: Up-regulated in Transcription
  misc_feature: MA Experiment 20000495 PARAMETER Experiment Name: At_Guard_Cells_P Parameter: Harvest Date Value: 8/2/2002
  misc_feature: MA Experiment 20000495 PARAMETER Experiment Name: At_Guard_Cells_P Parameter: Organism Value: A. thaliana
  misc_feature: MA Experiment 20000495 PARAMETER Experiment Name: At_Guard_Cells_P Parameter: Tissue Value: Guard Cells vs. Leaves
aaaacagagaaaacaaaaaaatgaaaggaaagtagaaaaaagagaaaaagttttgcagaaggaagaaaaaaaaaaagaagagaaaaaatgggtcttcgtctccgtcttcgtctccctcacaaaagctctcctcgttcaccttcctatctccttctctgtgttcttgctctatccttcttctccttcaccgctcttcttttctacaaggttgacgactttatagctcagacaaaaactctggccggacataacttggaaccaacaccgtggcatatcttcccacgcaaatctttcagcgcagctacgaaacattctcaggcttaccgaatcctccagtgctcctacttctcatgtccgtacaaagccgtcgtccaaccaaagagtctccactcggaatctgggtcgggtcgtcaaacccatcaaccacaatgcccagacttcttcagccaggtggattcaccgggatttagagccgtgggcaaagactggggtgactaaagagcacgtgaagagggcaaaagcgaatgctgcgtttcgagtggtgatactatcagggaagttatacgtggatctctattacgcatgtgtgcagagcagaatgatgttcaccatttgggggattctgcaactgctcaccaagtatccagggatggttcctgatgtcgacatgatgtttgattgtatggacaaacccatcatcaaccagaccgagtaccagtcctttcctgttccgctttttcgatattgcaccaacgaagctcatttggacattccttttccggattggtcgttttggggatggtcggagacaaatctaaggccctgggaagaagagtttggggatataaagcaagggtctaggagaagaagttggtacaacaagcaacctagagcttactggaaaggcaatcccgatgttgtatcgcctatacgactggagctcatgaaatgcaaccattcaaggttatggggagcacagattatgcgccaggactgggcagaagaagcaaaaggtgggtttgagcaatccaagctttccaaccaatgcaatcaccggtacaaaatctatgcagaaggttatgcgtggtcagtttctctaaagtatatcttatcatgtggttccatgacactcataatatcacctgagtatgaagatttcttcagtagaggcctccttcccaaggaaaattactggcctatctctcccactgatctatgtcggtccatcaaatacgctgttgattggggaaattccaacccctctgaagctgaaacaattggaaaaagaggacagggttatatggaaagccttagcatgaaccgggtttatgactatatgtttcatctcatcactgagtactcgaaacttcagaagttcaagccagagaagccggcttccgctaatgaagtctgtgcaggatcattgctctgcattgcagaacaaaaagagcgggaactactcgaaagatccagagtcgtaccttctctggatcaaccatgtaaatttccagtagaagataggaataggcttgagtggttgatccaacagaagaataaaacaatcgaaaatgttagatacatggagatgacaagaacacagaggggttctaaatgaattgtctttttagggacatgaatttttggtgtatcctctctctttttttg

SEQ ID NO: 43646 - protein, 338 aa, Arabidopsis thaliana
  peptide (1)..(338): Ceres Seq. ID no. 12348570
  misc_feature (1)..(334): Pfam Name: Arabidopsis thaliana protein of unknown function Pfam Description: Arabidopsis thaliana protein of unknown
  misc_feature (1)..(131): Homolog of NCBI NO: 25404907 NR Description: protein F2K11.20 [imported] - Arabidopsis
  misc_feature (140)..(335): Homolog of NCBI NO: 25404907 NR Description: protein F2K11.20 [imported] - Arabidopsis
  misc_feature (1)..(329): Homolog of NCBI NO: 38346998 NR Description: OSJNBb0039L24.21 [Oryza sativa (japonica
  misc_feature (1)..(329): Homolog of NCBI NO: 21742339 NR Description: OSJNBb0020O11.18 [Oryza sativa (japonica
  misc_feature (1)..(329): Homolog of NCBI NO: 15233070 NR Description: putative protein; protein id: At3g61270.1
  misc_feature (1)..(329): Homolog of NCBI NO: 7486461 NR Description: hypothetical protein At2g45830 [imported] -
  misc_feature (1)..(335): Homolog of NCBI NO: 15222413 NR Description: hypothetical protein; protein id: At1g63420.1
  misc_feature (1)..(338): Homolog of NCBI NO: 15229061 NR Description: putative protein; protein id: At3g48980.1
  misc_feature (1)..(329): Homolog of NCBI NO: 15237842 NR Description: putative protein; protein id: At5g23850.1
  misc_feature (1)..(338): Homolog of NCBI NO: 15222341 NR Description: hypothetical protein; protein id: At1g07220.1
MMFTIWGILQLLTKYPGMVPDVDMMFDCMDKPIINQTEYQSFPVPLFRYCTNEAHLDIPFPDWSFWGWSETNLRPWEEEFGDIKQGSRRRSWYNKQPRAYWKGNPDVVSPIRLELMKCNHSRLWGAQIMRQDWAEEAKGGFEQSKLSNQCNHRYKIYAEGYAWSVSLKYILSCGSMTLIISPEYEDFFSRGLLPKENYWPISPTDLCRSIKYAVDWGNSNPSEAETIGKRGQGYMESLSMNRVYDYMFHLITEYSKLQKFKPEKPASANEVCAGSLLCIAEQKERELLERSRVVPSLDQPCKFPVEDRNRLEWLIQQKNKTIENVRYMEMTRTQRGSK

SEQ ID NO: 43647 - protein, 337 aa, Arabidopsis thaliana
  peptide (1)..(337): Ceres Seq. ID no. 12348571
  misc_feature (1)..(333): Pfam Name: Arabidopsis thaliana protein of unknown function Pfam Description: Arabidopsis thaliana protein of unknown
  misc_feature (1)..(130): Homolog of NCBI NO: 25404907 NR Description: protein F2K11.20 [imported] - Arabidopsis
  misc_feature (139)..(334): Homolog of NCBI NO: 25404907 NR Description: protein F2K11.20 [imported] - Arabidopsis
  misc_feature (1)..(328): Homolog of NCBI NO: 38346998 NR Description: OSJNBb0039L24.21 [Oryza sativa (japonica
  misc_feature (1)..(328): Homolog of NCBI NO: 21742339 NR Description: OSJNBb0020O11.18 [Oryza sativa (japonica
  misc_feature (1)..(328): Homolog of NCBI NO: 15233070 NR Description: putative protein; protein id: At3g61270.1
  misc_feature (1)..(328): Homolog of NCBI NO: 7486461 NR Description: hypothetical protein At2g45830 [imported] -
  misc_feature (1)..(334): Homolog of NCBI NO: 15222413 NR Description: hypothetical protein; protein id: At1g63420.1
  misc_feature (1)..(337): Homolog of NCBI NO: 15229061 NR Description: putative protein; protein id: At3g48980.1
  misc_feature (1)..(328): Homolog of NCBI NO: 15237842 NR Description: putative protein; protein id: At5g23850.1
  misc_feature (1)..(337): Homolog of NCBI NO: 15222341 NR Description: hypothetical protein; protein id: At1g07220.1
MFTIWGILQLLTKYPGMVPDVDMMFDCMDKPIINQTEYQSFPVPLFRYCTNEAHLDIPFPDWSFWGWSETNLRPWEEEFGDIKQGSRRRSWYNKQPRAYWKGNPDVVSPIRLELMKCNHSRLWGAQIMRQDWAEEAKGGFEQSKLSNQCNHRYKIYAEGYAWSVSLKYILSCGSMTLIISPEYEDFFSRGLLPKENYWPISPTDLCRSIKYAVDWGNSNPSEAETIGKRGQGYMESLSMNRVYDYMFHLITEYSKLQKFKPEKPASANEVCAGSLLCIAEQKERELLERSRVVPSLDQPCKFPVEDRNRLEWLIQQKNKTIENVRYMEMTRTQRGSK

SEQ ID NO: 43648 - protein, 321 aa, Arabidopsis thaliana
  peptide (1)..(321): Ceres Seq. ID no. 12348572
  misc_feature (1)..(317): Pfam Name: Arabidopsis thaliana protein of unknown function Pfam Description: Arabidopsis thaliana protein of unknown
  misc_feature (1)..(114): Homolog of NCBI NO: 25404907 NR Description: protein F2K11.20 [imported] - Arabidopsis
  misc_feature (123)..(318): Homolog of NCBI NO: 25404907 NR Description: protein F2K11.20 [imported] - Arabidopsis
  misc_feature (1)..(312): Homolog of NCBI NO: 38346998 NR Description: OSJNBb0039L24.21 [Oryza sativa (japonica
  misc_feature (1)..(312): Homolog of NCBI NO: 21742339 NR Description: OSJNBb0020O11.18 [Oryza sativa (japonica
  misc_feature (1)..(312): Homolog of NCBI NO: 15233070 NR Description: putative protein; protein id: At3g61270.1
  misc_feature (1)..(312): Homolog of NCBI NO: 7486461 NR Description: hypothetical protein At2g45830 [imported] -
  misc_feature (1)..(318): Homolog of NCBI NO: 15222413 NR Description: hypothetical protein; protein id: At1g63420.1
  misc_feature (1)..(321): Homolog of NCBI NO: 15229061 NR Description: putative protein; protein id: At3g48980.1
  misc_feature (1)..(312): Homolog of NCBI NO: 15237842 NR Description: putative protein; protein id: At5g23850.1
  misc_feature (1)..(321): Homolog of NCBI NO: 15222341 NR Description: hypothetical protein; protein id: At1g07220.1
MVPDVDMMFDCMDKPIINQTEYQSFPVPLFRYCTNEAHLDIPFPDWSFWGWSETNLRPWEEEFGDIKQGSRRRSWYNKQPRAYWKGNPDVVSPIRLELMKCNHSRLWGAQIMRQDWAEEAKGGFEQSKLSNQCNHRYKIYAEGYAWSVSLKYILSCGSMTLIISPEYEDFFSRGLLPKENYWPISPTDLCRSIKYAVDWGNSNPSEAETIGKRGQGYMESLSMNRVYDYMFHLITEYSKLQKFKPEKPASANEVCAGSLLCIAEQKERELLERSRVVPSLDQPCKFPVEDRNRLEWLIQQKNKTIENVRYMEMTRTQRGSK

SEQ ID NO: 43649 - DNA, 1296 bp, Arabidopsis thaliana
  misc_feature (1)..(1296): Ceres Seq. ID no. 12738812
  misc_feature: MA Experiment ID: 108433 Result: Up-regulated in Transcription
  misc_feature: MA Experiment 108433 PARAMETER Experiment Name: At_rhl_Mutant2_cDNA_P Parameter: Age (day) Value: 7
  misc_feature: MA Experiment 108433 PARAMETER Experiment Name: At_rhl_Mutant2_cDNA_P Parameter: Organism Value: A. thaliana
  misc_feature: MA Experiment 108433 PARAMETER Experiment Name: At_rhl_Mutant2_cDNA_P Parameter: Plant Line Value: rhl Mutant vs. wt landsburg
  misc_feature: MA Experiment 108433 PARAMETER Experiment Name: At_rhl_Mutant2_cDNA_P Parameter: Tissue Value: Roots
  misc_feature: MA Experiment ID: 108434 Result: Down-regulated in Transcription
  misc_feature: MA Experiment 108434 PARAMETER Experiment Name: At_Root_Tips_cDNA_P Parameter: Tissue Value: Root Tips
  misc_feature: MA Experiment ID: 108461 Result: Up-regulated in Transcription
  misc_feature: MA Experiment 108461 PARAMETER Experiment Name: At_Germinating_Seeds_cDNA_P Parameter: Age (day) Value: 1 vs. 0
  misc_feature: MA Experiment 108461 PARAMETER Experiment Name: At_Germinating_Seeds_cDNA_P Parameter: Tissue Value: Germinating Seeds
  misc_feature: MA Experiment ID: 108463 Result: Up-regulated in Transcription
  misc_feature: MA Experiment 108463 PARAMETER Experiment Name: At_Germinating_Seeds_cDNA_P Parameter: Age (day) Value: 3 vs. 0
  misc_feature: MA Experiment 108463 PARAMETER Experiment Name: At_Germinating_Seeds_cDNA_P Parameter: Tissue Value: Germinating Seeds
  misc_feature: MA Experiment ID: 108473 Result: Up-regulated in Transcription
  misc_feature: MA Experiment 108473 PARAMETER Experiment Name: At_Drought_Flowers_cDNA_P Parameter: Timepoint (hr) Value: 7 d
  misc_feature: MA Experiment 108473 PARAMETER Experiment Name: At_Drought_Flowers_cDNA_P Parameter: Tissue Value: Flower
  misc_feature: MA Experiment 108473 PARAMETER Experiment Name: At_Drought_Flowers_cDNA_P Parameter: Treatment Value: Drought vs. No Drought
  misc_feature: MA Experiment ID: 108474 Result: Up-regulated in Transcription
  misc_feature: MA Experiment 108474 PARAMETER Experiment Name: At_Drought_Flowers_cDNA_P Parameter: Timepoint (hr) Value: null
  misc_feature: MA Experiment 108474 PARAMETER Experiment Name: At_Drought_Flowers_cDNA_P Parameter: Treatment Value: Drought vs. No Drought
  misc_feature: MA Experiment ID: 108561 Result: Up-regulated in Transcription
  misc_feature: MA Experiment 108561 PARAMETER Experiment Name: At_100uM_ABA_cDNA_P Parameter: Timepoint (hr) Value: 6
  misc_feature: MA Experiment 108561 PARAMETER Experiment Name: At_100uM_ABA_cDNA_P Parameter: Tissue Value: Aerial
  misc_feature: MA Experiment 108561 PARAMETER Experiment Name: At_100uM_ABA_cDNA_P Parameter: Treatment Value: 100uM ABA vs. No Treatment
  misc_feature: MA Experiment ID: 108572 Result: Up-regulated in Transcription
  misc_feature: MA Experiment 108572 PARAMETER Experiment Name: At_Drought_cDNA_P Parameter: Timepoint (hr) Value: 1
  misc_feature: MA Experiment 108572 PARAMETER Experiment Name: At_Drought_cDNA_P Parameter: Tissue Value: Aerial
  misc_feature: MA Experiment 108572 PARAMETER Experiment Name: At_Drought_cDNA_P Parameter: Treatment Value: Drought vs. No Drought
  misc_feature: MA Experiment ID: 108573 Result: Up-regulated in Transcription
  misc_feature: MA Experiment 108573 PARAMETER Experiment Name: At_Drought_cDNA_P Parameter: Timepoint (hr) Value: 6
  misc_feature: MA Experiment 108573 PARAMETER Experiment Name: At_Drought_cDNA_P Parameter: Tissue Value: Aerial
  misc_feature: MA Experiment 108573 PARAMETER Experiment Name: At_Drought_cDNA_P Parameter: Treatment Value: Drought vs. No Drought
  misc_feature: MA Experiment ID: 108577 Result: Down-regulated in Transcription
  misc_feature: MA Experiment 108577 PARAMETER Experiment Name: At_42deg_Heat_cDNA_P Parameter: Temperature (deg C) Value: 42 vs. 22
  misc_feature: MA Experiment 108577 PARAMETER Experiment Name: At_42deg_Heat_cDNA_P Parameter: Timepoint (hr) Value: 6
  misc_feature: MA Experiment 108577 PARAMETER Experiment Name: At_42deg_Heat_cDNA_P Parameter: Tissue Value: Aerial
  misc_feature: MA Experiment ID: 108579 Result: Up-regulated in Transcription
  misc_feature: MA Experiment 108579 PARAMETER Experiment Name: At_4deg_Cold_cDNA_P Parameter: Temperature (deg C) Value: 4 vs. 22
  misc_feature: MA Experiment 108579 PARAMETER Experiment Name: At_4deg_Cold_cDNA_P Parameter: Timepoint (hr) Value: 6
  misc_feature: MA Experiment 108579 PARAMETER Experiment Name: At_4deg_Cold_cDNA_P Parameter: Tissue Value: Aerial
  misc_feature: MA Experiment ID: 108594 Result: Down-regulated in Transcription
  misc_feature: MA Experiment 108594 PARAMETER Experiment Name: At_Ler-rhl_Root_cDNA_P Parameter: Plant Line Value: null
  misc_feature: MA Experiment ID: 108595 Result: Down-regulated in Transcription
  misc_feature: MA Experiment 108595 PARAMETER Experiment Name: At_Ler-pi_Ovule_cDNA_P Parameter: Plant Line Value: null
  misc_feature: MA Experiment ID: 108605 Result: Up-regulated in Transcription
  misc_feature: MA Experiment 108605 PARAMETER Experiment Name: At_100uM_ABA_cDNA_P Parameter: Timepoint (hr) Value: 6
  misc_feature: MA Experiment 108605 PARAMETER Experiment Name: At_100uM_ABA_cDNA_P Parameter: Tissue Value: Aerial
  misc_feature: MA Experiment 108605 PARAMETER Experiment Name: At_100uM_ABA_cDNA_P Parameter: Treatment Value: 100uM ABA vs. No Treatment
  misc_feature: MA Experiment ID: 108607 Result: Up-regulated in Transcription
  misc_feature: MA Experiment 108607 PARAMETER Experiment Name: At_100uM_ABA_cDNA_P Parameter: Timepoint (hr) Value: 4
  misc_feature: MA Experiment 108607 PARAMETER Experiment Name: At_100uM_ABA_cDNA_P Parameter: Tissue Value: Aerial
  misc_feature: MA Experiment 108607 PARAMETER Experiment Name: At_100uM_ABA_cDNA_P Parameter: Treatment Value: 100uM ABA vs. No Treatment
  misc_feature: MA Experiment ID: 108608 Result: Up-regulated in Transcription
  misc_feature: MA Experiment 108608 PARAMETER Experiment Name: At_100uM_ABA_cDNA_P Parameter: Timepoint (hr) Value: 1
  misc_feature: MA Experiment 108608 PARAMETER Experiment Name: At_100uM_ABA_cDNA_P Parameter: Tissue Value: Aerial
  misc_feature: MA Experiment 108608 PARAMETER Experiment Name: At_100uM_ABA_cDNA_P Parameter: Treatment Value: 100uM ABA vs. No Treatment
  misc_feature: MA Experiment ID: 108609 Result: Up-regulated in Transcription
  misc_feature: MA Experiment 108609 PARAMETER Experiment Name: At_100uM_ABA_cDNA_P Parameter: Timepoint (hr) Value: 24
  misc_feature: MA Experiment 108609 PARAMETER Experiment Name: At_100uM_ABA_cDNA_P Parameter: Tissue Value: Aerial
  misc_feature: MA Experiment 108609 PARAMETER Experiment Name: At_100uM_ABA_cDNA_P Parameter: Treatment Value: 100uM ABA vs. No Treatment
  misc_feature: MA Experiment ID: 20000030 Result: Down-regulated in Transcription
  misc_feature: MA Experiment 20000030 PARAMETER Experiment Name: At_CS6630_Roots_cDNA_P Parameter: Plant Line Value: CS6630 vs. WS
  misc_feature: MA Experiment 20000030 PARAMETER Experiment Name: At_CS6630_Roots_cDNA_P Parameter: Tissue Value: Roots
  misc_feature: MA Experiment ID: 20000068 Result: Up-regulated in Transcription
  misc_feature: MA Experiment ID: 20000069 Result: Up-regulated in Transcription
  misc_feature: MA Experiment 20000069 PARAMETER Experiment Name: At_100uM_ABA_Mutants_cDNA_P Parameter: Plant Line Value: CS23
  misc_feature: MA Experiment 20000069 PARAMETER Experiment Name: At_100uM_ABA_Mutants_cDNA_P Parameter: Timepoint (hr) Value: 6
  misc_feature: MA Experiment 20000069 PARAMETER Experiment Name: At_100uM_ABA_Mutants_cDNA_P Parameter: Tissue Value: Aerial
  misc_feature: MA Experiment 20000069 PARAMETER Experiment Name: At_100uM_ABA_Mutants_cDNA_P Parameter: Treatment Value: 100uM ABA vs. No Treatment
  misc_feature: MA Experiment ID: 20000071 Result: Up-regulated in Transcription
  misc_feature: MA Experiment 20000071 PARAMETER Experiment Name: At_100uM_ABA_Mutants_cDNA_P Parameter: Plant Line Value: CS8104
  misc_feature: MA Experiment 20000071 PARAMETER Experiment Name: At_100uM_ABA_Mutants_cDNA_P Parameter: Timepoint (hr) Value: 6
  misc_feature: MA Experiment 20000071 PARAMETER Experiment Name: At_100uM_ABA_Mutants_cDNA_P Parameter: Tissue Value: Aerial
  misc_feature: MA Experiment 20000071 PARAMETER Experiment Name: At_100uM_ABA_Mutants_cDNA_P Parameter: Treatment Value: 100uM ABA vs. No Treatment
  misc_feature: MA Experiment ID: 20000072 Result: Up-regulated in Transcription
  misc_feature: MA Experiment 20000072 PARAMETER Experiment Name: At_100uM_ABA_Mutants_cDNA_P Parameter: Plant Line Value: CS8105
  misc_feature: MA Experiment 20000072 PARAMETER Experiment Name: At_100uM_ABA_Mutants_cDNA_P Parameter: Timepoint (hr) Value: 6
  misc_feature: MA Experiment 20000072 PARAMETER Experiment Name: At_100uM_ABA_Mutants_cDNA_P Parameter: Tissue Value: Aerial
  misc_feature: MA Experiment 20000072 PARAMETER Experiment Name: At_100uM_ABA_Mutants_cDNA_P Parameter: Treatment Value: 100uM ABA vs. No Treatment
  misc_feature: MA Experiment ID: 20000086 Result: Up-regulated in Transcription
  misc_feature: MA Experiment 20000086 PARAMETER Experiment Name: At_100uM_ABA_Mutants_cDNA_P Parameter: Plant Line Value: CS22
  misc_feature: MA Experiment 20000086 PARAMETER Experiment Name: At_100uM_ABA_Mutants_cDNA_P Parameter: Timepoint (hr) Value: 6
  misc_feature: MA Experiment 20000086 PARAMETER Experiment Name: At_100uM_ABA_Mutants_cDNA_P Parameter: Tissue Value: Aerial
  misc_feature: MA Experiment 20000086 PARAMETER Experiment Name: At_100uM_ABA_Mutants_cDNA_P Parameter: Treatment Value: 100uM ABA vs. No Treatment
  misc_feature: MA Experiment ID: 20000087 Result: Up-regulated in Transcription
  misc_feature: MA Experiment 20000087 PARAMETER Experiment Name: At_100uM_ABA_Mutants_cDNA_P Parameter: Plant Line Value: WS
  misc_feature: MA Experiment 20000087 PARAMETER Experiment Name: At_100uM_ABA_Mutants_cDNA_P Parameter: Timepoint (hr) Value: 6
  misc_feature: MA Experiment 20000087 PARAMETER Experiment Name: At_100uM_ABA_Mutants_cDNA_P Parameter: Tissue Value: Aerial
  misc_feature: MA Experiment 20000087 PARAMETER Experiment Name: At_100uM_ABA_Mutants_cDNA_P Parameter: Treatment Value: 100uM ABA vs. No Treatment
  misc_feature: MA Experiment ID: 20000089 Result: Up-regulated in Transcription
  misc_feature: MA Experiment ID: 20000111 Result: Down-regulated in Transcription
  misc_feature: MA Experiment 20000111 PARAMETER Experiment Name: At_42deg_Heat_cDNA_P Parameter: Temperature (deg C) Value: 42 vs. 22
  misc_feature: MA Experiment 20000111 PARAMETER Experiment Name: At_42deg_Heat_cDNA_P Parameter: Timepoint (hr) Value: 6
  misc_feature: MA Experiment 20000111 PARAMETER Experiment Name: At_42deg_Heat_cDNA_P Parameter: Tissue Value: Aerial
  misc_feature: MA Experiment ID: 20000117 Result: Up-regulated in Transcription
  misc_feature: MA Experiment 20000117 PARAMETER Experiment Name: At_100uM_ABA_Mutants_cDNA_P Parameter: Plant Line Value: Columbia
  misc_feature: MA Experiment 20000117 PARAMETER Experiment Name: At_100uM_ABA_Mutants_cDNA_P Parameter: Timepoint (hr) Value: 6
  misc_feature: MA Experiment 20000117 PARAMETER Experiment Name: At_100uM_ABA_Mutants_cDNA_P Parameter: Tissue Value: Aerial
  misc_feature: MA Experiment 20000117 PARAMETER Experiment Name: At_100uM_ABA_Mutants_cDNA_P Parameter: Treatment Value: 100uM ABA vs. No Treatment
  misc_feature: MA Experiment ID: 20000166 Result: Up-regulated in Transcription
  misc_feature: MA Experiment 20000166 PARAMETER Experiment Name: At_100uM_ABA_P Parameter: Age (day) Value: 14
  misc_feature: MA Experiment 20000166 PARAMETER Experiment Name: At_100uM_ABA_P Parameter: Organism Value: A. thaliana
  misc_feature: MA Experiment 20000166 PARAMETER Experiment Name: At_100uM_ABA_P Parameter: Plant Line Value: WS
  misc_feature: MA Experiment 20000166 PARAMETER Experiment Name: At_100uM_ABA_P Parameter: Timepoint (hr) Value: 1
  misc_feature: MA Experiment 20000166 PARAMETER Experiment Name: At_100uM_ABA_P Parameter: Tissue Value: Aerial
  misc_feature: MA Experiment 20000166 PARAMETER Experiment Name: At_100uM_ABA_P Parameter: Treatment Value: 100uM ABA vs. No Treatment
  misc_feature: MA Experiment ID: 20000169 Result: Up-regulated in Transcription
  misc_feature: MA Experiment 20000169 PARAMETER Experiment Name: At_100uM_ABA_P Parameter: Age (day) Value: 14
  misc_feature: MA Experiment 20000169 PARAMETER Experiment Name: At_100uM_ABA_P Parameter: Organism Value: A. thaliana
  misc_feature: MA Experiment 20000169 PARAMETER Experiment Name: At_100uM_ABA_P Parameter: Plant Line Value: WS
  misc_feature: MA Experiment 20000169 PARAMETER Experiment Name: At_100uM_ABA_P Parameter: Timepoint (hr) Value: 6
  misc_feature: MA Experiment 20000169 PARAMETER Experiment Name: At_100uM_ABA_P Parameter: Tissue Value: Aerial
  misc_feature: MA Experiment 20000169 PARAMETER Experiment Name: At_100uM_ABA_P Parameter: Treatment Value: 100uM ABA vs. No Treatment
  misc_feature: MA Experiment ID: 20000173 Result: Down-regulated in Transcription
  misc_feature: MA Experiment 20000173 PARAMETER Experiment Name: At_42deg_Heat_P Parameter: Age (day) Value: 14
  misc_feature: MA Experiment 20000173 PARAMETER Experiment Name: At_42deg_Heat_P Parameter: Organism Value: A. thaliana
  misc_feature: MA Experiment 20000173 PARAMETER Experiment Name: At_42deg_Heat_P Parameter: Plant Line Value: WS
  misc_feature: MA Experiment 20000173 PARAMETER Experiment Name: At_42deg_Heat_P Parameter: Temperature (deg C) Value: 42 vs. 22
  misc_feature: MA Experiment 20000173 PARAMETER Experiment Name: At_42deg_Heat_P Parameter: Timepoint (hr) Value: 6
  misc_feature: MA Experiment 20000173 PARAMETER Experiment Name: At_42deg_Heat_P Parameter: Tissue Value: Aerial
  misc_feature: MA Experiment ID: 20000180 Result: Up-regulated in Transcription
  misc_feature: MA Experiment 20000180 PARAMETER Experiment Name: At_Germinating_Seeds_P Parameter: Age (hr) Value: 24 vs. 0
  misc_feature: MA Experiment 20000180 PARAMETER Experiment Name: At_Germinating_Seeds_P Parameter: Tissue Value: Germinating Seeds
  misc_feature: MA Experiment ID: 20000224 Result: Up-regulated in Transcription
  misc_feature: MA Experiment ID: 20000227 Result: Down-regulated in Transcription
  misc_feature: MA Experiment 20000227 PARAMETER Experiment Name: At_Root-Tips-vs-Tops_P Parameter: Tissue Value: Root Tips vs. Root Tops
  misc_feature: MA Experiment ID: 20000235 Result: Down-regulated in Transcription
  misc_feature: MA Experiment 20000235 PARAMETER Experiment Name: At_Siliques_P Parameter: Age (day) Value: 21
  misc_feature: MA Experiment 20000235 PARAMETER Experiment Name: At_Siliques_P Parameter: Organism Value: A. thaliana
  misc_feature: MA Experiment 20000235 PARAMETER Experiment Name: At_Siliques_P Parameter: Plant Line Value: WS
  misc_feature: MA Experiment 20000235 PARAMETER Experiment Name: At_Siliques_P Parameter: Tissue Value: 5-10mm Siliques vs. Whole Plant
  misc_feature: MA Experiment ID: 20000264 Result: Down-regulated in Transcription
  misc_feature: MA Experiment 20000264 PARAMETER Experiment Name: At_Open_Flower_P Parameter: Age (day) Value: 21
  misc_feature: MA Experiment 20000264 PARAMETER Experiment Name: At_Open_Flower_P Parameter: Plant Line Value: WS
  misc_feature: MA Experiment 20000264 PARAMETER Experiment Name: At_Open_Flower_P Parameter: Tissue Value: Open Flower vs. Whole Plant
  misc_feature: MA Experiment ID: 20000265 Result: Down-regulated in Transcription
  misc_feature: MA Experiment 20000265 PARAMETER Experiment Name: At_Open_Flower_P Parameter: Age (day) Value: 21
  misc_feature: MA Experiment 20000265 PARAMETER Experiment Name: At_Open_Flower_P Parameter: Plant Line Value: WS
  misc_feature: MA Experiment 20000265 PARAMETER Experiment Name: At_Open_Flower_P Parameter: Tissue Value: Closed Flower vs. Whole Plant
  misc_feature: MA Experiment ID: 20000269 Result: Down-regulated in Transcription
  misc_feature: MA Experiment 20000269 PARAMETER Experiment Name: At_1mM_KNO3_L-vs-H_Roots_P Parameter: Age (day) Value: 7,10,12
  misc_feature: MA Experiment 20000269 PARAMETER Experiment Name: At_1mM_KNO3_L-vs-H_Roots_P Parameter: Organism Value: A. thaliana
  misc_feature: MA Experiment 20000269 PARAMETER Experiment Name: At_1mM_KNO3_L-vs-H_Roots_P Parameter: Plant Line Value: WS
  misc_feature: MA Experiment 20000269 PARAMETER Experiment Name: At_1mM_KNO3_L-vs-H_Roots_P Parameter: Timepoint (day) Value: 7,10,12
  misc_feature: MA Experiment 20000269 PARAMETER Experiment Name: At_1mM_KNO3_L-vs-H_Roots_P Parameter: Tissue Value: Roots
  misc_feature: MA Experiment 20000269 PARAMETER Experiment Name: At_1mM_KNO3_L-vs-H_Roots_P Parameter: Treatment Value: 1mM KNO3 vs. 50mM KNO3
  misc_feature: MA Experiment ID: 20000286 Result: Down-regulated in Transcription
  misc_feature: MA Experiment 20000286 PARAMETER Experiment Name: At_Open_Flower_P Parameter: Age (day) Value: 21
  misc_feature: MA Experiment 20000286 PARAMETER Experiment Name: At_Open_Flower_P Parameter: Plant Line Value: WS
  misc_feature: MA Experiment 20000286 PARAMETER Experiment Name: At_Open_Flower_P Parameter: Tissue Value: Half Open vs. Whole Plant
  misc_feature: MA Experiment ID: 20000451 Result: Up-regulated in Transcription
  misc_feature: MA Experiment 20000451 PARAMETER Experiment Name: At_CS6879_Shoots-Roots_P Parameter: Age (day) Value: 14
  misc_feature: MA Experiment 20000451 PARAMETER Experiment Name: At_CS6879_Shoots-Roots_P Parameter: Organism Value: A. thaliana
  misc_feature: MA Experiment 20000451 PARAMETER Experiment Name: At_CS6879_Shoots-Roots_P Parameter: Plant Line Value: CS6879 vs. WS
  misc_feature: MA Experiment 20000451 PARAMETER Experiment Name: At_CS6879_Shoots-Roots_P Parameter: Tissue Value: Roots
  misc_feature: MA Experiment ID: 20000452 Result: Up-regulated in Transcription
  misc_feature: MA Experiment 20000452 PARAMETER Experiment Name: At_CS6879_Shoots-Roots_P Parameter: Age (day) Value: 14
  misc_feature: MA Experiment 20000452 PARAMETER Experiment Name: At_CS6879_Shoots-Roots_P Parameter: Organism Value: A. thaliana
  misc_feature: MA Experiment 20000452 PARAMETER Experiment Name: At_CS6879_Shoots-Roots_P Parameter: Plant Line Value: CS6879 vs. WS
  misc_feature: MA Experiment 20000452 PARAMETER Experiment Name: At_CS6879_Shoots-Roots_P Parameter: Tissue Value: Shoots
  misc_feature: MA Experiment ID: 20000453 Result: Up-regulated in Transcription
  misc_feature: MA Experiment 20000453 PARAMETER Experiment Name: At_100uM_ABA_P Parameter: Age (day) Value: 15
  misc_feature: MA Experiment 20000453 PARAMETER Experiment Name: At_100uM_ABA_P Parameter: Organism Value: A. thaliana
  misc_feature: MA Experiment 20000453 PARAMETER Experiment Name: At_100uM_ABA_P Parameter: Plant Line Value: WS
  misc_feature: MA Experiment 20000453 PARAMETER Experiment Name: At_100uM_ABA_P Parameter: Timepoint (hr) Value: 24
  misc_feature: MA Experiment 20000453 PARAMETER Experiment Name: At_100uM_ABA_P Parameter: Tissue Value: Aerial
  misc_feature: MA Experiment 20000453 PARAMETER Experiment Name: At_100uM_ABA_P Parameter: Treatment Value: 100uM ABA vs. No Treatment
  misc_feature: MA Experiment ID: 20000573 Result: Down-regulated in Transcription
  misc_feature: MA Experiment 20000573 PARAMETER Experiment Name: At_100uM_ABA_Mutants__P Parameter: Organism Value: A. thaliana
  misc_feature: MA Experiment 20000573 PARAMETER Experiment Name: At_100uM_ABA_Mutants__P Parameter: Plant Line Value: CS22 vs. Ler wt
  misc_feature: MA Experiment 20000573 PARAMETER Experiment Name: At_100uM_ABA_Mutants__P Parameter: Timepoint (hr) Value: N/A
  misc_feature: MA Experiment 20000573 PARAMETER Experiment Name: At_100uM_ABA_Mutants__P Parameter: Tissue Value: Whole Plant
  misc_feature: MA Experiment 20000573 PARAMETER Experiment Name: At_100uM_ABA_Mutants__P Parameter: Treatment Value: None
  misc_feature: MA Experiment ID: 20000574 Result: Down-regulated in Transcription
  misc_feature: MA Experiment 20000574 PARAMETER Experiment Name: At_100uM_ABA_Mutants__P Parameter: Organism Value: A. thaliana
  misc_feature: MA Experiment 20000574 PARAMETER Experiment Name: At_100uM_ABA_Mutants__P Parameter: Plant Line Value: CS23 vs. Ler wt
  misc_feature: MA Experiment 20000574 PARAMETER Experiment Name: At_100uM_ABA_Mutants__P Parameter: Timepoint (hr) Value: N/A
  misc_feature: MA Experiment 20000574 PARAMETER Experiment Name: At_100uM_ABA_Mutants__P Parameter: Tissue Value: Whole Plant
  misc_feature: MA Experiment 20000574 PARAMETER Experiment Name: At_100uM_ABA_Mutants__P Parameter: Treatment Value: None
  misc_feature: MA Experiment ID: 20000575 Result: Up-regulated in Transcription
  misc_feature: MA Experiment 20000575 PARAMETER Experiment Name: At_100uM_ABA_Mutants__P Parameter: Organism Value: A. thaliana
  misc_feature: MA Experiment 20000575 PARAMETER Experiment Name: At_100uM_ABA_Mutants__P Parameter: Plant Line Value: CS22
  misc_feature: MA Experiment 20000575 PARAMETER Experiment Name: At_100uM_ABA_Mutants__P Parameter: Timepoint (hr) Value: 6
  misc_feature: MA Experiment 20000575 PARAMETER Experiment Name: At_100uM_ABA_Mutants__P Parameter: Tissue Value: Whole Plant
  misc_feature: MA Experiment 20000575 PARAMETER Experiment Name: At_100uM_ABA_Mutants__P Parameter: Treatment Value: 1uM ABA vs. No Treatment
  misc_feature: MA Experiment ID: 20001247 Result: Down-regulated in Transcription
  misc_feature: MA Experiment 20001247 PARAMETER Experiment Name: At_Far-red-induction_P Parameter: Age (day) Value: 7
  misc_feature: MA Experiment 20001247 PARAMETER Experiment Name: At_Far-red-induction_P Parameter: Light Value: Far-red vs. White
  misc_feature: MA Experiment 20001247 PARAMETER Experiment Name: At_Far-red-induction_P Parameter: Organism Value: A. thaliana
  misc_feature: MA Experiment 20001247 PARAMETER Experiment Name: At_Far-red-induction_P Parameter: Plant Line Value: Columbia
  misc_feature: MA Experiment 20001247 PARAMETER Experiment Name: At_Far-red-induction_P Parameter: Timepoint (hr) Value: 1
  misc_feature: MA Experiment 20001247 PARAMETER Experiment Name: At_Far-red-induction_P Parameter: Tissue Value: Whole Plant
  misc_feature: MA Experiment ID: 20001248 Result: Down-regulated in Transcription
  misc_feature: MA Experiment 20001248 PARAMETER Experiment Name: At_Far-red-induction_P Parameter: Age (day) Value: 7
  misc_feature: MA Experiment 20001248 PARAMETER Experiment Name: At_Far-red-induction_P Parameter: Light Value: Far-red vs. White
  misc_feature: MA Experiment 20001248 PARAMETER Experiment Name: At_Far-red-induction_P Parameter: Organism Value: A. thaliana
  misc_feature: MA Experiment 20001248 PARAMETER Experiment Name: At_Far-red-induction_P Parameter: Plant Line Value: Columbia
  misc_feature: MA Experiment 20001248 PARAMETER Experiment Name: At_Far-red-induction_P Parameter: Timepoint (hr) Value: 4
  misc_feature: MA Experiment 20001248 PARAMETER Experiment Name: At_Far-red-induction_P Parameter: Tissue Value: Whole Plant
  misc_feature: MA Experiment ID: 20001559 Result: Up-regulated in Transcription
  misc_feature: MA Experiment 20001559 PARAMETER Experiment Name: At_Drought_Soil_Dry_P Parameter: Age (day) Value: 28
  misc_feature: MA Experiment 20001559 PARAMETER Experiment Name: At_Drought_Soil_Dry_P Parameter: Organism Value: A. thaliana
  misc_feature: MA Experiment 20001559 PARAMETER Experiment Name: At_Drought_Soil_Dry_P Parameter: Plant Line Value: WS
  misc_feature: MA Experiment 20001559 PARAMETER Experiment Name: At_Drought_Soil_Dry_P Parameter: Post Timepoint (hr) Value: 29
  misc_feature: MA Experiment 20001559 PARAMETER Experiment Name: At_Drought_Soil_Dry_P Parameter: Post-Treatment Value: Re-Water vs. No Drought
  misc_feature: MA Experiment 20001559 PARAMETER Experiment Name: At_Drought_Soil_Dry_P Parameter: Timepoint (day) Value: 14
  misc_feature: MA Experiment 20001559 PARAMETER Experiment Name: At_Drought_Soil_Dry_P Parameter: Treatment Value: Drought vs. No Drought
  misc_feature: MA Experiment ID: 20001904 Result: Up-regulated in Transcription
  misc_feature: MA Experiment 20001904 PARAMETER Experiment Name: At_Drought_Reproduction_P Parameter: Age (day) Value: 37
  misc_feature: MA Experiment 20001904 PARAMETER Experiment Name: At_Drought_Reproduction_P Parameter: Organism Value: A. thaliana
  misc_feature: MA Experiment 20001904 PARAMETER Experiment Name: At_Drought_Reproduction_P Parameter: Plant Line Value: WS
  misc_feature: MA Experiment 20001904 PARAMETER Experiment Name: At_Drought_Reproduction_P Parameter: Timepoint (day) Value: 7
  misc_feature: MA Experiment 20001904 PARAMETER Experiment Name: At_Drought_Reproduction_P Parameter: Tissue Value: Rosettes
  misc_feature: MA Experiment 20001904 PARAMETER Experiment Name: At_Drought_Reproduction_P Parameter: Treatment Value: Drought vs. No Drought
  misc_feature: MA Experiment ID: 20001905 Result: Up-regulated in Transcription
  misc_feature: MA Experiment 20001905 PARAMETER Experiment Name: At_Drought_Reproduction_P Parameter: Age (day) Value: 40
  misc_feature: MA Experiment 20001905 PARAMETER Experiment Name: At_Drought_Reproduction_P Parameter: Organism Value: A. thaliana
  misc_feature: MA Experiment 20001905 PARAMETER Experiment Name: At_Drought_Reproduction_P Parameter: Plant Line Value: WS
  misc_feature: MA Experiment 20001905 PARAMETER Experiment Name: At_Drought_Reproduction_P Parameter: Timepoint (day) Value: 10
  misc_feature: MA Experiment 20001905 PARAMETER Experiment Name: At_Drought_Reproduction_P Parameter: Tissue Value: Rosettes
  misc_feature: MA Experiment 20001905 PARAMETER Experiment Name: At_Drought_Reproduction_P Parameter: Treatment Value: Drought vs. No Drought
  misc_feature: MA Experiment ID: 20001911 Result: Up-regulated in Transcription
  misc_feature: MA Experiment 20001911 PARAMETER Experiment Name: At_Drought_Reproduction_P Parameter: Age (day) Value: 40
  misc_feature: MA Experiment 20001911 PARAMETER Experiment Name: At_Drought_Reproduction_P Parameter: Organism Value: A. thaliana
  misc_feature: MA Experiment 20001911 PARAMETER Experiment Name: At_Drought_Reproduction_P Parameter: Plant Line Value: WS
  misc_feature: MA Experiment 20001911 PARAMETER Experiment Name: At_Drought_Reproduction_P Parameter: Timepoint (day) Value: 10
  misc_feature: MA Experiment 20001911 PARAMETER Experiment Name: At_Drought_Reproduction_P Parameter: Tissue Value: Flowers
  misc_feature: MA Experiment 20001911 PARAMETER Experiment Name: At_Drought_Reproduction_P Parameter: Treatment Value: Drought vs. No Drought
gtctatcttttataccaaaaaatataaaataaaaaacactatggcggaaaactacgaccgtgccagtgagttaaaagcattcgacgagatgaagattggcgtgaaaggactcgtcgacgccggagtcacaaatgtcccgcgcattttccataacccgcatgttaacgtagaaaaccctaagcctacatcgacggtggtgatgattccaacaatcgatctaggtggcgtgttcgaatccacggtcgtgcgagagagtgtagttgcgaaggttaaagacgcaatggagaagtttggatttttccaggcgattaaccatggggttccacttgatgtgatggagaagatgataaatggtattcgtcggtttcacgaccaagatccagaagtgaggaaaatgttctatacccgagacaaaaccaaaaagcttaaatatcactctaatgctgatctctatgagtctcctgctgcgagttggagagataccttaagttgtgtcatggctcctgatgttccaaaagcacaggaattacctgaggtttgtggggagatcatgttggagtactcaaaggaagtgatgaagttagcggagttaatgtttgaaattttatcagaagctttagggttgagtcctaaccacctcaaagaaatggattgcgcaaaaggtttatggatgctctgtcattgttttccaccctgtcctgagccaaaccgaacattcggcggcgctcagcacacagacagatctttccttactattcttcttaacgacaacaatggaggacttcaagttctctacgatggatactggatcgatgttcctcctaatcccgaagcacttatctttaacgtaggagatttcctccagcttatctcgaatgacaagtttgtaagcatggagcatagaattttggcaaatggaggtgaagagccgcgcatttcggtcgcttgtttctttgtgcatacttttacttcaccaagttcgagagtatatggacccattaaagagcttctgtctgagctaaaccctccaaaatacagagacaccacctcggaatcctccaatcactatgtggctagaaaacctaatgggaattcttcgttggaccatttaaggatctgaaacttgaacctatatctcagaggttttcttaagtttccaataaaatttggtgcacgctgtgacgtaccatgttcaagaccttgaacgtatcattcaataattcttccgttgtgagtttcggttgcatgtttgacccaaaccagagagagtatggatcaatcaaggagagtgaacct

SEQ ID NO: 43650 - protein, 372 aa, Arabidopsis thaliana
  peptide (1)..(372): Ceres Seq. ID no. 12738813
  misc_feature (220)..(320): Pfam Name: 2OG-Fe(II) oxygenase superfamily Pfam Description: 2OG-Fe(II) oxygenase superfamily
  misc_feature (1)..(296): Homolog of NCBI NO: 25406927 NR Description: protein F12K11.6 [imported] - Arabidopsis
  misc_feature (287)..(372): Homolog of NCBI NO: 25406927 NR Description: protein F12K11.6 [imported] - Arabidopsis
  misc_feature (18)..(302): Homolog of NCBI NO: 25406927 NR Description: protein F12K11.6 [imported] - Arabidopsis
  misc_feature (18)..(372): Homolog of NCBI NO: 15221545 NR Description: oxidoreductase, putative
  misc_feature (18)..(372): Homolog of NCBI NO: 13878119 NR Description: putative oxidoreductase [Arabidopsis thaliana]
  misc_feature (14)..(366): Homolog of NCBI NO: 15221544 NR Description: oxidoreductase, putative
  misc_feature (19)..(372): Homolog of NCBI NO: 30679748 NR Description: 2-oxoglutarate-dependent dioxygenase, putative
  misc_feature (14)..(372): Homolog of NCBI NO: 15224576 NR Description: putative dioxygenase; protein id: At2g30840.1
  misc_feature (14)..(372): Homolog of NCBI NO: 15224575 NR Description: putative dioxygenase; protein id: At2g30830.1
  misc_feature (14)..(372): Homolog of NCBI NO: 15224730 NR Description: putative dioxygenase
SIFYTKKYKIKNTMAENYDRASELKAFDEMKIGVKGLVDAGVTNVPRIFHNPHVNVENPKPTSTVVMIPTIDLGGVFESTVVRESVVAKVKDAMEKFGFFQAINHGVPLDVMEKMINGIRRFHDQDPEVRKMFYTRDKTKKLKYHSNADLYESPAASWRDTLSCVMAPDVPKAQELPEVCGEIMLEYSKEVMKLAELMFEILSEALGLSPNHLKEMDCAKGLWMLCHCFPPCPEPNRTFGGAQHTDRSFLTILLNDNNGGLQVLYDGYWIDVPPNPEALIFNVGDFLQLISNDKFVSMEHRILANGGEEPRISVACFFVHTFTSPSSRVYGPIKELLSELNPPKYRDTTSESSNHYVARKPNGNSSLDHLRI

SEQ ID NO: 43651 - protein, 359 aa, Arabidopsis thaliana
  peptide (1)..(359): Ceres Seq. ID no. 12738814
  misc_feature (207)..(307): Pfam Name: 2OG-Fe(II) oxygenase superfamily Pfam Description: 2OG-Fe(II) oxygenase superfamily
  misc_feature (1)..(283): Homolog of NCBI NO: 25406927 NR Description: protein F12K11.6 [imported] - Arabidopsis
  misc_feature (274)..(359): Homolog of NCBI NO: 25406927 NR Description: protein F12K11.6 [imported] - Arabidopsis
  misc_feature (5)..(289): Homolog of NCBI NO: 25406927 NR Description: protein F12K11.6 [imported] - Arabidopsis
  misc_feature (5)..(359): Homolog of NCBI NO: 15221545 NR Description: oxidoreductase, putative
  misc_feature (5)..(359): Homolog of NCBI NO: 13878119 NR Description: putative oxidoreductase [Arabidopsis thaliana]
  misc_feature (1)..(353): Homolog of NCBI NO: 15221544 NR Description: oxidoreductase, putative
  misc_feature (6)..(359): Homolog of NCBI NO: 30679748 NR Description: 2-oxoglutarate-dependent dioxygenase, putative
  misc_feature (1)..(359): Homolog of NCBI NO: 15224576 NR Description: putative dioxygenase; protein id: At2g30840.1
  misc_feature (1)..(359): Homolog of NCBI NO: 15224575 NR Description: putative dioxygenase; protein id: At2g30830.1
  misc_feature (1)..(359): Homolog of NCBI NO: 15224730 NR Description: putative dioxygenase
MAENYDRASELKAFDEMKIGVKGLVDAGVTNVPRIFHNPHVNVENPKPTSTVVMIPTIDLGGVFESTVVRESVVAKVKDAMEKFGFFQAINHGVPLDVMEKMINGIRRFHDQDPEVRKMFYTRDKTKKLKYHSNADLYESPAASWRDTLSCVMAPDVPKAQELPEVCGEIMLEYSKEVMKLAELMFEILSEALGLSPNHLKEMDCAKGLWMLCHCFPPCPEPNRTFGGAQHTDRSFLTILLNDNNGGLQVLYDGYWIDVPPNPEALIFNVGDFLQLISNDKFVSMEHRILANGGEEPRISVACFFVHTFTSPSSRVYGPIKELLSELNPPKYRDTTSESSNHYVARKPNGNSSLDHLRI

SEQ ID NO: 43652 - protein, 343 aa, Arabidopsis thaliana
  peptide (1)..(343): Ceres Seq. ID no. 12738815
  misc_feature (191)..(291): Pfam Name: 2OG-Fe(II) oxygenase superfamily Pfam Description: 2OG-Fe(II) oxygenase superfamily
  misc_feature (1)..(267): Homolog of NCBI NO: 25406927 NR Description: protein F12K11.6 [imported] - Arabidopsis
  misc_feature (258)..(343): Homolog of NCBI NO: 25406927 NR Description: protein F12K11.6 [imported] - Arabidopsis
  misc_feature (1)..(273): Homolog of NCBI NO: 25406927 NR Description: protein F12K11.6 [imported] - Arabidopsis
  misc_feature (1)..(343): Homolog of NCBI NO: 15221545 NR Description: oxidoreductase, putative
  misc_feature (1)..(343): Homolog of NCBI NO: 13878119 NR Description: putative oxidoreductase [Arabidopsis thaliana]
  misc_feature (1)..(337): Homolog of NCBI NO: 15221544 NR Description: oxidoreductase, putative
  misc_feature (1)..(343): Homolog of NCBI NO: 30679748 NR Description: 2-oxoglutarate-dependent dioxygenase, putative
  misc_feature (1)..(343): Homolog of NCBI NO: 15224576 NR Description: putative dioxygenase; protein id: At2g30840.1
  misc_feature (1)..(343): Homolog of NCBI NO: 15224575 NR Description: putative dioxygenase; protein id: At2g30830.1
  misc_feature (1)..(343): Homolog of NCBI NO: 15224730 NR Description: putative dioxygenase
MKIGVKGLVDAGVTNVPRIFHNPHVNVENPKPTSTVVMIPTIDLGGVFESTVVRESVVAKVKDAMEKFGFFQAINHGVPLDVMEKMINGIRRFHDQDPEVRKMFYTRDKTKKLKYHSNADLYESPAASWRDTLSCVMAPDVPKAQELPEVCGEIMLEYSKEVMKLAELMFEILSEALGLSPNHLKEMDCAKGLWMLCHCFPPCPEPNRTFGGAQHTDRSFLTILLNDNNGGLQVLYDGYWIDVPPNPEALIFNVGDFLQLISNDKFVSMEHRILANGGEEPRISVACFFVHTFTSPSSRVYGPIKELLSELNPPKYRDTTSESSNHYVARKPNGNSSLDHLRI

SEQ ID NO: 43653 - DNA, 1885 bp, Arabidopsis thaliana; identical to SEQ ID NO: 41792
  misc_feature (1)..(1885): Ceres Seq. ID no. 13497214
  misc_feature: MA Experiment ID: 108434 Result: Down-regulated in Transcription
  misc_feature: MA Experiment 108434 PARAMETER Experiment Name: At_Root_Tips_cDNA_P Parameter: Tissue Value: Root Tips
  misc_feature: MA Experiment ID: 108463 Result: Up-regulated in Transcription
  misc_feature: MA Experiment 108463 PARAMETER Experiment Name: At_Germinating_Seeds_cDNA_P Parameter: Age (day) Value: 3 vs. 0
  misc_feature: MA Experiment 108463 PARAMETER Experiment Name: At_Germinating_Seeds_cDNA_P Parameter: Tissue Value: Germinating Seeds
  misc_feature: MA Experiment ID: 108464 Result: Up-regulated in Transcription
  misc_feature: MA Experiment 108464 PARAMETER Experiment Name: At_Germinating_Seeds_cDNA_P Parameter: Age (day) Value: 4 vs. 0
  misc_feature: MA Experiment 108464 PARAMETER Experiment Name: At_Germinating_Seeds_cDNA_P Parameter: Tissue Value: Germinating Seeds
  misc_feature: MA Experiment ID: 108489 Result: Up-regulated in Transcription
  misc_feature: MA Experiment ID: 108573 Result: Up-regulated in Transcription
  misc_feature: MA Experiment 108573 PARAMETER Experiment Name: At_Drought_cDNA_P Parameter: Timepoint (hr) Value: 6
  misc_feature: MA Experiment 108573 PARAMETER Experiment Name: At_Drought_cDNA_P Parameter: Tissue Value: Aerial
  misc_feature: MA Experiment 108573 PARAMETER Experiment Name: At_Drought_cDNA_P Parameter: Treatment Value: Drought vs. No Drought
  misc_feature: MA Experiment ID: 108576 Result: Down-regulated in Transcription
  misc_feature: MA Experiment 108576 PARAMETER Experiment Name: At_42deg_Heat_cDNA_P Parameter: Temperature (deg C) Value: 42 vs. 22
  misc_feature: MA Experiment 108576 PARAMETER Experiment Name: At_42deg_Heat_cDNA_P Parameter: Timepoint (hr) Value: 1
  misc_feature: MA Experiment 108576 PARAMETER Experiment Name: At_42deg_Heat_cDNA_P Parameter: Tissue Value: Aerial
  misc_feature: MA Experiment ID: 108595 Result: Down-regulated in Transcription
  misc_feature: MA Experiment 108595 PARAMETER Experiment Name: At_Ler-pi_Ovule_cDNA_P Parameter: Plant Line Value: null
  misc_feature: MA Experiment ID: 108608 Result: Down-regulated in Transcription
  misc_feature: MA Experiment 108608 PARAMETER Experiment Name: At_100uM_ABA_cDNA_P Parameter: Timepoint (hr) Value: 1
  misc_feature: MA Experiment 108608 PARAMETER Experiment Name: At_100uM_ABA_cDNA_P Parameter: Tissue Value: Aerial
  misc_feature: MA Experiment 108608 PARAMETER Experiment Name: At_100uM_ABA_cDNA_P Parameter: Treatment Value: 100uM ABA vs. No Treatment
  misc_feature: MA Experiment ID: 20000069 Result: Down-regulated in Transcription
  misc_feature: MA Experiment 20000069 PARAMETER Experiment Name: At_100uM_ABA_Mutants_cDNA_P Parameter: Plant Line Value: CS23
  misc_feature: MA Experiment 20000069 PARAMETER Experiment Name: At_100uM_ABA_Mutants_cDNA_P Parameter: Timepoint (hr) Value: 6
  misc_feature: MA Experiment 20000069 PARAMETER Experiment Name: At_100uM_ABA_Mutants_cDNA_P Parameter: Tissue Value: Aerial
  misc_feature: MA Experiment 20000069 PARAMETER Experiment Name: At_100uM_ABA_Mutants_cDNA_P Parameter: Treatment Value: 100uM ABA vs. No Treatment
  misc_feature: MA Experiment ID: 20000070 Result: Down-regulated in Transcription
  misc_feature: MA Experiment 20000070 PARAMETER Experiment Name: At_100uM_ABA_Mutants_cDNA_P Parameter: Plant Line Value: CS24
  misc_feature: MA Experiment 20000070 PARAMETER Experiment Name: At_100uM_ABA_Mutants_cDNA_P Parameter: Timepoint (hr) Value: 6
  misc_feature: MA Experiment 20000070 PARAMETER Experiment Name: At_100uM_ABA_Mutants_cDNA_P Parameter: Tissue Value: Aerial
  misc_feature: MA Experiment 20000070 PARAMETER Experiment Name: At_100uM_ABA_Mutants_cDNA_P Parameter: Treatment Value: 100uM ABA vs. No Treatment
  misc_feature: MA Experiment ID: 20000071 Result: Down-regulated in Transcription
  misc_feature: MA Experiment 20000071 PARAMETER Experiment Name: At_100uM_ABA_Mutants_cDNA_P Parameter: Plant Line Value: CS8104
  misc_feature: MA Experiment 20000071 PARAMETER Experiment Name: At_100uM_ABA_Mutants_cDNA_P Parameter: Timepoint (hr) Value: 6
  misc_feature: MA Experiment 20000071 PARAMETER Experiment Name: At_100uM_ABA_Mutants_cDNA_P Parameter: Tissue Value: Aerial
  misc_feature: MA Experiment 20000071 PARAMETER Experiment Name: At_100uM_ABA_Mutants_cDNA_P Parameter: Treatment Value: 100uM ABA vs. No Treatment
  misc_feature: MA Experiment ID: 20000072 Result: Down-regulated in Transcription
  misc_feature: MA Experiment 20000072 PARAMETER Experiment Name: At_100uM_ABA_Mutants_cDNA_P Parameter: Plant Line Value: CS8105
  misc_feature: MA Experiment 20000072 PARAMETER Experiment Name: At_100uM_ABA_Mutants_cDNA_P Parameter: Timepoint (hr) Value: 6
  misc_feature: MA Experiment 20000072 PARAMETER Experiment Name: At_100uM_ABA_Mutants_cDNA_P Parameter: Tissue Value: Aerial
  misc_feature: MA Experiment 20000072 PARAMETER Experiment Name: At_100uM_ABA_Mutants_cDNA_P Parameter: Treatment Value: 100uM ABA vs. No Treatment
  misc_feature: MA Experiment ID: 20000086 Result: Down-regulated in Transcription
  misc_feature: MA Experiment 20000086 PARAMETER Experiment Name: At_100uM_ABA_Mutants_cDNA_P Parameter: Plant Line Value: CS22
  misc_feature: MA Experiment 20000086 PARAMETER Experiment Name: At_100uM_ABA_Mutants_cDNA_P Parameter: Timepoint (hr) Value: 6
  misc_feature: MA Experiment 20000086 PARAMETER Experiment Name: At_100uM_ABA_Mutants_cDNA_P Parameter: Tissue Value: Aerial
  misc_feature: MA Experiment 20000086 PARAMETER Experiment Name: At_100uM_ABA_Mutants_cDNA_P Parameter: Treatment Value: 100uM ABA vs. No Treatment
  misc_feature: MA Experiment ID: 20000087 Result: Down-regulated in Transcription
  misc_feature: MA Experiment 20000087 PARAMETER Experiment Name: At_100uM_ABA_Mutants_cDNA_P Parameter: Plant Line Value: WS
  misc_feature: MA Experiment 20000087 PARAMETER Experiment Name: At_100uM_ABA_Mutants_cDNA_P Parameter: Timepoint (hr) Value: 6
  misc_feature: MA Experiment 20000087 PARAMETER Experiment Name: At_100uM_ABA_Mutants_cDNA_P Parameter: Tissue Value: Aerial
  misc_feature: MA Experiment 20000087 PARAMETER Experiment Name: At_100uM_ABA_Mutants_cDNA_P Parameter: Treatment Value: 100uM ABA vs. No Treatment
  misc_feature: MA Experiment ID: 20000088 Result: Down-regulated in Transcription
  misc_feature: MA Experiment 20000088 PARAMETER Experiment Name: At_100uM_ABA_Mutants_cDNA_P Parameter: Plant Line Value: Landsberg
  misc_feature: MA Experiment 20000088 PARAMETER Experiment Name: At_100uM_ABA_Mutants_cDNA_P Parameter: Timepoint (hr) Value: 6
  misc_feature: MA Experiment 20000088 PARAMETER Experiment Name: At_100uM_ABA_Mutants_cDNA_P Parameter: Tissue Value: Aerial
  misc_feature: MA Experiment 20000088 PARAMETER Experiment Name: At_100uM_ABA_Mutants_cDNA_P Parameter: Treatment Value: 100uM ABA vs. No Treatment
  misc_feature: MA Experiment ID: 20000089 Result: Down-regulated in Transcription
  misc_feature: MA Experiment ID: 20000090 Result: Down-regulated in Transcription
  misc_feature: MA Experiment ID: 20000117 Result: Down-regulated in Transcription
  misc_feature: MA Experiment 20000117 PARAMETER Experiment Name: At_100uM_ABA_Mutants_cDNA_P Parameter: Plant Line Value: Columbia
  misc_feature: MA Experiment 20000117 PARAMETER Experiment Name: At_100uM_ABA_Mutants_cDNA_P Parameter: Timepoint (hr) Value: 6
  misc_feature: MA Experiment 20000117 PARAMETER Experiment Name: At_100uM_ABA_Mutants_cDNA_P Parameter: Tissue Value: Aerial
  misc_feature: MA Experiment 20000117 PARAMETER Experiment Name: At_100uM_ABA_Mutants_cDNA_P Parameter: Treatment Value: 100uM ABA vs. No Treatment
  misc_feature: MA Experiment ID: 20000166 Result: Down-regulated in Transcription
  misc_feature: MA Experiment 20000166 PARAMETER Experiment Name: At_100uM_ABA_P Parameter: Age (day) Value: 14
  misc_feature: MA Experiment 20000166 PARAMETER Experiment Name: At_100uM_ABA_P Parameter: Organism Value: A. thaliana
  misc_feature: MA Experiment 20000166 PARAMETER Experiment Name: At_100uM_ABA_P Parameter: Plant Line Value: WS
  misc_feature: MA Experiment 20000166 PARAMETER Experiment Name: At_100uM_ABA_P Parameter: Timepoint (hr) Value: 1
  misc_feature: MA Experiment 20000166 PARAMETER Experiment Name: At_100uM_ABA_P Parameter: Tissue Value: Aerial
  misc_feature: MA Experiment 20000166 PARAMETER Experiment Name: At_100uM_ABA_P Parameter: Treatment Value: 100uM ABA vs. No Treatment
  misc_feature: MA Experiment ID: 20000224 Result: Up-regulated in Transcription
  misc_feature: MA Experiment ID: 20000234 Result: Down-regulated in Transcription
  misc_feature: MA Experiment 20000234 PARAMETER Experiment Name: At_Siliques_P Parameter: Age (day) Value: 21
  misc_feature: MA Experiment 20000234 PARAMETER Experiment Name: At_Siliques_P Parameter: Organism Value: A. thaliana
  misc_feature: MA Experiment 20000234 PARAMETER Experiment Name: At_Siliques_P Parameter: Plant Line Value: WS
  misc_feature: MA Experiment 20000234 PARAMETER Experiment Name: At_Siliques_P Parameter: Tissue Value: Less Than 5mm Siliques vs. Whole Plant
  misc_feature: MA Experiment ID: 20000235 Result: Down-regulated in Transcription
  misc_feature: MA Experiment 20000235 PARAMETER Experiment Name: At_Siliques_P Parameter: Age (day) Value: 21
  misc_feature: MA Experiment 20000235 PARAMETER Experiment Name: At_Siliques_P Parameter: Organism Value: A. thaliana
  misc_feature: MA Experiment 20000235 PARAMETER Experiment Name: At_Siliques_P Parameter: Plant Line Value: WS
  misc_feature: MA Experiment 20000235 PARAMETER Experiment Name: At_Siliques_P Parameter: Tissue Value: 5-10mm Siliques vs. Whole Plant
  misc_feature: MA Experiment ID: 20000264 Result: Down-regulated in Transcription
  misc_feature: MA Experiment 20000264 PARAMETER Experiment Name: At_Open_Flower_P Parameter: Age (day) Value: 21
  misc_feature: MA Experiment 20000264 PARAMETER Experiment Name: At_Open_Flower_P Parameter: Plant Line Value: WS
  misc_feature: MA Experiment 20000264 PARAMETER Experiment Name: At_Open_Flower_P Parameter: Tissue Value: Open Flower vs. Whole Plant
  misc_feature: MA Experiment ID: 20000265 Result: Down-regulated in Transcription
  misc_feature: MA Experiment 20000265 PARAMETER Experiment Name: At_Open_Flower_P Parameter: Age (day) Value: 21
  misc_feature: MA Experiment 20000265 PARAMETER Experiment Name: At_Open_Flower_P Parameter: Plant Line Value: WS
  misc_feature: MA Experiment 20000265 PARAMETER Experiment Name: At_Open_Flower_P Parameter: Tissue Value: Closed Flower vs. Whole Plant
  misc_feature: MA Experiment ID: 20000286 Result: Down-regulated in Transcription
  misc_feature: MA Experiment 20000286 PARAMETER Experiment Name: At_Open_Flower_P Parameter: Age (day) Value: 21
  misc_feature: MA Experiment 20000286 PARAMETER Experiment Name: At_Open_Flower_P Parameter: Plant Line Value: WS
  misc_feature: MA Experiment 20000286 PARAMETER Experiment Name: At_Open_Flower_P Parameter: Tissue Value: Half Open vs. Whole Plant
  misc_feature: MA Experiment ID: 20000308 Result: Down-regulated in Transcription
  misc_feature: MA Experiment 20000308 PARAMETER Experiment Name: At_100mM_NaCl__P Parameter: Age (day) Value: 17
  misc_feature: MA Experiment 20000308 PARAMETER Experiment Name: At_100mM_NaCl__P Parameter: Organism Value: A. thaliana
  misc_feature: MA Experiment 20000308 PARAMETER Experiment Name: At_100mM_NaCl__P Parameter: Plant Line Value: WS
  misc_feature: MA Experiment 20000308 PARAMETER Experiment Name: At_100mM_NaCl__P Parameter: Timepoint (hr) Value: 72
  misc_feature: MA Experiment 20000308 PARAMETER Experiment Name: At_100mM_NaCl__P Parameter: Tissue Value: Whole Plant
  misc_feature: MA Experiment 20000308 PARAMETER Experiment Name: At_100mM_NaCl__P Parameter: Treatment Value: 100mM NaCl vs. No Treatment
  misc_feature: MA Experiment ID: 20000451 Result: Down-regulated in Transcription
  misc_feature: MA Experiment 20000451 PARAMETER Experiment Name: At_CS6879_Shoots-Roots_P Parameter: Age (day) Value: 14
  misc_feature: MA Experiment 20000451 PARAMETER Experiment Name: At_CS6879_Shoots-Roots_P Parameter: Organism Value: A. thaliana
  misc_feature: MA Experiment 20000451 PARAMETER Experiment Name: At_CS6879_Shoots-Roots_P Parameter: Plant Line Value: CS6879 vs. WS
  misc_feature: MA Experiment 20000451 PARAMETER Experiment Name: At_CS6879_Shoots-Roots_P Parameter: Tissue Value: Roots
  misc_feature: MA Experiment ID: 20000495 Result: Down-regulated in Transcription
  misc_feature: MA Experiment 20000495 PARAMETER Experiment Name: At_Guard_Cells_P Parameter: Harvest Date Value: 8/2/2002
  misc_feature: MA Experiment 20000495 PARAMETER Experiment Name: At_Guard_Cells_P Parameter: Organism Value: A. thaliana
  misc_feature: MA Experiment 20000495 PARAMETER Experiment Name: At_Guard_Cells_P Parameter: Tissue Value: Guard Cells vs. Leaves
  misc_feature: MA Experiment ID: 20000496 Result: Down-regulated in Transcription
  misc_feature: MA Experiment 20000496 PARAMETER Experiment Name: At_Guard_Cells_P Parameter: Harvest Date Value: 7/19/2002
  misc_feature: MA Experiment 20000496 PARAMETER Experiment Name: At_Guard_Cells_P Parameter: Organism Value: Canola
  misc_feature: MA Experiment 20000496 PARAMETER Experiment Name: At_Guard_Cells_P Parameter: Tissue Value: Guard Cells vs. Leaves
  misc_feature: MA Experiment ID: 20000527 Result: Up-regulated in Transcription
  misc_feature: MA Experiment 20000527 PARAMETER Experiment Name: At_10percent_PEG_P Parameter: Age (day) Value: 20
  misc_feature: MA Experiment 20000527 PARAMETER Experiment Name: At_10percent_PEG_P Parameter: Organism Value: A. thaliana
  misc_feature: MA Experiment 20000527 PARAMETER Experiment Name: At_10percent_PEG_P Parameter: Plant Line Value: WS
  misc_feature: MA Experiment 20000527 PARAMETER Experiment Name: At_10percent_PEG_P Parameter: Timepoint (day) Value: 20
  misc_feature: MA Experiment 20000527 PARAMETER Experiment Name: At_10percent_PEG_P Parameter: Tissue Value: Whole Plant
  misc_feature: MA Experiment 20000527 PARAMETER Experiment Name: At_10percent_PEG_P Parameter: Treatment Value: 10percent PEG vs. No Treatment
  misc_feature: MA Experiment ID: 20001450 Result: Up-regulated in Transcription
  misc_feature: MA Experiment 20001450 PARAMETER Experiment Name: At_Far-red-induction_P Parameter: Age (day) Value: 7
  misc_feature: MA Experiment 20001450 PARAMETER Experiment Name: At_Far-red-induction_P Parameter: Light Value: Far-red vs. White
  misc_feature: MA Experiment 20001450 PARAMETER Experiment Name: At_Far-red-induction_P Parameter: Organism Value: A. thaliana
  misc_feature: MA Experiment 20001450 PARAMETER Experiment Name: At_Far-red-induction_P Parameter: Plant Line Value: Columbia
  misc_feature: MA Experiment 20001450 PARAMETER Experiment Name: At_Far-red-induction_P Parameter: Timepoint (hr) Value: 8
  misc_feature: MA Experiment 20001450 PARAMETER Experiment Name: At_Far-red-induction_P Parameter: Tissue Value: Whole Plant
  misc_feature: MA Experiment ID: 20001451 Result: Up-regulated in Transcription
  misc_feature: MA Experiment 20001451 PARAMETER Experiment Name: At_Far-red-induction_P Parameter: Age (day) Value: 7
  misc_feature: MA Experiment 20001451 PARAMETER Experiment Name: At_Far-red-induction_P Parameter: Light Value: Far-red vs. White
  misc_feature: MA Experiment 20001451 PARAMETER Experiment Name: At_Far-red-induction_P Parameter: Organism Value: A. thaliana
  misc_feature: MA Experiment 20001451 PARAMETER Experiment Name: At_Far-red-induction_P Parameter: Plant Line Value: Columbia
  misc_feature: MA Experiment 20001451 PARAMETER Experiment Name: At_Far-red-induction_P Parameter: Timepoint (hr) Value: 24
  misc_feature: MA Experiment 20001451 PARAMETER Experiment Name: At_Far-red-induction_P Parameter: Tissue Value: Whole Plant
  misc_feature: MA Experiment ID: 20001459 Result: Up-regulated in Transcription
  misc_feature: MA Experiment 20001459 PARAMETER Experiment Name: At_50mM_NH4NO3_L-to-H_P Parameter: Age (day) Value: Undefined
  misc_feature: MA Experiment 20001459 PARAMETER Experiment Name: At_50mM_NH4NO3_L-to-H_P Parameter: Organism Value: Undefined
  misc_feature: MA Experiment 20001459 PARAMETER Experiment Name: At_50mM_NH4NO3_L-to-H_P Parameter: Plant Line Value: Undefined
  misc_feature: MA Experiment 20001459 PARAMETER Experiment Name: At_50mM_NH4NO3_L-to-H_P Parameter: Timepoint (hr) Value: 4
  misc_feature: MA Experiment 20001459 PARAMETER Experiment Name: At_50mM_NH4NO3_L-to-H_P Parameter: Tissue Value: Siliques
  misc_feature: MA Experiment 20001459 PARAMETER Experiment Name: At_50mM_NH4NO3_L-to-H_P Parameter: Treatment Value: 50mM NH4NO3 vs. 100mM Manitol
  misc_feature: MA Experiment ID: 20001555 Result: Down-regulated in Transcription
  misc_feature: MA Experiment 20001555 PARAMETER Experiment Name: At_Drought_Soil_Dry_P Parameter: Age (day) Value: 24
  misc_feature: MA Experiment 20001555 PARAMETER Experiment Name: At_Drought_Soil_Dry_P Parameter: Organism Value: A. thaliana
  misc_feature: MA Experiment 20001555 PARAMETER Experiment Name: At_Drought_Soil_Dry_P Parameter: Plant Line Value: WS
  misc_feature: MA Experiment 20001555 PARAMETER Experiment Name: At_Drought_Soil_Dry_P Parameter: Post Timepoint (hr) Value: None
  misc_feature: MA Experiment 20001555 PARAMETER Experiment Name: At_Drought_Soil_Dry_P Parameter: Post-Treatment Value: None
  misc_feature: MA Experiment 20001555 PARAMETER Experiment Name: At_Drought_Soil_Dry_P Parameter: Timepoint (day) Value: 10
  misc_feature: MA Experiment 20001555 PARAMETER Experiment Name: At_Drought_Soil_Dry_P Parameter: Treatment Value: Drought vs. No Drought
  misc_feature: MA Experiment ID: 20001556 Result: Down-regulated in Transcription
  misc_feature: MA Experiment 20001556 PARAMETER Experiment Name: At_Drought_Soil_Dry_P Parameter: Age (day) Value: 26
  misc_feature: MA Experiment 20001556 PARAMETER Experiment Name: At_Drought_Soil_Dry_P Parameter: Organism Value: A. thaliana
  misc_feature: MA Experiment 20001556 PARAMETER Experiment Name: At_Drought_Soil_Dry_P Parameter: Plant Line Value: WS
  misc_feature: MA Experiment 20001556 PARAMETER Experiment Name: At_Drought_Soil_Dry_P Parameter: Post Timepoint (hr) Value: None
  misc_feature: MA Experiment 20001556 PARAMETER Experiment Name: At_Drought_Soil_Dry_P Parameter: Post-Treatment Value: None
  misc_feature: MA Experiment 20001556 PARAMETER Experiment Name: At_Drought_Soil_Dry_P Parameter: Timepoint (day) Value: 12
  misc_feature: MA Experiment 20001556 PARAMETER Experiment Name: At_Drought_Soil_Dry_P Parameter: Treatment Value: Drought vs. No Drought
  misc_feature: MA Experiment ID: 20001557 Result: Down-regulated in Transcription
  misc_feature: MA Experiment 20001557 PARAMETER Experiment Name: At_Drought_Soil_Dry_P Parameter: Age (day) Value: 27
  misc_feature: MA Experiment 20001557 PARAMETER Experiment Name: At_Drought_Soil_Dry_P Parameter: Organism Value: A. thaliana
  misc_feature: MA Experiment 20001557 PARAMETER Experiment Name: At_Drought_Soil_Dry_P Parameter: Plant Line Value: WS
  misc_feature: MA Experiment 20001557 PARAMETER Experiment Name: At_Drought_Soil_Dry_P Parameter: Post Timepoint (hr) Value: 3
  misc_feature: MA Experiment 20001557 PARAMETER Experiment Name: At_Drought_Soil_Dry_P Parameter: Post-Treatment Value: Re-Water vs. No Drought
  misc_feature: MA Experiment 20001557 PARAMETER Experiment Name: At_Drought_Soil_Dry_P Parameter: Timepoint (day) Value: 13
  misc_feature: MA Experiment 20001557 PARAMETER Experiment Name: At_Drought_Soil_Dry_P Parameter: Treatment Value: Drought vs. No Drought
  misc_feature: MA Experiment ID: 20001558 Result: Down-regulated in Transcription
  misc_feature: MA Experiment 20001558 PARAMETER Experiment Name: At_Drought_Soil_Dry_P Parameter: Age (day) Value: 27
  misc_feature: MA Experiment 20001558 PARAMETER Experiment Name: At_Drought_Soil_Dry_P Parameter: Organism Value: A. thaliana
  misc_feature: MA Experiment 20001558 PARAMETER Experiment Name: At_Drought_Soil_Dry_P Parameter: Plant Line Value: WS
  misc_feature: MA Experiment 20001558 PARAMETER Experiment Name: At_Drought_Soil_Dry_P Parameter: Post Timepoint (hr) Value: 6
  misc_feature: MA Experiment 20001558 PARAMETER Experiment Name: At_Drought_Soil_Dry_P Parameter: Post-Treatment Value: Re-Water vs. No Drought
  misc_feature: MA Experiment 20001558 PARAMETER Experiment Name: At_Drought_Soil_Dry_P Parameter: Timepoint (day) Value: 13
  misc_feature: MA Experiment 20001558 PARAMETER Experiment Name: At_Drought_Soil_Dry_P Parameter: Treatment Value: Drought vs. No Drought
  misc_feature: MA Experiment ID: 20001560 Result: Down-regulated in Transcription
  misc_feature: MA Experiment 20001560 PARAMETER Experiment Name: At_Drought_Soil_Dry_P Parameter: Age (day) Value: 28
  misc_feature: MA Experiment 20001560 PARAMETER Experiment Name: At_Drought_Soil_Dry_P Parameter: Organism Value: A. thaliana
  misc_feature: MA Experiment 20001560 PARAMETER Experiment Name: At_Drought_Soil_Dry_P Parameter: Plant Line Value: WS
  misc_feature: MA Experiment 20001560 PARAMETER Experiment Name: At_Drought_Soil_Dry_P Parameter: Post Timepoint (hr) Value: None
  misc_feature: MA Experiment 20001560 PARAMETER Experiment Name: At_Drought_Soil_Dry_P Parameter: Post-Treatment Value: None
  misc_feature: MA Experiment 20001560 PARAMETER Experiment Name: At_Drought_Soil_Dry_P Parameter: Timepoint (day) Value: 14
  misc_feature: MA Experiment 20001560 PARAMETER Experiment Name: At_Drought_Soil_Dry_P Parameter: Treatment Value: Drought vs. No Drought

SEQ ID NO: 43654 - protein, 444 aa, Arabidopsis thaliana; identical to SEQ ID NO: 41793
  peptide (1)..(444): Ceres Seq. ID no. 13497215
  misc_feature (20)..(275): Pfam Name: Protein kinase domain Pfam Description: Protein kinase domain
  misc_feature (20)..(275): Pfam Name: Protein kinase domain Pfam Description: Protein kinase domain
  misc_feature (15)..(440): Homolog of NCBI NO: 23237825 NR Description: putative serine/threonine kinase
  misc_feature (6)..(440): Homolog of NCBI NO: 34894358 NR Description: unnamed protein product [Oryza sativa (japonica
  misc_feature (13)..(425): Homolog of NCBI NO: 25387053 NR Description: hypothetical protein F11A17.18 [imported] -
  misc_feature (13)..(110): Homolog of NCBI NO: 8778506 NR Description: F21D18.2 [Arabidopsis thaliana]
  misc_feature (108)..(443): Homolog of NCBI NO: 8778506 NR Description: F21D18.2 [Arabidopsis thaliana]
  misc_feature (15)..(440): Homolog of NCBI NO: 23237825 NR Description: putative serine/threonine kinase
  misc_feature (13)..(425): Homolog of NCBI NO: 25387053 NR Description: hypothetical protein F11A17.18 [imported] -
  misc_feature (108)..(443): Homolog of NCBI NO: 8778506 NR Description: F21D18.2 [Arabidopsis thaliana]
  misc_feature (1)..(425): Homolog of NCBI NO: 9294138 NR Description: serine/threonine kinase [Arabidopsis thaliana]
  misc_feature (1)..(444): Homolog of NCBI NO: 11066952 NR Description: CBL-interacting protein kinase 1 [Arabidopsis
  misc_feature (1)..(444): Homolog of NCBI NO: 18401539 NR Description: CBL-interacting protein kinase 1 [Arabidopsis
  misc_feature (1)..(444): Homolog of NCBI NO: 20260556 NR Description: unknown protein [Arabidopsis thaliana]
  misc_feature (13)..(443): Homolog of NCBI NO: 15221136 NR Description: CBL-interacting protein kinase 17 [Arabidopsis
  misc_feature (13)..(110): Homolog of NCBI NO: 8778506 NR Description: F21D18.2 [Arabidopsis thaliana]
  misc_feature (6)..(440): Homolog of NCBI NO: 34894358 NR Description: unnamed protein product [Oryza sativa (japonica
  misc_feature (13)..(443): Homolog of NCBI NO: 15221136 NR Description: CBL-interacting protein kinase 17 [Arabidopsis
  misc_feature (1)..(444): Homolog of NCBI NO: 20260556 NR Description: unknown protein [Arabidopsis thaliana]
  misc_feature (1)..(444): Homolog of NCBI NO: 18401539 NR Description: CBL-interacting protein kinase 1 [Arabidopsis
  misc_feature (1)..(444): Homolog of NCBI NO: 11066952 NR Description: CBL-interacting protein kinase 1 [Arabidopsis
  misc_feature (1)..(425): Homolog of NCBI NO: 9294138 NR Description: serine/threonine kinase [Arabidopsis thaliana]

SEQ ID NO: 43655 - protein, 430 aa, Arabidopsis thaliana; identical to SEQ ID NO: 41794
  peptide (1)..(430): Ceres Seq. ID no. 13497216
  misc_feature (6)..(261): Pfam Name: Protein kinase domain Pfam Description: Protein kinase domain
  misc_feature (6)..(261): Pfam Name: Protein kinase domain Pfam Description: Protein kinase domain
  misc_feature (1)..(426): Homolog of NCBI NO: 23237825 NR Description: putative serine/threonine kinase
  misc_feature (1)..(426): Homolog of NCBI NO: 34894358 NR Description: unnamed protein product [Oryza sativa (japonica
  misc_feature (1)..(411): Homolog of NCBI NO: 25387053 NR Description: hypothetical protein F11A17.18 [imported] -
  misc_feature (1)..(96): Homolog of NCBI NO: 8778506 NR Description: F21D18.2 [Arabidopsis thaliana]
  misc_feature (94)..(429): Homolog of NCBI NO: 8778506 NR Description: F21D18.2 [Arabidopsis thaliana]
  misc_feature (1)..(426): Homolog of NCBI NO: 23237825 NR Description: putative serine/threonine kinase
  misc_feature (1)..(411): Homolog of NCBI NO: 25387053 NR Description: hypothetical protein F11A17.18 [imported] -
  misc_feature (94)..(429): Homolog of NCBI NO: 8778506 NR Description: F21D18.2 [Arabidopsis thaliana]
  misc_feature (1)..(411): Homolog of NCBI NO: 9294138 NR Description: serine/threonine kinase [Arabidopsis thaliana]
  misc_feature (1)..(430): Homolog of NCBI NO: 11066952 NR Description: CBL-interacting protein kinase 1 [Arabidopsis
  misc_feature (1)..(430): Homolog of NCBI NO: 18401539 NR Description: CBL-interacting protein kinase 1 [Arabidopsis
  misc_feature (1)..(430): Homolog of NCBI NO: 20260556 NR Description: unknown protein [Arabidopsis thaliana]
  misc_feature (1)..(429): Homolog of NCBI NO: 15221136 NR Description: CBL-interacting protein kinase 17 [Arabidopsis
  misc_feature (1)..(96): Homolog of NCBI NO: 8778506 NR Description: F21D18.2 [Arabidopsis thaliana]
  misc_feature (1)..(426): Homolog of NCBI NO: 34894358 NR Description: unnamed protein product [Oryza sativa (japonica
  misc_feature (1)..(429): Homolog of NCBI NO: 15221136 NR Description: CBL-interacting protein kinase 17 [Arabidopsis
  misc_feature (1)..(430): Homolog of NCBI NO: 20260556 NR Description: unknown protein [Arabidopsis thaliana]
  misc_feature (1)..(430): Homolog of NCBI NO: 18401539 NR Description: CBL-interacting protein kinase 1 [Arabidopsis
  misc_feature (1)..(430): Homolog of NCBI NO: 11066952 NR Description: CBL-interacting protein kinase 1 [Arabidopsis
  misc_feature (1)..(411): Homolog of NCBI NO: 9294138 NR Description: serine/threonine kinase [Arabidopsis thaliana]

SEQ ID NO: 43656 - protein, 371 aa, Arabidopsis thaliana; identical to SEQ ID NO: 41795
  peptide (1)..(371): Ceres Seq. ID no. 13497217
  misc_feature (1)..(202): Pfam Name: Protein kinase domain Pfam Description: Protein kinase domain
  misc_feature (1)..(202): Pfam Name: Protein kinase domain Pfam Description: Protein kinase domain
  misc_feature (1)..(367): Homolog of NCBI NO: 23237825 NR Description: putative serine/threonine kinase
  misc_feature (1)..(367): Homolog of NCBI NO: 34894358 NR Description: unnamed protein product [Oryza sativa (japonica
  misc_feature (1)..(352): Homolog of NCBI NO: 25387053 NR Description: hypothetical protein F11A17.18 [imported] -
  misc_feature (1)..(37): Homolog of NCBI NO: 8778506 NR Description: F21D18.2 [Arabidopsis thaliana]
  misc_feature (35)..(370): Homolog of NCBI NO: 8778506 NR Description: F21D18.2 [Arabidopsis thaliana]
  misc_feature (1)..(367): Homolog of NCBI NO: 23237825 NR Description: putative serine/threonine kinase
  misc_feature (1)..(352): Homolog of NCBI NO: 25387053 NR Description: hypothetical protein F11A17.18 [imported] -
  misc_feature (35)..(370): Homolog of NCBI NO: 8778506 NR Description: F21D18.2 [Arabidopsis thaliana]
  misc_feature (1)..(352): Homolog of NCBI NO: 9294138 NR Description: serine/threonine kinase [Arabidopsis thaliana]
  misc_feature (1)..(371): Homolog of NCBI NO: 11066952 NR Description: CBL-interacting protein kinase 1 [Arabidopsis
  misc_feature (1)..(371): Homolog of NCBI NO: 18401539 NR Description: CBL-interacting protein kinase 1 [Arabidopsis
  misc_feature (1)..(371): Homolog of NCBI NO: 20260556 NR Description: unknown protein [Arabidopsis thaliana]
  misc_feature (1)..(370): Homolog of NCBI NO: 15221136 NR Description: CBL-interacting protein kinase 17 [Arabidopsis
  misc_feature (1)..(37): Homolog of NCBI NO: 8778506 NR Description: F21D18.2 [Arabidopsis thaliana]
  misc_feature (1)..(367): Homolog of NCBI NO: 34894358 NR Description: unnamed protein product [Oryza sativa (japonica
  misc_feature (1)..(370): Homolog of NCBI NO: 15221136 NR Description: CBL-interacting protein kinase 17 [Arabidopsis
  misc_feature (1)..(371): Homolog of NCBI NO: 20260556 NR Description: unknown protein [Arabidopsis thaliana]
  misc_feature (1)..(371): Homolog of NCBI NO: 18401539 NR Description: CBL-interacting protein kinase 1 [Arabidopsis
  misc_feature (1)..(371): Homolog of NCBI NO: 11066952 NR Description: CBL-interacting protein kinase 1 [Arabidopsis
  misc_feature (1)..(352): Homolog of NCBI NO: 9294138 NR Description: serine/threonine kinase [Arabidopsis thaliana]

SEQ ID NO: 43657 - DNA, 1376 bp, Arabidopsis thaliana; identical to SEQ ID NO: 40851
  misc_feature (1)..(1376): Ceres Seq. ID no. 13576752
  misc_feature: MA Experiment ID: 108434 Result: Up-regulated in Transcription
  misc_feature: MA Experiment 108434 PARAMETER Experiment Name: At_Root_Tips_cDNA_P Parameter: Tissue Value: Root Tips
  misc_feature: MA Experiment ID: 108435 Result: Up-regulated in Transcription
  misc_feature: MA Experiment 108435 PARAMETER Experiment Name: At_stm_Mutants_cDNA_P Parameter: Plant Line Value: wt Landsburg vs stm
  misc_feature: MA Experiment 108435 PARAMETER Experiment Name: At_stm_Mutants_cDNA_P Parameter: Tissue Value: Shoot Apical Meristem Region
  misc_feature: MA Experiment ID: 108462 Result: Down-regulated in Transcription
  misc_feature: MA Experiment 108462 PARAMETER Experiment Name: At_Germinating_Seeds_cDNA_P Parameter: Age (day) Value: 2 vs. 0
  misc_feature: MA Experiment 108462 PARAMETER Experiment Name: At_Germinating_Seeds_cDNA_P Parameter: Tissue Value: Germinating Seeds
  misc_feature: MA Experiment ID: 108463 Result: Down-regulated in Transcription
  misc_feature: MA Experiment 108463 PARAMETER Experiment Name: At_Germinating_Seeds_cDNA_P Parameter: Age (day) Value: 3 vs. 0
  misc_feature: MA Experiment 108463 PARAMETER Experiment Name: At_Germinating_Seeds_cDNA_P Parameter: Tissue Value: Germinating Seeds
  misc_feature: MA Experiment ID: 108464 Result: Down-regulated in Transcription
  misc_feature: MA Experiment 108464 PARAMETER Experiment Name: At_Germinating_Seeds_cDNA_P Parameter: Age (day) Value: 4 vs. 0
  misc_feature: MA Experiment 108464 PARAMETER Experiment Name: At_Germinating_Seeds_cDNA_P Parameter: Tissue Value: Germinating Seeds
  misc_feature: MA Experiment ID: 108488 Result: Up-regulated in Transcription
  misc_feature: MA Experiment ID: 20000069 Result: Down-regulated in Transcription
  misc_feature: MA Experiment 20000069 PARAMETER Experiment Name: At_100uM_ABA_Mutants_cDNA_P Parameter: Plant Line Value: CS23
  misc_feature: MA Experiment 20000069 PARAMETER Experiment Name: At_100uM_ABA_Mutants_cDNA_P Parameter: Timepoint (hr) Value: 6
  misc_feature: MA Experiment 20000069 PARAMETER Experiment Name: At_100uM_ABA_Mutants_cDNA_P Parameter: Tissue Value: Aerial
  misc_feature: MA Experiment 20000069 PARAMETER Experiment Name: At_100uM_ABA_Mutants_cDNA_P Parameter: Treatment Value: 100uM ABA vs. No Treatment
  misc_feature: MA Experiment ID: 20000087 Result: Down-regulated in Transcription
  misc_feature: MA Experiment 20000087 PARAMETER Experiment Name: At_100uM_ABA_Mutants_cDNA_P Parameter: Plant Line Value: WS
  misc_feature: MA Experiment 20000087 PARAMETER Experiment Name: At_100uM_ABA_Mutants_cDNA_P Parameter: Timepoint (hr) Value: 6
  misc_feature: MA Experiment 20000087 PARAMETER Experiment Name: At_100uM_ABA_Mutants_cDNA_P Parameter: Tissue Value: Aerial
  misc_feature: MA Experiment 20000087 PARAMETER Experiment Name: At_100uM_ABA_Mutants_cDNA_P Parameter: Treatment Value: 100uM ABA vs. No Treatment
  misc_feature: MA Experiment ID: 20000315 Result: Up-regulated in Transcription
  misc_feature: MA Experiment 20000315 PARAMETER Experiment Name: At_14day_Shoots-Roots_Sub_P Parameter: Age (day) Value: 14
  misc_feature: MA Experiment 20000315 PARAMETER Experiment Name: At_14day_Shoots-Roots_Sub_P Parameter: Organism Value: A. thaliana
  misc_feature: MA Experiment 20000315 PARAMETER Experiment Name: At_14day_Shoots-Roots_Sub_P Parameter: Plant Line Value: WS
  misc_feature: MA Experiment 20000315 PARAMETER Experiment Name: At_14day_Shoots-Roots_Sub_P Parameter: Tissue Value: Shoots vs. Whole Plant
  misc_feature: MA Experiment ID: 20001807 Result: Up-regulated in Transcription
  misc_feature: MA Experiment 20001807 PARAMETER Experiment Name: At_50mM_NH4NO3_L-to-H_Sub_P Parameter: Timepoint (hr) Value: 6
  misc_feature: MA Experiment 20001807 PARAMETER Experiment Name: At_50mM_NH4NO3_L-to-H_Sub_P Parameter: Tissue Value: Leaf
  misc_feature: MA Experiment 20001807 PARAMETER Experiment Name: At_50mM_NH4NO3_L-to-H_Sub_P Parameter: Treatment Value: 50mM NH4NO3 vs 100mM Mannitol

SEQ ID NO: 43658 - protein, 258 aa, Arabidopsis thaliana [sequence omitted]

SEQ ID NO: 43659 - protein, 177 aa, Arabidopsis thaliana; identical to SEQ ID NO: 40853
  peptide (1)..(177): Ceres Seq. ID no. 13576754
  misc_feature (15)..(150): Pfam Name: Ribosomal Proteins L2, C-terminal domain Pfam Description: Ribosomal Proteins L2, C-terminal domain
  misc_feature (15)..(150): Pfam Name: Ribosomal Proteins L2, C-terminal domain Pfam Description: Ribosomal Proteins L2, C-terminal domain
  misc_feature (1)..(177): Homolog of NCBI NO: 798818 NR Description: 60S ribosomal protein L2 [Arabidopsis thaliana]
  misc_feature (1)..(177): Homolog of NCBI NO: 266944 NR Description: 60S RIBOSOMAL PROTEIN L2 (L8) (RIBOSOMAL PROTEIN
  misc_feature (1)..(177): Homolog of NCBI NO: 798818 NR Description: 60S ribosomal protein L2 [Arabidopsis thaliana]
  misc_feature (1)..(177): Homolog of NCBI NO: 15234298 NR Description: 60S ribosomal protein L8 (RPL8C) [Arabidopsis
  misc_feature (1)..(177): Homolog of NCBI NO: 15227954 NR Description: 60S ribosomal protein L8 (RPL8A) [Arabidopsis
  misc_feature (1)..(177): Homolog of NCBI NO: 266944 NR Description: 60S RIBOSOMAL PROTEIN L2 (L8) (RIBOSOMAL PROTEIN
  misc_feature (1)..(177): Homolog of NCBI NO: 15234298 NR Description: 60S ribosomal protein L8 (RPL8C) [Arabidopsis
  misc_feature (1)..(177): Homolog of NCBI NO: 15227954 NR Description: 60S ribosomal protein L8 (RPL8A) [Arabidopsis

SEQ ID NO: 43660 - protein, 134 aa, Arabidopsis thaliana; identical to SEQ ID NO: 40854
  peptide (1)..(134): Ceres Seq. ID no. 13576755
  misc_feature (47)..(95): Pfam Name: KH domain Pfam Description: KH domain
  misc_feature (47)..(95): Pfam Name: KH domain Pfam Description: KH domain
  misc_feature (1)..(111): Homolog of NCBI NO: 28189605 NR Description: similar to ribosomal protein S3 [Bos taurus]
  misc_feature (1)..(111): Homolog of NCBI NO: 12848978 NR Description: unnamed protein product [Mus musculus]
  misc_feature (1)..(111): Homolog of NCBI NO: 133940 NR Description: 40S ribosomal protein S3A (S1A)
  misc_feature (1)..(111): Homolog of NCBI NO: 28630346 NR Description: ribosomal protein S3 [Petromyzon marinus]
  misc_feature (1)..(111): Homolog of NCBI NO: 12847921 NR Description: unnamed protein product [Mus musculus]
  misc_feature (1)..(111): Homolog of NCBI NO: 28189605 NR Description: similar to ribosomal protein S3 [Bos taurus]
  misc_feature (1)..(111): Homolog of NCBI NO: 133940 NR Description: 40S ribosomal protein S3A (S1A)
  misc_feature (1)..(111): Homolog of NCBI NO: 12847921 NR Description: unnamed protein product [Mus musculus]
  misc_feature (1)..(111): Homolog of NCBI NO: 15232352 NR Description: 40S ribosomal protein S3 (RPS3B) [Arabidopsis
  misc_feature (1)..(111): Homolog of NCBI NO: 15225107 NR Description: 40S ribosomal protein S3 (RPS3A) [Arabidopsis
  misc_feature (1)..(111): Homolog of NCBI NO: 15238533 NR Description: 40S ribosomal protein S3 (RPS3C) [Arabidopsis
  misc_feature (3)..(111): Homolog of NCBI NO: 14192875 NR Description: Putative 40S ribosomal protein; contains
  misc_feature (1)..(111): Homolog of NCBI NO: 22204124 NR Description: putative 40S ribosomal protein S3 [Triticum
  misc_feature (1)..(111): Homolog of NCBI NO: 28630346 NR Description: ribosomal protein S3 [Petromyzon marinus]
  misc_feature (1)..(111): Homolog of NCBI NO: 12848978 NR Description: unnamed protein product [Mus musculus]
  misc_feature (1)..(111): Homolog of NCBI NO: 22204124 NR Description: putative 40S ribosomal protein S3 [Triticum
  misc_feature (3)..(111): Homolog of NCBI NO: 14192875 NR Description: Putative 40S ribosomal protein; contains
  misc_feature (1)..(111): Homolog of NCBI NO: 15238533 NR Description: 40S ribosomal protein S3 (RPS3C) [Arabidopsis
  misc_feature (1)..(111): Homolog of NCBI NO: 15225107 NR Description: 40S ribosomal protein S3 (RPS3A) [Arabidopsis
  misc_feature (1)..(111): Homolog of NCBI NO: 15232352 NR Description: 40S ribosomal protein S3 (RPS3B) [Arabidopsis
  misc_feature (123)..(123): Xaa is any aa, unknown or other

SEQ ID NO: 43661 - DNA, 1289 bp, Arabidopsis thaliana
  misc_feature (1)..(1289): Ceres Seq. ID no. 12371358
  misc_feature: MA Experiment ID: 20000173 Result: Down-regulated in Transcription
  misc_feature: MA Experiment 20000173 PARAMETER Experiment Name: At_42deg_Heat_P Parameter: Age (day) Value: 14
  misc_feature: MA Experiment 20000173 PARAMETER Experiment Name: At_42deg_Heat_P Parameter: Organism Value: A. thaliana
  misc_feature: MA Experiment 20000173 PARAMETER Experiment Name: At_42deg_Heat_P Parameter: Plant Line Value: WS
  misc_feature: MA Experiment 20000173 PARAMETER Experiment Name: At_42deg_Heat_P Parameter: Temperature (deg C) Value: 42 vs. 22
  misc_feature: MA Experiment 20000173 PARAMETER Experiment Name: At_42deg_Heat_P Parameter: Timepoint (hr) Value: 6
  misc_feature: MA Experiment 20000173 PARAMETER Experiment Name: At_42deg_Heat_P Parameter: Tissue Value: Aerial
  misc_feature: MA Experiment ID: 20000179 Result: Up-regulated in Transcription
  misc_feature: MA Experiment 20000179 PARAMETER Experiment Name: At_Germinating_Seeds_P Parameter: Age (hr) Value: 6 vs. 0
  misc_feature: MA Experiment 20000179 PARAMETER Experiment Name: At_Germinating_Seeds_P Parameter: Tissue Value: Germinating Seeds
  misc_feature: MA Experiment ID: 20000180 Result: Up-regulated in Transcription
  misc_feature: MA Experiment 20000180 PARAMETER Experiment Name: At_Germinating_Seeds_P Parameter: Age (hr) Value: 24 vs. 0
  misc_feature: MA Experiment 20000180 PARAMETER Experiment Name: At_Germinating_Seeds_P Parameter: Tissue Value: Germinating Seeds
  misc_feature: MA Experiment ID: 20000227 Result: Up-regulated in Transcription
  misc_feature: MA Experiment 20000227 PARAMETER Experiment Name: At_Root-Tips-vs-Tops_P Parameter: Tissue Value: Root Tips vs. Root Tops
  misc_feature: MA Experiment ID: 20000234 Result: Up-regulated in Transcription
  misc_feature: MA Experiment 20000234 PARAMETER Experiment Name: At_Siliques_P Parameter: Age (day) Value: 21
  misc_feature: MA Experiment 20000234 PARAMETER Experiment Name: At_Siliques_P Parameter: Organism Value: A. thaliana
  misc_feature: MA Experiment 20000234 PARAMETER Experiment Name: At_Siliques_P Parameter: Plant Line Value: WS
  misc_feature: MA Experiment 20000234 PARAMETER Experiment Name: At_Siliques_P Parameter: Tissue Value: Less Than 5mm Siliques vs. Whole Plant
  misc_feature: MA Experiment ID: 20000437 Result: Down-regulated in Transcription
  misc_feature: MA Experiment 20000437 PARAMETER Experiment Name: At_Drought_P Parameter: Age (day) Value: 8
  misc_feature: MA Experiment 20000437 PARAMETER Experiment Name: At_Drought_P Parameter: Organism Value: A. thaliana
  misc_feature: MA Experiment 20000437 PARAMETER Experiment Name: At_Drought_P Parameter: Plant Line Value: WS
  misc_feature: MA Experiment 20000437 PARAMETER Experiment Name: At_Drought_P Parameter: Timepoint (hr) Value: 24
  misc_feature: MA Experiment 20000437 PARAMETER Experiment Name: At_Drought_P Parameter: Tissue Value: Whole Plant
  misc_feature: MA Experiment 20000437 PARAMETER Experiment Name: At_Drought_P Parameter: Treatment Value: Drought vs. No Drought
  misc_feature: MA Experiment ID: 20001911 Result: Down-regulated in Transcription
  misc_feature: MA Experiment 20001911 PARAMETER Experiment Name: At_Drought_Reproduction_P Parameter: Age (day) Value: 40
  misc_feature: MA Experiment 20001911 PARAMETER Experiment Name: At_Drought_Reproduction_P Parameter: Organism Value: A. thaliana
  misc_feature: MA Experiment 20001911 PARAMETER Experiment Name: At_Drought_Reproduction_P Parameter: Plant Line Value: WS
  misc_feature: MA Experiment 20001911 PARAMETER Experiment Name: At_Drought_Reproduction_P Parameter: Timepoint (day) Value: 10
  misc_feature: MA Experiment 20001911 PARAMETER Experiment Name: At_Drought_Reproduction_P Parameter: Tissue Value: Flowers
  misc_feature: MA Experiment 20001911 PARAMETER Experiment Name: At_Drought_Reproduction_P Parameter: Treatment Value: Drought vs. No Drought
tttgtatcatgagtaatgttgatatgtttagtgatgaaaagttctcagatgtcagaaacagaatttaaagtgttgcttgagacattcacatttcctgctgattctgctcccttcaagagttgtcatgcctctaccatagttgaggttgttaaagatcatttcttggctgcgtatttcggaggcaccagggaaggagcacctgatgtcaaaatctggttgcagcatttcaaggatggtcaatgggattcaccggttattgttgatgaagagccaggagttccaatgtataaccctgtcttgttcaaacttccatctcatgagctcttattgttctacaaaatcggccaggaggttcaaaaatggagtggttgcatgaaacgatcatatgataaaggtataacttggactgaaagagaacagcttcctcctgggattctcggtcctatcaaaaacaagcccattttgcttgaagacggtactctcctttgcggatcatctgttgagagttggaattcttggggagcatggatggaggtcacttcagatgcgggtagaacatggagaaagaaagggccaatatacattcaaggcaagagtcttagcgtgatccaaccagttccataccaaaccgcagctgggaacttacggattttactcagatcctttactggcattgacagaatctgtatctcagagtctttggatggcggtgagaactggagttttgcagtaccaacggttctcccaaacccaaattcaggtattgatggagtcaagcttaaggatggtaggctagtgcttgcttacaacacagactcaagaggtgtcctcaaattaggagtttctttagacgacggtgattcatggaccgatattttaacgttggaggaatctccgggaatggagtattcgtacccggctgttatacaagccggagacggcaatgtccacgtcacctatacatataacaggacacaaattaagcatgtggtgctcaagactgcgacagatatcgattcgaagccataccgacatggtgaagcaggaggaggacacgtgaacttggatttgtacgaaccaaacattaattaattagctatttgtctcttgaaccatcgatgtggagtgtgacttccttcttacggaagaacaaagaatgttctctttcttgtcttgtaagttattgattgatcgattcttgagtttgtaaaagttgccactagttgatgaatattattgagattgtttataatatatttattgtaatcatataagttagagatttactt

SEQ ID NO: 43662 - protein, 358 aa, Arabidopsis thaliana
  peptide (1)..(358): Ceres Seq. ID no. 12371359
  misc_feature (28)..(295): Homolog of NCBI NO: 32475400 NR Description: conserved hypothetical protein [Pirellula sp.]
  misc_feature (26)..(327): Homolog of NCBI NO: 21243816 NR Description: conserved hypothetical protein
  misc_feature (16)..(327): Homolog of NCBI NO: 23617011 NR Description: hypothetial protein~similar to Arabidopsis
  misc_feature (15)..(328): Homolog of NCBI NO: 34393670 NR Description: alpha-rhamnosidase-like protein
  misc_feature (12)..(320): Homolog of NCBI NO: 26452755 NR Description: unknown protein [Arabidopsis thaliana]
  misc_feature (12)..(358): Homolog of NCBI NO: 21536870 NR Description: unknown [Arabidopsis thaliana]
  misc_feature (12)..(358): Homolog of NCBI NO: 30696919 NR Description: expressed protein [Arabidopsis thaliana]
  misc_feature (7)..(150): Homolog of NCBI NO: 9759267 NR Description: gene_id:MRI1.6~pir||D64592~similar to unknown
  misc_feature (148)..(358): Homolog of NCBI NO: 9759267 NR Description: gene_id:MRI1.6~pir||D64592~similar to unknown
  misc_feature (7)..(358): Homolog of NCBI NO: 30696915 NR Description: expressed protein [Arabidopsis thaliana]
MLICLVMKSSQMSETEFKVLLETFTFPADSAPFKSCHASTIVEVVKDHFLAAYFGGTREGAPDVKIWLQHFKDGQWDSPVIVDEEPGVPMYNPVLFKLPSHELLLFYKIGQEVQKWSGCMKRSYDKGITWTEREQLPPGILGPIKNKPILLEDGTLLCGSSVESWNSWGAWMEVTSDAGRTWRKKGPIYIQGKSLSVIQPVPYQTAAGNLRILLRSFTGIDRICISESLDGGENWSFAVPTVLPNPNSGIDGVKLKDGRLVLAYNTDSRGVLKLGVSLDDGDSWTDILTLEESPGMEYSYPAVIQAGDGNVHVTYTYNRTQIKHVVLKTATDIDSKPYRHGEAGGGHVNLDLYEPNIN

SEQ ID NO: 43663 - protein, 352 aa, Arabidopsis thaliana
  peptide (1)..(352): Ceres Seq. ID no. 12371360
  misc_feature (22)..(289): Homolog of NCBI NO: 32475400 NR Description: conserved hypothetical protein [Pirellula sp.]
  misc_feature (20)..(321): Homolog of NCBI NO: 21243816 NR Description: conserved hypothetical protein
  misc_feature (10)..(321): Homolog of NCBI NO: 23617011 NR Description: hypothetial protein~similar to Arabidopsis
  misc_feature (9)..(322): Homolog of NCBI NO: 34393670 NR Description: alpha-rhamnosidase-like protein
  misc_feature (6)..(314): Homolog of NCBI NO: 26452755 NR Description: unknown protein [Arabidopsis thaliana]
  misc_feature (6)..(352): Homolog of NCBI NO: 21536870 NR Description: unknown [Arabidopsis thaliana]
  misc_feature (6)..(352): Homolog of NCBI NO: 30696919 NR Description: expressed protein [Arabidopsis thaliana]
  misc_feature (1)..(144): Homolog of NCBI NO: 9759267 NR Description: gene_id:MRI1.6~pir||D64592~similar to unknown
  misc_feature (142)..(352): Homolog of NCBI NO: 9759267 NR Description: gene_id:MRI1.6~pir||D64592~similar to unknown
  misc_feature (1)..(352): Homolog of NCBI NO: 30696915 NR Description: expressed protein [Arabidopsis thaliana]
MKSSQMSETEFKVLLETFTFPADSAPFKSCHASTIVEVVKDHFLAAYFGGTREGAPDVKIWLQHFKDGQWDSPVIVDEEPGVPMYNPVLFKLPSHELLLFYKIGQEVQKWSGCMKRSYDKGITWTEREQLPPGILGPIKNKPILLEDGTLLCGSSVESWNSWGAWMEVTSDAGRTWRKKGPIYIQGKSLSVIQPVPYQTAAGNLRILLRSFTGIDRICISESLDGGENWSFAVPTVLPNPNSGIDGVKLKDGRLVLAYNTDSRGVLKLGVSLDDGDSWTDILTLEESPGMEYSYPAVIQAGDGNVHVTYTYNRTQIKHVVLKTATDIDSKPYRHGEAGGGHVNLDLYEPNIN

SEQ ID NO: 43664 - protein, 347 aa, Arabidopsis thaliana; identical to SEQ ID NO: 35320
  peptide (1)..(347): Ceres Seq. ID no. 12371361
  misc_feature (17)..(284): Homolog of NCBI NO: 32475400 NR Description: conserved hypothetical protein [Pirellula sp.]
  misc_feature (15)..(316): Homolog of NCBI NO: 21243816 NR Description: conserved hypothetical protein
  misc_feature (5)..(316): Homolog of NCBI NO: 23617011 NR Description: hypothetial protein~similar to Arabidopsis
  misc_feature (4)..(317): Homolog of NCBI NO: 34393670 NR Description: alpha-rhamnosidase-like protein
  misc_feature (1)..(309): Homolog of NCBI NO: 26452755 NR Description: unknown protein [Arabidopsis thaliana]
  misc_feature (1)..(347): Homolog of NCBI NO: 21536870 NR Description: unknown [Arabidopsis thaliana]
  misc_feature (1)..(347): Homolog of NCBI NO: 30696919 NR Description: expressed protein [Arabidopsis thaliana]
  misc_feature (1)..(139): Homolog of NCBI NO: 9759267 NR Description: gene_id:MRI1.6~pir||D64592~similar to unknown
  misc_feature (137)..(347): Homolog of NCBI NO: 9759267 NR Description: gene_id:MRI1.6~pir||D64592~similar to unknown
  misc_feature (1)..(347): Homolog of NCBI NO: 30696915 NR Description: expressed protein [Arabidopsis thaliana]

SEQ ID NO: 43665 - DNA, 1538 bp, Arabidopsis thaliana
  misc_feature (1)..(1538): Ceres Seq. ID no. 13622074
  misc_feature: MA Experiment ID: 108434 Result: Up-regulated in Transcription
  misc_feature: MA Experiment 108434 PARAMETER Experiment Name: At_Root_Tips_cDNA_P Parameter: Tissue Value: Root Tips
  misc_feature: MA Experiment ID: 108577 Result: Down-regulated in Transcription
  misc_feature: MA Experiment 108577 PARAMETER Experiment Name: At_42deg_Heat_cDNA_P Parameter: Temperature (deg C) Value: 42 vs. 22
  misc_feature: MA Experiment 108577 PARAMETER Experiment Name: At_42deg_Heat_cDNA_P Parameter: Timepoint (hr) Value: 6
  misc_feature: MA Experiment 108577 PARAMETER Experiment Name: At_42deg_Heat_cDNA_P Parameter: Tissue Value: Aerial
  misc_feature: MA Experiment ID: 108585 Result: Up-regulated in Transcription
  misc_feature: MA Experiment 108585 PARAMETER Experiment Name: At_5mM_NaNP_cDNA_P Parameter: Timepoint (hr) Value: 6
  misc_feature: MA Experiment 108585 PARAMETER Experiment Name: At_5mM_NaNP_cDNA_P Parameter: Tissue Value: Aerial
  misc_feature: MA Experiment 108585 PARAMETER Experiment Name: At_5mM_NaNP_cDNA_P Parameter: Treatment Value: null
  misc_feature: MA Experiment ID: 108595 Result: Down-regulated in Transcription
  misc_feature: MA Experiment 108595 PARAMETER Experiment Name: At_Ler-pi_Ovule_cDNA_P Parameter: Plant Line Value: null
  misc_feature: MA Experiment ID: 20000113 Result: Down-regulated in Transcription
  misc_feature: MA Experiment 20000113 PARAMETER Experiment Name: At_42deg_Heat_cDNA_P Parameter: Temperature (deg C) Value: 42 vs. 22
  misc_feature: MA Experiment 20000113 PARAMETER Experiment Name: At_42deg_Heat_cDNA_P Parameter: Timepoint (hr) Value: 8
  misc_feature: MA Experiment 20000113 PARAMETER Experiment Name: At_42deg_Heat_cDNA_P Parameter: Tissue Value: Aerial
gcattttccgagtactcaagagaaaggcgatggggtcatcacagtcttcgcaattactcgatgaagaagaagaagaagaagatgaagcagagagcgaaggtgaagaagtagaagaagaagaagatgaagcagagagcgaattgaataacagaagaatcgagctggataatctcttggtcaagaaagttctcgagcaagagcctgagatgcttccttgtcacgcctctgcttctccactctctcctcagctctcttctcttggaactcctcgaatcggaccttccattaaagtctgggatccttacaacgtcctcgcgccacctcctccttcttctccgcctcttttctctcgtatctcctccgccgcggaacacgatcgctccgccgtgacggaagtctatttcatcagccacggcgagtgtgatctcaatctcaggcctgatctgattggaggtagatgccacgtggctactctcacacccaacgggaaacgtcaggcgagagctctagccgtatttttaaactctgaaggtgttcgattcacctccgtcttctcttcgcctctggatcgagctagatccatggctgtttctgtttgccaggaaatgaattttcctgaggagcatttgcaagtctcggatgctgtggttgagatgagtttaggggactgggaaagctgtcatcggtcagagatttacacacctgaaactctaagtttaatagaaagatgccaacctgatttctcagctccatctggtgaatcactcagacaagtagagtttcggatggttcagtttctgaatgggacagtctcaggactttcggagaagctcaggtcagaacttcttccatctacacagcacacaaattccagagggttctcgttagctacttctattcatcgcccaattcttacaaggaagaaatctgggaagagccggtttcaggtgatgaatgcaactggtgatcacgagggtagtgaagagatatttagtaatcacaatgatgaacaacacctaggtgatataaacatcaagagttcttcttctcaactctcaacctgcattggagttttcactcactctttacctataaagtgtcttcttaccggtatccttggatgcagcccggtaatgacacataagatctgtgtggaggattcctctgtgaccgtattacagcattcgtggaaaaccgggtggcaggtaaagcggttaaatgacaccgctcatcttagactgttgtagcctcatcatcatcaaattcttttactctctgaaagctcgaaaacacagcgagctggtaaattattgcaagaccttcacaagtcatttgagtctgcagaagaagatcaacaagcttgcagattacatgctcccgccacgagcctcttgtacgtttgttttgagaaagaaaagctaaagatttgttaatgctgatgtttcactaccttgttctgtttgattctttctatttgcaagcttcctcttatgtaattcttatgcttataatcacacaaaaaaaaaaagctcattgcc

SEQ ID NO: 43666 - protein, 414 aa, Arabidopsis thaliana
  peptide (1)..(414): Ceres Seq. ID no. 13622075
  misc_feature (130)..(287): Pfam Name: Phosphoglycerate mutase family Pfam Description: Phosphoglycerate mutase family
  misc_feature (10)..(329): Homolog of NCBI NO: 17902576 NR Description: putative fructose-2,6-bisphosphatase [Silene
  misc_feature (300)..(414): Homolog of NCBI NO: 17902574 NR Description: putative Fructose-2,6-bisphosphatase [Silene
  misc_feature (10)..(321): Homolog of NCBI NO: 17902574 NR Description: putative Fructose-2,6-bisphosphatase [Silene
  misc_feature (300)..(414): Homolog of NCBI NO: 17902578 NR Description: putative fructose-2,6-bisphosphatase [Silene
  misc_feature (10)..(329): Homolog of NCBI NO: 17902578 NR Description: putative fructose-2,6-bisphosphatase [Silene
  misc_feature (10)..(413): Homolog of NCBI NO: 15231617 NR Description: expressed protein [Arabidopsis thaliana]
  misc_feature (10)..(414): Homolog of NCBI NO: 9279667 NR Description: gene_id:MDJ14.7~similar to unknown
  misc_feature (10)..(414): Homolog of NCBI NO: 21554168 NR Description: putative fructose-2,6-bisphosphatase [Arabidopsis
  misc_feature (10)..(414): Homolog of NCBI NO: 18391446 NR Description: expressed protein [Arabidopsis thaliana]
  misc_feature (10)..(414): Homolog of NCBI NO: 25518294 NR Description: hypothetical protein F13K23.10 [imported] -
IFRVLKRKAMGSSQSSQLLDEEEEEEDEAESEGEEVEEEEDEAESELNNRRIELDNLLVKKVLEQEPEMLPCHASASPLSPQLSSLGTPRIGPSIKVWDPYNVLAPPPPSSPPLFSRISSAAEHDRSAVTEVYFISHGECDLNLRPDLIGGRCHVATLTPNGKRQARALAVFLNSEGVRFTSVFSSPLDRARSMAVSVCQEMNFPEEHLQVSDAVVEMSLGDWESCHRSEIYTPETLSLIERCQPDFSAPSGESLRQVEFRMVQFLNGTVSGLSEKLRSELLPSTQHTNSRGFSLATSIHRPILTRKKSGKSRFQVMNATGDHEGSEEIFSNHNDEQHLGDINIKSSSSQLSTCIGVFTHSLPIKCLLTGILGCSPVMTHKICVEDSSVTVLQHSWKTGWQVKRLNDTAHLRLL

SEQ ID NO: 43667 - protein, 405 aa, Arabidopsis thaliana
  peptide (1)..(405): Ceres Seq. ID no. 13622076
  misc_feature (121)..(278): Pfam Name: Phosphoglycerate mutase family Pfam Description: Phosphoglycerate mutase family
  misc_feature (1)..(320): Homolog of NCBI NO: 17902576 NR Description: putative fructose-2,6-bisphosphatase [Silene
  misc_feature (291)..(405): Homolog of NCBI NO: 17902574 NR Description: putative Fructose-2,6-bisphosphatase [Silene
  misc_feature (1)..(312): Homolog of NCBI NO: 17902574 NR Description: putative Fructose-2,6-bisphosphatase [Silene
  misc_feature (291)..(405): Homolog of NCBI NO: 17902578 NR Description: putative fructose-2,6-bisphosphatase [Silene
  misc_feature (1)..(320): Homolog of NCBI NO: 17902578 NR Description: putative fructose-2,6-bisphosphatase [Silene
  misc_feature (1)..(404): Homolog of NCBI NO: 15231617 NR Description: expressed protein [Arabidopsis thaliana]
  misc_feature (1)..(405): Homolog of NCBI NO: 9279667 NR Description: gene_id:MDJ14.7~similar to unknown
  misc_feature (1)..(405): Homolog of NCBI NO: 21554168 NR Description: putative fructose-2,6-bisphosphatase [Arabidopsis
  misc_feature (1)..(405): Homolog of NCBI NO: 18391446 NR Description: expressed protein [Arabidopsis thaliana]
  misc_feature (1)..(405): Homolog of NCBI NO: 25518294 NR Description: hypothetical protein F13K23.10 [imported] -
MGSSQSSQLLDEEEEEEDEAESEGEEVEEEEDEAESELNNRRIELDNLLVKKVLEQEPEMLPCHASASPLSPQLSSLGTPRIGPSIKVWDPYNVLAPPPPSSPPLFSRISSAAEHDRSAVTEVYFISHGECDLNLRPDLIGGRCHVATLTPNGKRQARALAVFLNSEGVRFTSVFSSPLDRARSMAVSVCQEMNFPEEHLQVSDAVVEMSLGDWESCHRSEIYTPETLSLIERCQPDFSAPSGESLRQVEFRMVQFLNGTVSGLSEKLRSELLPSTQHTNSRGFSLATSIHRPILTRKKSGKSRFQVMNATGDHEGSEEIFSNHNDEQHLGDINIKSSSSQLSTCIGVFTHSLPIKCLLTGILGCSPVMTHKICVEDSSVTVLQHSWKTGWQVKRLNDTAHLRLL

SEQ ID NO: 43668 - protein, 346 aa, Arabidopsis thaliana
  peptide (1)..(346): Ceres Seq. ID no. 13622077
  misc_feature (62)..(219): Pfam Name: Phosphoglycerate mutase family Pfam Description: Phosphoglycerate mutase family
  misc_feature (1)..(261): Homolog of NCBI NO: 17902576 NR Description: putative fructose-2,6-bisphosphatase [Silene
  misc_feature (232)..(346): Homolog of NCBI NO: 17902574 NR Description: putative Fructose-2,6-bisphosphatase [Silene
  misc_feature (1)..(253): Homolog of NCBI NO: 17902574 NR Description: putative Fructose-2,6-bisphosphatase [Silene
  misc_feature (232)..(346): Homolog of NCBI NO: 17902578 NR Description: putative fructose-2,6-bisphosphatase [Silene
  misc_feature (1)..(261): Homolog of NCBI NO: 17902578 NR Description: putative fructose-2,6-bisphosphatase [Silene
  misc_feature (1)..(345): Homolog of NCBI NO: 15231617 NR Description: expressed protein [Arabidopsis thaliana]
  misc_feature (1)..(346): Homolog of NCBI NO: 9279667 NR Description: gene_id:MDJ14.7~similar to unknown
  misc_feature (1)..(346): Homolog of NCBI NO: 21554168 NR Description: putative fructose-2,6-bisphosphatase [Arabidopsis
  misc_feature (1)..(346): Homolog of NCBI NO: 18391446 NR Description: expressed protein [Arabidopsis thaliana]
  misc_feature (1)..(346): Homolog of NCBI NO: 25518294 NR Description: hypothetical protein F13K23.10 [imported] -
MLPCHASASPLSPQLSSLGTPRIGPSIKVWDPYNVLAPPPPSSPPLFSRISSAAEHDRSAVTEVYFISHGECDLNLRPDLIGGRCHVATLTPNGKRQARALAVFLNSEGVRFTSVFSSPLDRARSMAVSVCQEMNFPEEHLQVSDAVVEMSLGDWESCHRSEIYTPETLSLIERCQPDFSAPSGESLRQVEFRMVQFLNGTVSGLSEKLRSELLPSTQHTNSRGFSLATSIHRPILTRKKSGKSRFQVMNATGDHEGSEEIFSNHNDEQHLGDINIKSSSSQLSTCIGVFTHSLPIKCLLTGILGCSPVMTHKICVEDSSVTVLQHSWKTGWQVKRLNDTAHLRLL

SEQ ID NO: 43669 - DNA, 1617 bp, Arabidopsis thaliana
  misc_feature (1)..(1617): Ceres Seq. ID no. 12336300
  misc_feature: MA Experiment ID: 108434 Result: Down-regulated in Transcription
  misc_feature: MA Experiment 108434 PARAMETER Experiment Name: At_Root_Tips_cDNA_P Parameter: Tissue Value: Root Tips
  misc_feature: MA Experiment ID: 108461 Result: Up-regulated in Transcription
  misc_feature: MA Experiment 108461 PARAMETER Experiment Name: At_Germinating_Seeds_cDNA_P Parameter: Age (day) Value: 1 vs. 0
  misc_feature: MA Experiment 108461 PARAMETER Experiment Name: At_Germinating_Seeds_cDNA_P Parameter: Tissue Value: Germinating Seeds
  misc_feature: MA Experiment ID: 108462 Result: Up-regulated in Transcription
  misc_feature: MA Experiment 108462 PARAMETER Experiment Name: At_Germinating_Seeds_cDNA_P Parameter: Age (day) Value: 2 vs. 0
  misc_feature: MA Experiment 108462 PARAMETER Experiment Name: At_Germinating_Seeds_cDNA_P Parameter: Tissue Value: Germinating Seeds
  misc_feature: MA Experiment ID: 108463 Result: Up-regulated in Transcription
  misc_feature: MA Experiment 108463 PARAMETER Experiment Name: At_Germinating_Seeds_cDNA_P Parameter: Age (day) Value: 3 vs. 0
  misc_feature: MA Experiment 108463 PARAMETER Experiment Name: At_Germinating_Seeds_cDNA_P Parameter: Tissue Value: Germinating Seeds
  misc_feature: MA Experiment ID: 108464 Result: Up-regulated in Transcription
  misc_feature: MA Experiment 108464 PARAMETER Experiment Name: At_Germinating_Seeds_cDNA_P Parameter: Age (day) Value: 4 vs. 0
  misc_feature: MA Experiment 108464 PARAMETER Experiment Name: At_Germinating_Seeds_cDNA_P Parameter: Tissue Value: Germinating Seeds
  misc_feature: MA Experiment ID: 108561 Result: Down-regulated in Transcription
  misc_feature: MA Experiment 108561 PARAMETER Experiment Name: At_100uM_ABA_cDNA_P Parameter: Timepoint (hr) Value: 6
  misc_feature: MA Experiment 108561 PARAMETER Experiment Name: At_100uM_ABA_cDNA_P Parameter: Tissue Value: Aerial
  misc_feature: MA Experiment 108561 PARAMETER Experiment Name: At_100uM_ABA_cDNA_P Parameter: Treatment Value: 100uM ABA vs. No Treatment
  misc_feature: MA Experiment ID: 108577 Result: Down-regulated in Transcription
  misc_feature: MA Experiment 108577 PARAMETER Experiment Name: At_42deg_Heat_cDNA_P Parameter: Temperature (deg C) Value: 42 vs. 22
  misc_feature: MA Experiment 108577 PARAMETER Experiment Name: At_42deg_Heat_cDNA_P Parameter: Timepoint (hr) Value: 6
  misc_feature: MA Experiment 108577 PARAMETER Experiment Name: At_42deg_Heat_cDNA_P Parameter: Tissue Value: Aerial
  misc_feature: MA Experiment ID: 108585 Result: Down-regulated in Transcription
  misc_feature: MA Experiment 108585 PARAMETER Experiment Name: At_5mM_NaNP_cDNA_P Parameter: Timepoint (hr) Value: 6
  misc_feature: MA Experiment 108585 PARAMETER Experiment Name: At_5mM_NaNP_cDNA_P Parameter: Tissue Value: Aerial
  misc_feature: MA Experiment 108585 PARAMETER Experiment Name: At_5mM_NaNP_cDNA_P Parameter: Treatment Value: null
  misc_feature: MA Experiment ID: 108595 Result: Down-regulated in Transcription
  misc_feature: MA Experiment 108595 PARAMETER Experiment Name: At_Ler-pi_Ovule_cDNA_P Parameter: Plant Line Value: null
  misc_feature: MA Experiment ID: 108605 Result: Down-regulated in Transcription
  misc_feature: MA Experiment 108605 PARAMETER Experiment Name: At_100uM_ABA_cDNA_P Parameter: Timepoint (hr) Value: 6
  misc_feature: MA Experiment 108605 PARAMETER Experiment Name: At_100uM_ABA_cDNA_P Parameter: Tissue Value: Aerial
  misc_feature: MA Experiment 108605 PARAMETER Experiment Name: At_100uM_ABA_cDNA_P Parameter: Treatment Value: 100uM ABA vs. No Treatment
  misc_feature: MA Experiment ID: 108607 Result: Down-regulated in Transcription
  misc_feature: MA Experiment 108607 PARAMETER Experiment Name: At_100uM_ABA_cDNA_P Parameter: Timepoint (hr) Value: 4
  misc_feature: MA Experiment 108607 PARAMETER Experiment Name: At_100uM_ABA_cDNA_P Parameter: Tissue Value: Aerial
  misc_feature: MA Experiment 108607 PARAMETER Experiment Name: At_100uM_ABA_cDNA_P Parameter: Treatment Value: 100uM ABA vs. No Treatment
  misc_feature: MA Experiment ID: 108668 Result: Down-regulated in Transcription
  misc_feature: MA Experiment 108668 PARAMETER Experiment Name: At_2mM_SA_cDNA_P Parameter: Plant Line Value: WS
  misc_feature: MA Experiment 108668 PARAMETER Experiment Name: At_2mM_SA_cDNA_P Parameter: Timepoint (hr) Value: 6
  misc_feature: MA Experiment 108668 PARAMETER Experiment Name: At_2mM_SA_cDNA_P Parameter: Treatment Value: 2mM SA vs. No Treatment
  misc_feature: MA Experiment ID: 20000069 Result: Down-regulated in Transcription
  misc_feature: MA Experiment 20000069 PARAMETER Experiment Name: At_100uM_ABA_Mutants_cDNA_P Parameter: Plant Line Value: CS23
  misc_feature: MA Experiment 20000069 PARAMETER Experiment Name: At_100uM_ABA_Mutants_cDNA_P Parameter: Timepoint (hr) Value: 6
  misc_feature: MA Experiment 20000069 PARAMETER Experiment Name: At_100uM_ABA_Mutants_cDNA_P Parameter: Tissue Value: Aerial
  misc_feature: MA Experiment 20000069 PARAMETER Experiment Name: At_100uM_ABA_Mutants_cDNA_P Parameter: Treatment Value: 100uM ABA vs. No Treatment
  misc_feature: MA Experiment ID: 20000070 Result: Down-regulated in Transcription
  misc_feature: MA Experiment 20000070 PARAMETER Experiment Name: At_100uM_ABA_Mutants_cDNA_P Parameter: Plant Line Value: CS24
  misc_feature: MA Experiment 20000070 PARAMETER Experiment Name: At_100uM_ABA_Mutants_cDNA_P Parameter: Timepoint (hr) Value: 6
  misc_feature: MA Experiment 20000070 PARAMETER Experiment Name: At_100uM_ABA_Mutants_cDNA_P Parameter: Tissue Value: Aerial
  misc_feature: MA Experiment 20000070 PARAMETER Experiment Name: At_100uM_ABA_Mutants_cDNA_P Parameter: Treatment Value: 100uM ABA vs. No Treatment
  misc_feature: MA Experiment ID: 20000071 Result: Down-regulated in Transcription
  misc_feature: MA Experiment 20000071 PARAMETER Experiment Name: At_100uM_ABA_Mutants_cDNA_P Parameter: Plant Line Value: CS8104
  misc_feature: MA Experiment 20000071 PARAMETER Experiment Name: At_100uM_ABA_Mutants_cDNA_P Parameter: Timepoint (hr) Value: 6
  misc_feature: MA Experiment 20000071 PARAMETER Experiment Name: At_100uM_ABA_Mutants_cDNA_P Parameter: Tissue Value: Aerial
  misc_feature: MA Experiment 20000071 PARAMETER Experiment Name: At_100uM_ABA_Mutants_cDNA_P Parameter: Treatment Value: 100uM ABA vs. No Treatment
  misc_feature: MA Experiment ID: 20000072 Result: Down-regulated in Transcription
  misc_feature: MA Experiment 20000072 PARAMETER Experiment Name: At_100uM_ABA_Mutants_cDNA_P Parameter: Plant Line Value: CS8105
  misc_feature: MA Experiment 20000072 PARAMETER Experiment Name: At_100uM_ABA_Mutants_cDNA_P Parameter: Timepoint (hr) Value: 6
  misc_feature: MA Experiment 20000072 PARAMETER Experiment Name: At_100uM_ABA_Mutants_cDNA_P Parameter: Tissue Value: Aerial
  misc_feature: MA Experiment 20000072 PARAMETER Experiment Name: At_100uM_ABA_Mutants_cDNA_P Parameter: Treatment Value: 100uM ABA vs. No Treatment
  misc_feature: MA Experiment ID: 20000086 Result: Down-regulated in Transcription
  misc_feature: MA Experiment 20000086 PARAMETER Experiment Name: At_100uM_ABA_Mutants_cDNA_P Parameter: Plant Line Value: CS22
  misc_feature: MA Experiment 20000086 PARAMETER Experiment Name: At_100uM_ABA_Mutants_cDNA_P Parameter: Timepoint (hr) Value: 6
  misc_feature: MA Experiment 20000086 PARAMETER Experiment Name: At_100uM_ABA_Mutants_cDNA_P Parameter: Tissue Value: Aerial
  misc_feature: MA Experiment 20000086 PARAMETER Experiment Name: At_100uM_ABA_Mutants_cDNA_P Parameter: Treatment Value: 100uM ABA vs. No Treatment
  misc_feature: MA Experiment ID: 20000087 Result: Down-regulated in Transcription
  misc_feature: MA Experiment 20000087 PARAMETER Experiment Name: At_100uM_ABA_Mutants_cDNA_P Parameter: Plant Line Value: WS
  misc_feature: MA Experiment 20000087 PARAMETER Experiment Name: At_100uM_ABA_Mutants_cDNA_P Parameter: Timepoint (hr) Value: 6
  misc_feature: MA Experiment 20000087 PARAMETER Experiment Name: At_100uM_ABA_Mutants_cDNA_P Parameter: Tissue Value: Aerial
  misc_feature: MA Experiment 20000087 PARAMETER Experiment Name: At_100uM_ABA_Mutants_cDNA_P Parameter: Treatment Value: 100uM ABA vs. No Treatment
  misc_feature: MA Experiment ID: 20000088 Result: Down-regulated in Transcription
  misc_feature: MA Experiment 20000088 PARAMETER Experiment Name: At_100uM_ABA_Mutants_cDNA_P Parameter: Plant Line Value: Landsberg
  misc_feature: MA Experiment 20000088 PARAMETER Experiment Name: At_100uM_ABA_Mutants_cDNA_P Parameter: Timepoint (hr) Value: 6
  misc_feature: MA Experiment 20000088 PARAMETER Experiment Name: At_100uM_ABA_Mutants_cDNA_P Parameter: Tissue Value: Aerial
  misc_feature: MA Experiment 20000088 PARAMETER Experiment Name: At_100uM_ABA_Mutants_cDNA_P Parameter: Treatment Value: 100uM ABA vs. No Treatment
  misc_feature: MA Experiment ID: 20000090 Result: Down-regulated in Transcription
  misc_feature: MA Experiment ID: 20000113 Result: Down-regulated in Transcription
  misc_feature: MA Experiment 20000113 PARAMETER Experiment Name: At_42deg_Heat_cDNA_P Parameter: Temperature (deg C) Value: 42 vs. 22
  misc_feature: MA Experiment 20000113 PARAMETER Experiment Name: At_42deg_Heat_cDNA_P Parameter: Timepoint (hr) Value: 8
  misc_feature: MA Experiment 20000113 PARAMETER Experiment Name: At_42deg_Heat_cDNA_P Parameter: Tissue Value: Aerial
  misc_feature: MA Experiment ID: 20000117 Result: Down-regulated in Transcription
  misc_feature: MA Experiment 20000117 PARAMETER Experiment Name: At_100uM_ABA_Mutants_cDNA_P Parameter: Plant Line Value: Columbia
  misc_feature: MA Experiment 20000117 PARAMETER Experiment Name: At_100uM_ABA_Mutants_cDNA_P Parameter: Timepoint (hr) Value: 6
  misc_feature: MA Experiment 20000117 PARAMETER Experiment Name: At_100uM_ABA_Mutants_cDNA_P Parameter: Tissue Value: Aerial
  misc_feature: MA Experiment 20000117 PARAMETER Experiment Name: At_100uM_ABA_Mutants_cDNA_P Parameter: Treatment Value: 100uM ABA vs. No Treatment
  misc_feature: MA Experiment ID: 20000173 Result: Down-regulated in Transcription
  misc_feature: MA Experiment 20000173 PARAMETER Experiment Name: At_42deg_Heat_P Parameter: Age (day) Value: 14
  misc_feature: MA Experiment 20000173 PARAMETER Experiment Name: At_42deg_Heat_P Parameter: Organism Value: A. thaliana
  misc_feature: MA Experiment 20000173 PARAMETER Experiment Name: At_42deg_Heat_P Parameter: Plant Line Value: WS
  misc_feature: MA Experiment 20000173 PARAMETER Experiment Name: At_42deg_Heat_P Parameter: Temperature (deg C) Value: 42 vs. 22
  misc_feature: MA Experiment 20000173 PARAMETER Experiment Name: At_42deg_Heat_P Parameter: Timepoint (hr) Value: 6
  misc_feature: MA Experiment 20000173 PARAMETER Experiment Name: At_42deg_Heat_P Parameter: Tissue Value: Aerial
  misc_feature: MA Experiment ID: 20000182 Result: Down-regulated in Transcription
  misc_feature: MA Experiment 20000182 PARAMETER Experiment Name: At_2mM_SA_P Parameter: Age (day) Value: 14
  misc_feature: MA Experiment 20000182 PARAMETER Experiment Name: At_2mM_SA_P Parameter: Organism Value: A. thaliana
  misc_feature: MA Experiment 20000182 PARAMETER Experiment Name: At_2mM_SA_P Parameter: Plant Line Value: WS
  misc_feature: MA Experiment 20000182 PARAMETER Experiment Name: At_2mM_SA_P Parameter: Timepoint (hr) Value: 6
  misc_feature: MA Experiment 20000182 PARAMETER Experiment Name: At_2mM_SA_P Parameter: Tissue Value: Aerial
  misc_feature: MA Experiment 20000182 PARAMETER Experiment Name: At_2mM_SA_P Parameter: Treatment Value: 2mM SA vs. No Treatment
  misc_feature: MA Experiment ID: 20000185 Result: Down-regulated in Transcription
  misc_feature: MA Experiment 20000185 PARAMETER Experiment Name: At_Roots__P Parameter: Age (day) Value: 7 vs. 21
  misc_feature: MA Experiment 20000185 PARAMETER Experiment Name: At_Roots__P Parameter: Organism Value: A. thaliana
  misc_feature: MA Experiment 20000185 PARAMETER Experiment Name: At_Roots__P Parameter: Tissue Value: Roots vs. Whole Plant
  misc_feature: MA Experiment ID: 20000224 Result: Up-regulated in Transcription
  misc_feature: MA Experiment ID: 20000234 Result: Up-regulated in Transcription
  misc_feature: MA Experiment 20000234 PARAMETER Experiment Name: At_Siliques_P Parameter: Age (day) Value: 21
  misc_feature: MA Experiment 20000234 PARAMETER Experiment Name: At_Siliques_P Parameter: Organism Value: A. thaliana
  misc_feature: MA Experiment 20000234 PARAMETER Experiment Name: At_Siliques_P Parameter: Plant Line Value: WS
  misc_feature: MA Experiment 20000234 PARAMETER Experiment Name: At_Siliques_P Parameter: Tissue Value: Less Than 5mm Siliques vs. Whole Plant
  misc_feature: MA Experiment ID: 20000235 Result: Up-regulated in Transcription
  misc_feature: MA Experiment 20000235 PARAMETER Experiment Name: At_Siliques_P Parameter: Age (day) Value: 21
  misc_feature: MA Experiment 20000235 PARAMETER Experiment Name: At_Siliques_P Parameter: Organism Value: A. thaliana
  misc_feature: MA Experiment 20000235 PARAMETER Experiment Name: At_Siliques_P Parameter: Plant Line Value: WS
  misc_feature: MA Experiment 20000235 PARAMETER Experiment Name: At_Siliques_P Parameter: Tissue Value: 5-10mm Siliques vs. Whole Plant
  misc_feature: MA Experiment ID: 20000436 Result: Down-regulated in Transcription
  misc_feature: MA Experiment 20000436 PARAMETER Experiment Name: At_Drought_P Parameter: Age (day) Value: 7
  misc_feature: MA Experiment 20000436 PARAMETER Experiment Name: At_Drought_P Parameter: Organism Value: A. thaliana
  misc_feature: MA Experiment 20000436 PARAMETER Experiment Name: At_Drought_P Parameter: Plant Line Value: WS
  misc_feature: MA Experiment 20000436 PARAMETER Experiment Name: At_Drought_P Parameter: Timepoint (hr) Value: 12
  misc_feature: MA Experiment 20000436 PARAMETER Experiment Name: At_Drought_P Parameter: Tissue Value: Whole Plant
  misc_feature: MA Experiment 20000436 PARAMETER Experiment Name: At_Drought_P Parameter: Treatment Value: Drought vs. No Drought
  misc_feature: MA Experiment ID: 20000437 Result: Down-regulated in Transcription
  misc_feature: MA Experiment 20000437 PARAMETER Experiment Name: At_Drought_P Parameter: Age (day) Value: 8
  misc_feature: MA Experiment 20000437 PARAMETER Experiment Name: At_Drought_P Parameter: Organism Value: A. thaliana
  misc_feature: MA Experiment 20000437 PARAMETER Experiment Name: At_Drought_P Parameter: Plant Line Value: WS
  misc_feature: MA Experiment 20000437 PARAMETER Experiment Name: At_Drought_P Parameter: Timepoint (hr) Value: 24
  misc_feature: MA Experiment 20000437 PARAMETER Experiment Name: At_Drought_P Parameter: Tissue Value: Whole Plant
  misc_feature: MA Experiment 20000437 PARAMETER Experiment Name: At_Drought_P Parameter: Treatment Value: Drought vs. No Drought
  misc_feature: MA Experiment ID: 20000439 Result: Down-regulated in Transcription
  misc_feature: MA Experiment 20000439 PARAMETER Experiment Name: At_Roots__P Parameter: Age (day) Value: 14 vs. 21
  misc_feature: MA Experiment 20000439 PARAMETER Experiment Name: At_Roots__P Parameter: Organism Value: A. thaliana
  misc_feature: MA Experiment 20000439 PARAMETER Experiment Name: At_Roots__P Parameter: Tissue Value: Roots vs. Whole Plant
  misc_feature: MA Experiment ID: 20000527 Result: Up-regulated in Transcription
  misc_feature: MA Experiment 20000527 PARAMETER Experiment Name: At_10percent_PEG_P Parameter: Age (day) Value: 20
  misc_feature: MA Experiment 20000527 PARAMETER Experiment Name: At_10percent_PEG_P Parameter: Organism Value: A. thaliana
  misc_feature: MA Experiment 20000527 PARAMETER Experiment Name: At_10percent_PEG_P Parameter: Plant Line Value: WS
  misc_feature: MA Experiment 20000527 PARAMETER Experiment Name: At_10percent_PEG_P Parameter: Timepoint (day) Value: 20
  misc_feature: MA Experiment 20000527 PARAMETER Experiment Name: At_10percent_PEG_P Parameter: Tissue Value: Whole Plant
  misc_feature: MA Experiment 20000527 PARAMETER Experiment Name: At_10percent_PEG_P Parameter: Treatment Value: 10percent PEG vs. No Treatment
  misc_feature: MA Experiment ID: 20001247 Result: Down-regulated in Transcription
  misc_feature: MA Experiment 20001247 PARAMETER Experiment Name: At_Far-red-induction_P Parameter: Age (day) Value: 7
  misc_feature: MA Experiment 20001247 PARAMETER Experiment Name: At_Far-red-induction_P Parameter: Light Value: Far-red vs. White
  misc_feature: MA Experiment 20001247 PARAMETER Experiment Name: At_Far-red-induction_P Parameter: Organism Value: A. thaliana
  misc_feature: MA Experiment 20001247 PARAMETER Experiment Name: At_Far-red-induction_P Parameter: Plant Line Value: Columbia
  misc_feature: MA Experiment 20001247 PARAMETER Experiment Name: At_Far-red-induction_P Parameter: Timepoint (hr) Value: 1
  misc_feature: MA Experiment 20001247 PARAMETER Experiment Name: At_Far-red-induction_P Parameter: Tissue Value: Whole Plant
  misc_feature: MA Experiment ID: 20001248 Result: Down-regulated in Transcription
  misc_feature: MA Experiment 20001248 PARAMETER Experiment Name: At_Far-red-induction_P Parameter: Age (day) Value: 7
  misc_feature: MA Experiment 20001248 PARAMETER Experiment Name: At_Far-red-induction_P Parameter: Light Value: Far-red vs. White
  misc_feature: MA Experiment 20001248 PARAMETER Experiment Name: At_Far-red-induction_P Parameter: Organism Value: A. thaliana
  misc_feature: MA Experiment 20001248 PARAMETER Experiment Name: At_Far-red-induction_P Parameter: Plant Line Value: Columbia
  misc_feature: MA Experiment 20001248 PARAMETER Experiment Name: At_Far-red-induction_P Parameter: Timepoint (hr) Value: 4
  misc_feature: MA Experiment 20001248 PARAMETER Experiment Name: At_Far-red-induction_P Parameter: Tissue Value: Whole Plant
  misc_feature: MA Experiment ID: 20001450 Result: Down-regulated in Transcription
  misc_feature: MA Experiment 20001450 PARAMETER Experiment Name: At_Far-red-induction_P Parameter: Age (day) Value: 7
  misc_feature: MA Experiment 20001450 PARAMETER Experiment Name: At_Far-red-induction_P Parameter: Light Value: Far-red vs. White
  misc_feature: MA Experiment 20001450 PARAMETER Experiment Name: At_Far-red-induction_P Parameter: Organism Value: A. thaliana
  misc_feature: MA Experiment 20001450 PARAMETER Experiment Name: At_Far-red-induction_P Parameter: Plant Line Value: Columbia
  misc_feature: MA Experiment 20001450 PARAMETER Experiment Name: At_Far-red-induction_P Parameter: Timepoint (hr) Value: 8
  misc_feature: MA Experiment 20001450 PARAMETER Experiment Name: At_Far-red-induction_P Parameter: Tissue Value: Whole Plant
  misc_feature: MA Experiment ID: 20001557 Result: Down-regulated in Transcription
  misc_feature: MA Experiment 20001557 PARAMETER Experiment Name: At_Drought_Soil_Dry_P Parameter: Age (day) Value: 27
  misc_feature: MA Experiment 20001557 PARAMETER Experiment Name: At_Drought_Soil_Dry_P Parameter: Organism Value: A. thaliana
  misc_feature: MA Experiment 20001557 PARAMETER Experiment Name: At_Drought_Soil_Dry_P Parameter: Plant Line Value: WS
  misc_feature: MA Experiment 20001557 PARAMETER Experiment Name: At_Drought_Soil_Dry_P Parameter: Post Timepoint (hr) Value: 3
  misc_feature: MA Experiment 20001557 PARAMETER Experiment Name: At_Drought_Soil_Dry_P Parameter: Post-Treatment Value: Re-Water vs. No Drought
  misc_feature: MA Experiment 20001557 PARAMETER Experiment Name: At_Drought_Soil_Dry_P Parameter: Timepoint (day) Value: 13
  misc_feature: MA Experiment 20001557 PARAMETER Experiment Name: At_Drought_Soil_Dry_P Parameter: Treatment Value: Drought vs. No Drought
  misc_feature: MA Experiment ID: 20001757 Result: Up-regulated in Transcription
  misc_feature: MA Experiment 20001757 PARAMETER Experiment Name: At_50mM_NH4NO3_L-to-H_P Parameter: Timepoint (hr) Value: 6
  misc_feature: MA Experiment 20001757 PARAMETER Experiment Name: At_50mM_NH4NO3_L-to-H_P Parameter: Tissue Value: Leaf
  misc_feature: MA Experiment 20001757 PARAMETER Experiment Name: At_50mM_NH4NO3_L-to-H_P Parameter: Treatment Value: 50mM NH4NO3 vs 100mM Mannitol
  misc_feature: MA Experiment ID: 20001904 Result: Down-regulated in Transcription
  misc_feature: MA Experiment 20001904 PARAMETER Experiment Name: At_Drought_Reproduction_P Parameter: Age (day) Value: 37
  misc_feature: MA Experiment 20001904 PARAMETER Experiment Name: At_Drought_Reproduction_P Parameter: Organism Value: A. thaliana
  misc_feature: MA Experiment 20001904 PARAMETER Experiment Name: At_Drought_Reproduction_P Parameter: Plant Line Value: WS
  misc_feature: MA Experiment 20001904 PARAMETER Experiment Name: At_Drought_Reproduction_P Parameter: Timepoint (day) Value: 7
  misc_feature: MA Experiment 20001904 PARAMETER Experiment Name: At_Drought_Reproduction_P Parameter: Tissue Value: Rosettes
  misc_feature: MA Experiment 20001904 PARAMETER Experiment Name: At_Drought_Reproduction_P Parameter: Treatment Value: Drought vs. No Drought
  misc_feature: MA Experiment ID: 20001906 Result: Down-regulated in Transcription
  misc_feature: MA Experiment 20001906 PARAMETER Experiment Name: At_Drought_Reproduction_P Parameter: Age (day) Value: 35
  misc_feature: MA Experiment 20001906 PARAMETER Experiment Name: At_Drought_Reproduction_P Parameter: Organism Value: A. thaliana
  misc_feature: MA Experiment 20001906 PARAMETER Experiment Name: At_Drought_Reproduction_P Parameter: Plant Line Value: WS
  misc_feature: MA Experiment 20001906 PARAMETER Experiment Name: At_Drought_Reproduction_P Parameter: Timepoint (day) Value: 5
  misc_feature: MA Experiment 20001906 PARAMETER Experiment Name: At_Drought_Reproduction_P Parameter: Tissue Value: Siliques
  misc_feature: MA Experiment 20001906 PARAMETER Experiment Name: At_Drought_Reproduction_P Parameter: Treatment Value: Drought vs. No Drought
  misc_feature: MA Experiment ID: 20001908 Result: Down-regulated in Transcription
  misc_feature: MA Experiment 20001908 PARAMETER Experiment Name: At_Drought_Reproduction_P Parameter: Age (day) Value: 40
  misc_feature: MA Experiment 20001908 PARAMETER Experiment Name: At_Drought_Reproduction_P Parameter: Organism Value: A. thaliana
  misc_feature: MA Experiment 20001908 PARAMETER Experiment Name: At_Drought_Reproduction_P Parameter: Plant Line Value: WS
  misc_feature: MA Experiment 20001908 PARAMETER Experiment Name: At_Drought_Reproduction_P Parameter: Timepoint (day) Value: 10
  misc_feature: MA Experiment 20001908 PARAMETER Experiment Name: At_Drought_Reproduction_P Parameter: Tissue Value: Siliques
  misc_feature: MA Experiment 20001908 PARAMETER Experiment Name: At_Drought_Reproduction_P Parameter: Treatment Value: Drought vs. No Drought
aaactgaaagttaggacctttcatttccaatctctaaacccatttctctacgattagagaagctgacatcaaaattgaaacttgggaatttttagatttgttcttcttctatggcaactgaagacgatggtgaattgtcagctcgttaccagaacacgttggatgcattgtcgtctttgatcacaaaacgtggccgtttagctagtaacaaccaatctcaccgattccgtttgctctttcattatctcaaggttcttgagcttgaagatgcagtttcacaaatgaaaatcattcatgtggccggaactaaaggaaagggatcaacatgtacatttgcggagtctattcttcgttgttacggtcttcgaactggtctcttcacatctcctcacttaatcgatgtccgagagagattccgtcttaacggcattgagataagccaggagaaatttgtgaactacttttggtgttcctttcataagctcaaggagaaaaccagcaatgaggttgatgttgttatactagaagttggcttaggtgggagattcgatgcgactaatgtgattcagaaacctgtcgtctgtggtatttcttctctagggtatgaccatatggagattcttggatacacacttgctgaaattgctgcagagaaagccggtatcttcaagagtggagttcctgcttttacagtggctcaacctgatgaagcaatgcgtgtactcaatgaaaaagcttcaaaattggaggtgaatcttcaggtggtggaaccgttggactcaagccagagactcgggcttcaaggcgaacatcaatatctaaacgctggtcttgctgttgcgttgtgctctacatttcttaaagagattggtattgaggacaagaatggtttggatcagacaaacggtttacccgaaaaattcatctctggattgtcaaatgcttatttgatgggacgagctatgatagtgcctgattcagaactccctgaagagattgtgtattaccttgatggagctcatagtcctgaaagcatggaagcttgcgctatatggttttcaaaacagatcaaacaaaaccaagaaagaaaccagaaaagatcagagcagatactcttgttcaattgtatgtctgttcgtgacccgagtttgcttcttccgcgattaaggagtaaatgcattgatcaaggagttgatttcaagagagccgtttttgtgccaaacgtatcagtgtacaaccaagtgggatcttcgacaaacgttggcacacgtgtcgagtcgatgtcgtggcagttcggtcttcagaggatttgggagagtttagctcgaggtgaagcaaaatctaattcaaaaagtgattctaaaggcaaagaagaagagaagagtttcgttttctcgtcacttcctgtggctgttgactggctccgggacaatgctcgccaaagtaaacaagttcgttttcaggtgttggtaactggttcattacatttggtgggtgatctcttgagatttatcaagaaatgaatatgtttctgccatgtattcttggccaatctttgcctgtaatgactatatatctcacaacatgatttaacaaaagaaaagaaaagatatttcg

SEQ ID NO: 43670 - protein, 470 aa, Arabidopsis thaliana
  peptide (1)..(470): Ceres Seq. ID no. 12336301
  misc_feature (296)..(381): Pfam Name: Mur ligase family, glutamate ligase domain Pfam Description: Mur ligase family, glutamate ligase domain
  misc_feature (332)..(470): Homolog of NCBI NO: 30681208 NR Description: folylpolyglutamate synthase (fpgs2) [Arabidopsis
  misc_feature (130)..(324): Homolog of NCBI NO: 30681208 NR Description: folylpolyglutamate synthase (fpgs2) [Arabidopsis
  misc_feature (1)..(133): Homolog of NCBI NO: 11358877 NR Description: tetrahydrofolylpolyglutamate synthase-like
  misc_feature (118)..(452): Homolog of NCBI NO: 11358877 NR Description: tetrahydrofolylpolyglutamate synthase-like
  misc_feature (1)..(133): Homolog of NCBI NO: 30694286 NR Description: folylpolyglutamate-dihydrofolate synthase
  misc_feature (118)..(470): Homolog of NCBI NO: 30694286 NR Description: folylpolyglutamate-dihydrofolate synthase
  misc_feature (1)..(133): Homolog of NCBI NO: 30694288 NR Description: folylpolyglutamate-dihydrofolate synthase
  misc_feature (118)..(470): Homolog of NCBI NO: 30694288 NR Description: folylpolyglutamate-dihydrofolate synthase
  misc_feature (1)..(470): Homolog of NCBI NO: 30694284 NR Description: folylpolyglutamate-dihydrofolate synthase
  misc_feature (1)..(470): Homolog of NCBI NO: 21592378 NR Description: tetrahydrofolylpolyglutamate synthase
MATEDDGELSARYQNTLDALSSLITKRGRLASNNQSHRFRLLFHYLKVLELEDAVSQMKIIHVAGTKGKGSTCTFAESILRCYGLRTGLFTSPHLIDVRERFRLNGIEISQEKFVNYFWCSFHKLKEKTSNEVDVVILEVGLGGRFDATNVIQKPVVCGISSLGYDHMEILGYTLAEIAAEKAGIFKSGVPAFTVAQPDEAMRVLNEKASKLEVNLQVVEPLDSSQRLGLQGEHQYLNAGLAVALCSTFLKEIGIEDKNGLDQTNGLPEKFISGLSNAYLMGRAMIVPDSELPEEIVYYLDGAHSPESMEACAIWFSKQIKQNQERNQKRSEQILLFNCMSVRDPSLLLPRLRSKCIDQGVDFKRAVFVPNVSVYNQVGSSTNVGTRVESMSWQFGLQRIWESLARGEAKSNSKSDSKGKEEEKSFVFSSLPVAVDWLRDNARQSKQVRFQVLVTGSLHLVGDLLRFIKK

SEQ ID NO: 43671 - protein, 413 aa, Arabidopsis thaliana
  peptide (1)..(413): Ceres Seq. ID no. 12336302
  misc_feature (239)..(324): Pfam Name: Mur ligase family, glutamate ligase domain Pfam Description: Mur ligase family, glutamate ligase domain
  misc_feature (275)..(413): Homolog of NCBI NO: 30681208 NR Description: folylpolyglutamate synthase (fpgs2) [Arabidopsis
  misc_feature (73)..(267): Homolog of NCBI NO: 30681208 NR Description: folylpolyglutamate synthase (fpgs2) [Arabidopsis
  misc_feature (1)..(76): Homolog of NCBI NO: 11358877 NR Description: tetrahydrofolylpolyglutamate synthase-like
  misc_feature (61)..(395): Homolog of NCBI NO: 11358877 NR Description: tetrahydrofolylpolyglutamate synthase-like
  misc_feature (1)..(76): Homolog of NCBI NO: 30694286 NR Description: folylpolyglutamate-dihydrofolate synthase
  misc_feature (61)..(413): Homolog of NCBI NO: 30694286 NR Description: folylpolyglutamate-dihydrofolate synthase
  misc_feature (1)..(76): Homolog of NCBI NO: 30694288 NR Description: folylpolyglutamate-dihydrofolate synthase
  misc_feature (61)..(413): Homolog of NCBI NO: 30694288 NR Description: folylpolyglutamate-dihydrofolate synthase
  misc_feature (1)..(413): Homolog of NCBI NO: 30694284 NR Description: folylpolyglutamate-dihydrofolate synthase
  misc_feature (1)..(413): Homolog of NCBI NO: 21592378 NR Description: tetrahydrofolylpolyglutamate synthase
MKIIHVAGTKGKGSTCTFAESILRCYGLRTGLFTSPHLIDVRERFRLNGIEISQEKFVNYFWCSFHKLKEKTSNEVDVVILEVGLGGRFDATNVIQKPVVCGISSLGYDHMEILGYTLAEIAAEKAGIFKSGVPAFTVAQPDEAMRVLNEKASKLEVNLQVVEPLDSSQRLGLQGEHQYLNAGLAVALCSTFLKEIGIEDKNGLDQTNGLPEKFISGLSNAYLMGRAMIVPDSELPEEIVYYLDGAHSPESMEACAIWFSKQIKQNQERNQKRSEQILLFNCMSVRDPSLLLPRLRSKCIDQGVDFKRAVFVPNVSVYNQVGSSTNVGTRVESMSWQFGLQRIWESLARGEAKSNSKSDSKGKEEEKSFVFSSLPVAVDWLRDNARQSKQVRFQVLVTGSLHLVGDLLRFIKK

SEQ ID NO: 43672 - protein, 303 aa, Arabidopsis thaliana
  peptide (1)..(303): Ceres Seq. ID no. 12336303
  misc_feature (129)..(214): Pfam Name: Mur ligase family, glutamate ligase domain Pfam Description: Mur ligase family, glutamate ligase domain
  misc_feature (1)..(286): Homolog of NCBI NO: 10177571 NR Description: tetrahydrofolylpolyglutamate synthase-like
  misc_feature (165)..(303): Homolog of NCBI NO: 17976705 NR Description: dihydrofolate synthetase /folylpolyglutamate
  misc_feature (1)..(157): Homolog of NCBI NO: 17976705 NR Description: dihydrofolate synthetase /folylpolyglutamate
  misc_feature (165)..(303): Homolog of NCBI NO: 30681208 NR Description: folylpolyglutamate synthase (fpgs2) [Arabidopsis
  misc_feature (1)..(157): Homolog of NCBI NO: 30681208 NR Description: folylpolyglutamate synthase (fpgs2) [Arabidopsis
  misc_feature (1)..(285): Homolog of NCBI NO: 11358877 NR Description: tetrahydrofolylpolyglutamate synthase-like
  misc_feature (1)..(303): Homolog of NCBI NO: 30694286 NR Description: folylpolyglutamate-dihydrofolate synthase
  misc_feature (1)..(303): Homolog of NCBI NO: 30694288 NR Description: folylpolyglutamate-dihydrofolate synthase
  misc_feature (1)..(303): Homolog of NCBI NO: 30694284 NR Description: folylpolyglutamate-dihydrofolate synthase
  misc_feature (1)..(303): Homolog of NCBI NO: 21592378 NR Description: tetrahydrofolylpolyglutamate synthase
MEILGYTLAEIAAEKAGIFKSGVPAFTVAQPDEAMRVLNEKASKLEVNLQVVEPLDSSQRLGLQGEHQYLNAGLAVALCSTFLKEIGIEDKNGLDQTNGLPEKFISGLSNAYLMGRAMIVPDSELPEEIVYYLDGAHSPESMEACAIWFSKQIKQNQERNQKRSEQILLFNCMSVRDPSLLLPRLRSKCIDQGVDFKRAVFVPNVSVYNQVGSSTNVGTRVESMSWQFGLQRIWESLARGEAKSNSKSDSKGKEEEKSFVFSSLPVAVDWLRDNARQSKQVRFQVLVTGSLHLVGDLLRFIKK

SEQ ID NO: 43673 - DNA, 1004 bp, Arabidopsis thaliana
  misc_feature (1)..(1004): Ceres Seq. ID no. 12336304
  misc_feature: MA Experiment ID: 108434 Result: Down-regulated in Transcription
  misc_feature: MA Experiment 108434 PARAMETER Experiment Name: At_Root_Tips_cDNA_P Parameter: Tissue Value: Root Tips
  misc_feature: MA Experiment ID: 20000234 Result: Up-regulated in Transcription
  misc_feature: MA Experiment 20000234 PARAMETER Experiment Name: At_Siliques_P Parameter: Age (day) Value: 21
  misc_feature: MA Experiment 20000234 PARAMETER Experiment Name: At_Siliques_P Parameter: Organism Value: A. thaliana
  misc_feature: MA Experiment 20000234 PARAMETER Experiment Name: At_Siliques_P Parameter: Plant Line Value: WS
  misc_feature: MA Experiment 20000234 PARAMETER Experiment Name: At_Siliques_P Parameter: Tissue Value: Less Than 5mm Siliques vs. Whole Plant
  misc_feature: MA Experiment ID: 20000235 Result: Up-regulated in Transcription
  misc_feature: MA Experiment 20000235 PARAMETER Experiment Name: At_Siliques_P Parameter: Age (day) Value: 21
  misc_feature: MA Experiment 20000235 PARAMETER Experiment Name: At_Siliques_P Parameter: Organism Value: A. thaliana
  misc_feature: MA Experiment 20000235 PARAMETER Experiment Name: At_Siliques_P Parameter: Plant Line Value: WS
  misc_feature: MA Experiment 20000235 PARAMETER Experiment Name: At_Siliques_P Parameter: Tissue Value: 5-10mm Siliques vs. Whole Plant
aaagaccaaaagaaaaaaaaatctttttcttttctgatgaatcgtatctattagctatgagcctgaggtgatgatcatgtcaacataaccatcaacgttctaccatggctagtcctagcaacaaaggcaaaggcatagcagaaggatcgtctcaaccgcaatcgcaaccgcaaccacaaccacaccaactgcaatcacctcctaacccgccagcgttaagccggtacgagtcacagaaacgacgagactggaacacgttttgtcaatacctgcgtaaccaacagccaccggttcacatctcgcagtgtggatcaaaccacatcctcgatttcctccaatatctcgaccagtttgggaagacaaaggttcatatccatggatgcgttttcttcggacaggttgagccagcgggacagtgtaactgtcctttaaaacaagcgtgggggagtttagatgctttgatcggacggctaagagcggctttcgaggagaacggaggattgccggagagaaacccttttgccggcggcggaattagggtttttctgagggaagtgagagattcacaggcgaaggcaagaggagttccgtacaagaaaagaaaaaagaggaagaagaggaatcctatgaagagtcatgatggtgaagatggtactacgggaactagtagtagctccaacttggcttcttagcggaagcaaacaaaaaatctataataaaacaaaagtggaattagttaatggtaagcatttaatactctccataatctctattaattttcagtactttaatcctattttgtgatctatttacaattttacatatagagtgaaaagaaacaattctacatttgtttcttgatagtcagctcttaatgcatagttgaattttatacgtatcatacccaaactataagattaatcttgatcttagatcatatacatatatcatcatggtgtgtaccctaagtttcataatcatttttcttaactatttatgtggat

SEQ ID NO: 43674 - protein, 195 aa, Arabidopsis thaliana
  peptide (1)..(195): Ceres Seq. ID no. 12336305
  misc_feature (22)..(154): Pfam Name: Protein of unknown function (DUF640) Pfam Description: Protein of unknown function (DUF640)
  misc_feature (39)..(188): Homolog of NCBI NO: 15237680 NR Description: putative protein; protein id: At5g58500.1
  misc_feature (4)..(181): Homolog of NCBI NO: 38344650 NR Description: OSJNBb0072M01.12 [Oryza sativa (japonica
  misc_feature (21)..(172): Homolog of NCBI NO: 15241821 NR Description: putative protein; protein id: At5g28490.1
  misc_feature (14)..(170): Homolog of NCBI NO: 18390725 NR Description: expressed protein
  misc_feature (15)..(173): Homolog of NCBI NO: 15233942 NR Description: putative protein; protein id: At4g18610.1
  misc_feature (4)..(195): Homolog of NCBI NO: 34907938 NR Description: B1088C09.17 [Oryza sativa (japonica
  misc_feature (35)..(168): Homolog of NCBI NO: 15219952 NR Description: hypothetical protein; protein id: At1g16910.1
  misc_feature (1)..(191): Homolog of NCBI NO: 18406012 NR Description: expressed protein
  misc_feature (1)..(195): Homolog of NCBI NO: 18412120 NR Description: Expressed protein
  misc_feature (1)..(195): Homolog of NCBI NO: 21592379 NR Description: unknown [Arabidopsis thaliana]
MASPSNKGKGIAEGSSQPQSQPQPQPHQLQSPPNPPALSRYESQKRRDWNTFCQYLRNQQPPVHISQCGSNHILDFLQYLDQFGKTKVHIHGCVFFGQVEPAGQCNCPLKQAWGSLDALIGRLRAAFEENGGLPERNPFAGGGIRVFLREVRDSQAKARGVPYKKRKKRKKRNPMKSHDGEDGTTGTSSSSNLAS

SEQ ID NO: 43675 - DNA, 1292 bp, Arabidopsis thaliana
  misc_feature (1)..(1292): Ceres Seq. ID no. 12395382
  misc_feature: MA Experiment ID: 20000179 Result: Up-regulated in Transcription
  misc_feature: MA Experiment 20000179 PARAMETER Experiment Name: At_Germinating_Seeds_P Parameter: Age (hr) Value: 6 vs. 0
  misc_feature: MA Experiment 20000179 PARAMETER Experiment Name: At_Germinating_Seeds_P Parameter: Tissue Value: Germinating Seeds
  misc_feature: MA Experiment ID: 20000224 Result: Down-regulated in Transcription
  misc_feature: MA Experiment ID: 20001248 Result: Up-regulated in Transcription
  misc_feature: MA Experiment 20001248 PARAMETER Experiment Name: At_Far-red-induction_P Parameter: Age (day) Value: 7
  misc_feature: MA Experiment 20001248 PARAMETER Experiment Name: At_Far-red-induction_P Parameter: Light Value: Far-red vs. White
  misc_feature: MA Experiment 20001248 PARAMETER Experiment Name: At_Far-red-induction_P Parameter: Organism Value: A. thaliana
  misc_feature: MA Experiment 20001248 PARAMETER Experiment Name: At_Far-red-induction_P Parameter: Plant Line Value: Columbia
  misc_feature: MA Experiment 20001248 PARAMETER Experiment Name: At_Far-red-induction_P Parameter: Timepoint (hr) Value: 4
  misc_feature: MA Experiment 20001248 PARAMETER Experiment Name: At_Far-red-induction_P Parameter: Tissue Value: Whole Plant
tgtattaggtttgacacctttcggaaaaatggaagatgtaaacggttccgatcgattctccttcgagatcaaacagccctacgttgaagaacggttggaaaataggaaacgggaagaagcagctgtagatgcggtgagtttcgtggcggagactgaaaatgggaagaaggaggtcaattttgtgccgaagaagcttctaattgtggtcacaccaacgtataatagagcgatgcaggcgtattacttgaacagggttgctcaaacgctgagactagttgagtcgcctgtgctgtggatagtggtggagggtaacgtggcgtcgtttgaaacctcagagattctgaggaagacgggagtgatgtacaggcacttggtttgcaagaggaacatgacgagtatcaaggatagaggagtgcatcagagaaacactgcattggaacatattgagttgcataagcttgatggaattgtctactttgctgatgatgacaatatctactcgcttgagctctttcaaagcttgagacaaatcagccgatttgggacttggcctgttgctatgctcgcacaaagcaaaaacaaggccatccttgaaggtccagtatgcaatggaagtcaagtaataggatggcacactaatgaaaagagtaaaagactaaggaggttccatgttgatatgtcgggatttgcttttaacagcactatactctgggaccctaaaaggtggcgacgtcccttttcacatccaacccgccaactagacacagtgaaggagggtttccaggagacatcatttatagagcaggtggtggctgatgaaagcgagatggaaggtgttccaccagcttgctcgagtatactgaactggcatcttcacttggatgccctggatgtcccttatccacaagggtgggcgatccaaaagaatctgcaggctctcataactatgaaatagtttgaagatagttttgactggtttctacttaccccatgtgctgtgctcattactggatatatatcaaagaagcatatgaagaatggaagaagacgagcgagggtagtttaggatagtgatgaggcacgcattttggataaacgttgctggaatcgtgagcctcccctgaatgcaagagttgcttggaattaaattgaaggccttggtgttttagtatgagatggaattatattaccttcggacattgatgattccacagcattgtattcgcctatggctaaccaaattcttcttgttcctttttttttttttgcaatgaagaaaaaaattcaccgcc

SEQ ID NO: 43676 - protein, 317 aa, Arabidopsis thaliana
  peptide (1)..(317): Ceres Seq. ID no. 12395383
  misc_feature (85)..(302): Pfam Name: Glycosyltransferase family 43 Pfam Description: Glycosyltransferase family 43
  misc_feature (43)..(313): Homolog of NCBI NO: 32968189 NR Description: beta3-glucuronyltransferase [Triticum aestivum]
  misc_feature (43)..(314): Homolog of NCBI NO: 34911082 NR Description: P0485G01.28 [Oryza sativa (japonica
  misc_feature (64)..(317): Homolog of NCBI NO: 38344768 NR Description: OSJNBa0068L06.11 [Oryza sativa (japonica
  misc_feature (64)..(317): Homolog of NCBI NO: 32968176 NR Description: beta3-glucuronyltransferase [Hordeum vulgare]
  misc_feature (57)..(311): Homolog of NCBI NO: 32879545 NR Description: beta3-glucuronyltransferase [Zea mays]
  misc_feature (63)..(317): Homolog of NCBI NO: 37532274 NR Description: putative glycosyltransferase
  misc_feature (59)..(315): Homolog of NCBI NO: 32968172 NR Description: beta3-glucuronyltransferase [Lycopersicon
  misc_feature (1)..(261): Homolog of NCBI NO: 6693039 NR Description: T22C5.4 [Arabidopsis thaliana]
  misc_feature (10)..(317): Homolog of NCBI NO: 18396409 NR Description: expressed protein
  misc_feature (1)..(301): Homolog of NCBI NO: 5668771 NR Description: Contains similarity to gb|D88035 glycoprotein
VLGLTPFGKMEDVNGSDRFSFEIKQPYVEERLENRKREEAAVDAVSFVAETENGKKEVNFVPKKLLIVVTPTYNRAMQAYYLNRVAQTLRLVESPVLWIVVEGNVASFETSEILRKTGVMYRHLVCKRNMTSIKDRGVHQRNTALEHIELHKLDGIVYFADDDNIYSLELFQSLRQISRFGTWPVAMLAQSKNKAILEGPVCNGSQVIGWHTNEKSKRLRRFHVDMSGFAFNSTILWDPKRWRRPFSHPTRQLDTVKEGFQETSFIEQVVADESEMEGVPPACSSILNWHLHLDALDVPYPQGWAIQKNLQALITMK

SEQ ID NO: 43677 - protein, 308 aa, Arabidopsis thaliana
  peptide (1)..(308): Ceres Seq. ID no. 12395384
  misc_feature (76)..(293): Pfam Name: Glycosyltransferase family 43 Pfam Description: Glycosyltransferase family 43
  misc_feature (34)..(304): Homolog of NCBI NO: 32968189 NR Description: beta3-glucuronyltransferase [Triticum aestivum]
  misc_feature (34)..(305): Homolog of NCBI NO: 34911082 NR Description: P0485G01.28 [Oryza sativa (japonica
  misc_feature (55)..(308): Homolog of NCBI NO: 38344768 NR Description: OSJNBa0068L06.11 [Oryza sativa (japonica
  misc_feature (55)..(308): Homolog of NCBI NO: 32968176 NR Description: beta3-glucuronyltransferase [Hordeum vulgare]
  misc_feature (48)..(302): Homolog of NCBI NO: 32879545 NR Description: beta3-glucuronyltransferase [Zea mays]
  misc_feature (54)..(308): Homolog of NCBI NO: 37532274 NR Description: putative glycosyltransferase
  misc_feature (50)..(306): Homolog of NCBI NO: 32968172 NR Description: beta3-glucuronyltransferase [Lycopersicon
  misc_feature (1)..(252): Homolog of NCBI NO: 6693039 NR Description: T22C5.4 [Arabidopsis thaliana]
  misc_feature (1)..(308): Homolog of NCBI NO: 18396409 NR Description: expressed protein
  misc_feature (1)..(292): Homolog of NCBI NO: 5668771 NR Description: Contains similarity to gb|D88035 glycoprotein
MEDVNGSDRFSFEIKQPYVEERLENRKREEAAVDAVSFVAETENGKKEVNFVPKKLLIVVTPTYNRAMQAYYLNRVAQTLRLVESPVLWIVVEGNVASFETSEILRKTGVMYRHLVCKRNMTSIKDRGVHQRNTALEHIELHKLDGIVYFADDDNIYSLELFQSLRQISRFGTWPVAMLAQSKNKAILEGPVCNGSQVIGWHTNEKSKRLRRFHVDMSGFAFNSTILWDPKRWRRPFSHPTRQLDTVKEGFQETSFIEQVVADESEMEGVPPACSSILNWHLHLDALDVPYPQGWAIQKNLQALITMK

SEQ ID NO: 43678 - protein, 241 aa, Arabidopsis thaliana
  peptide (1)..(241): Ceres Seq. ID no. 12395385
  misc_feature (9)..(226): Pfam Name: Glycosyltransferase family 43 Pfam Description: Glycosyltransferase family 43
  misc_feature (1)..(237): Homolog of NCBI NO: 32968189 NR Description: beta3-glucuronyltransferase [Triticum aestivum]
  misc_feature (1)..(238): Homolog of NCBI NO: 34911082 NR Description: P0485G01.28 [Oryza sativa (japonica
  misc_feature (1)..(241): Homolog of NCBI NO: 38344768 NR Description: OSJNBa0068L06.11 [Oryza sativa (japonica
  misc_feature (1)..(241): Homolog of NCBI NO: 32968176 NR Description: beta3-glucuronyltransferase [Hordeum vulgare]
  misc_feature (1)..(235): Homolog of NCBI NO: 32879545 NR Description: beta3-glucuronyltransferase [Zea mays]
  misc_feature (1)..(241): Homolog of NCBI NO: 37532274 NR Description: putative glycosyltransferase
  misc_feature (1)..(239): Homolog of NCBI NO: 32968172 NR Description: beta3-glucuronyltransferase [Lycopersicon
  misc_feature (1)..(185): Homolog of NCBI NO: 6693039 NR Description: T22C5.4 [Arabidopsis thaliana]
  misc_feature (1)..(241): Homolog of NCBI NO: 18396409 NR Description: expressed protein
  misc_feature (1)..(225): Homolog of NCBI NO: 5668771 NR Description: Contains similarity to gb|D88035 glycoprotein
MQAYYLNRVAQTLRLVESPVLWIVVEGNVASFETSEILRKTGVMYRHLVCKRNMTSIKDRGVHQRNTALEHIELHKLDGIVYFADDDNIYSLELFQSLRQISRFGTWPVAMLAQSKNKAILEGPVCNGSQVIGWHTNEKSKRLRRFHVDMSGFAFNSTILWDPKRWRRPFSHPTRQLDTVKEGFQETSFIEQVVADESEMEGVPPACSSILNWHLHLDALDVPYPQGWAIQKNLQALITMK

SEQ ID NO: 43679 - DNA, 2821 bp, Arabidopsis thaliana
  misc_feature (1)..(2821): Ceres Seq. ID no. 13580519
  misc_feature: MA Experiment ID: 20000171 Result: Down-regulated in Transcription
  misc_feature: MA Experiment 20000171 PARAMETER Experiment Name: At_42deg_Heat_P Parameter: Age (day) Value: 14
  misc_feature: MA Experiment 20000171 PARAMETER Experiment Name: At_42deg_Heat_P Parameter: Organism Value: A. thaliana
  misc_feature: MA Experiment 20000171 PARAMETER Experiment Name: At_42deg_Heat_P Parameter: Plant Line Value: WS
  misc_feature: MA Experiment 20000171 PARAMETER Experiment Name: At_42deg_Heat_P Parameter: Temperature (deg C) Value: 42 vs. 22
  misc_feature: MA Experiment 20000171 PARAMETER Experiment Name: At_42deg_Heat_P Parameter: Timepoint (hr) Value: 1
  misc_feature: MA Experiment 20000171 PARAMETER Experiment Name: At_42deg_Heat_P Parameter: Tissue Value: Aerial
  misc_feature: MA Experiment ID: 20000173 Result: Down-regulated in Transcription
  misc_feature: MA Experiment 20000173 PARAMETER Experiment Name: At_42deg_Heat_P Parameter: Age (day) Value: 14
  misc_feature: MA Experiment 20000173 PARAMETER Experiment Name: At_42deg_Heat_P Parameter: Organism Value: A. thaliana
  misc_feature: MA Experiment 20000173 PARAMETER Experiment Name: At_42deg_Heat_P Parameter: Plant Line Value: WS
  misc_feature: MA Experiment 20000173 PARAMETER Experiment Name: At_42deg_Heat_P Parameter: Temperature (deg C) Value: 42 vs. 22
  misc_feature: MA Experiment 20000173 PARAMETER Experiment Name: At_42deg_Heat_P Parameter: Timepoint (hr) Value: 6
  misc_feature: MA Experiment 20000173 PARAMETER Experiment Name: At_42deg_Heat_P Parameter: Tissue Value: Aerial
  misc_feature: MA Experiment ID: 20000182 Result: Up-regulated in Transcription
  misc_feature: MA Experiment 20000182 PARAMETER Experiment Name: At_2mM_SA_P Parameter: Age (day) Value: 14
  misc_feature: MA Experiment 20000182 PARAMETER Experiment Name: At_2mM_SA_P Parameter: Organism Value: A. thaliana
  misc_feature: MA Experiment 20000182 PARAMETER Experiment Name: At_2mM_SA_P Parameter: Plant Line Value: WS
  misc_feature: MA Experiment 20000182 PARAMETER Experiment Name: At_2mM_SA_P Parameter: Timepoint (hr) Value: 6
  misc_feature: MA Experiment 20000182 PARAMETER Experiment Name: At_2mM_SA_P Parameter: Tissue Value: Aerial
  misc_feature: MA Experiment 20000182 PARAMETER Experiment Name: At_2mM_SA_P Parameter: Treatment Value: 2mM SA vs. No Treatment
  misc_feature: MA Experiment ID: 20000185 Result: Down-regulated in Transcription
  misc_feature: MA Experiment 20000185 PARAMETER Experiment Name: At_Roots__P Parameter: Age (day) Value: 7 vs. 21
  misc_feature: MA Experiment 20000185 PARAMETER Experiment Name: At_Roots__P Parameter: Organism Value: A. thaliana
  misc_feature: MA Experiment 20000185 PARAMETER Experiment Name: At_Roots__P Parameter: Tissue Value: Roots vs. Whole Plant
  misc_feature: MA Experiment ID: 20000234 Result: Down-regulated in Transcription
  misc_feature: MA Experiment 20000234 PARAMETER Experiment Name: At_Siliques_P Parameter: Age (day) Value: 21
  misc_feature: MA Experiment 20000234 PARAMETER Experiment Name: At_Siliques_P Parameter: Organism Value: A. thaliana
  misc_feature: MA Experiment 20000234 PARAMETER Experiment Name: At_Siliques_P Parameter: Plant Line Value: WS
  misc_feature: MA Experiment 20000234 PARAMETER Experiment Name: At_Siliques_P Parameter: Tissue Value: Less Than 5mm Siliques vs. Whole Plant
  misc_feature: MA Experiment ID: 20000264 Result: Down-regulated in Transcription
  misc_feature: MA Experiment 20000264 PARAMETER Experiment Name: At_Open_Flower_P Parameter: Age (day) Value: 21
  misc_feature: MA Experiment 20000264 PARAMETER Experiment Name: At_Open_Flower_P Parameter: Plant Line Value: WS
  misc_feature: MA Experiment 20000264 PARAMETER Experiment Name: At_Open_Flower_P Parameter: Tissue Value: Open Flower vs. Whole Plant
  misc_feature: MA Experiment ID: 20000265 Result: Down-regulated in Transcription
  misc_feature: MA Experiment 20000265 PARAMETER Experiment Name: At_Open_Flower_P Parameter: Age (day) Value: 21
  misc_feature: MA Experiment 20000265 PARAMETER Experiment Name: At_Open_Flower_P Parameter: Plant Line Value: WS
  misc_feature: MA Experiment 20000265 PARAMETER Experiment Name: At_Open_Flower_P Parameter: Tissue Value: Closed Flower vs. Whole Plant
  misc_feature: MA Experiment ID: 20000286 Result: Down-regulated in Transcription
  misc_feature: MA Experiment 20000286 PARAMETER Experiment Name: At_Open_Flower_P Parameter: Age (day) Value: 21
  misc_feature: MA Experiment 20000286 PARAMETER Experiment Name: At_Open_Flower_P Parameter: Plant Line Value: WS
  misc_feature: MA Experiment 20000286 PARAMETER Experiment Name: At_Open_Flower_P Parameter: Tissue Value: Half Open vs. Whole Plant
  misc_feature: MA Experiment ID: 20000437 Result: Down-regulated in Transcription
  misc_feature: MA Experiment 20000437 PARAMETER Experiment Name: At_Drought_P Parameter: Age (day) Value: 8
  misc_feature: MA Experiment 20000437 PARAMETER Experiment Name: At_Drought_P Parameter: Organism Value: A. thaliana
  misc_feature: MA Experiment 20000437 PARAMETER Experiment Name: At_Drought_P Parameter: Plant Line Value: WS
  misc_feature: MA Experiment 20000437 PARAMETER Experiment Name: At_Drought_P Parameter: Timepoint (hr) Value: 24
  misc_feature: MA Experiment 20000437 PARAMETER Experiment Name: At_Drought_P Parameter: Tissue Value: Whole Plant
  misc_feature: MA Experiment 20000437 PARAMETER Experiment Name: At_Drought_P Parameter: Treatment Value: Drought vs. No Drought
  misc_feature: MA Experiment ID: 20000439 Result: Down-regulated in Transcription
  misc_feature: MA Experiment 20000439 PARAMETER Experiment Name: At_Roots__P Parameter: Age (day) Value: 14 vs. 21
  misc_feature: MA Experiment 20000439 PARAMETER Experiment Name: At_Roots__P Parameter: Organism Value: A. thaliana
  misc_feature: MA Experiment 20000439 PARAMETER Experiment Name: At_Roots__P Parameter: Tissue Value: Roots vs. Whole Plant
  misc_feature: MA Experiment ID: 20000441 Result: Up-regulated in Transcription
  misc_feature: MA Experiment 20000441 PARAMETER Experiment Name: At_1uM_BR-BRZ__P Parameter: Tissue Value: Shoot Apices
  misc_feature: MA Experiment 20000441 PARAMETER Experiment Name: At_1uM_BR-BRZ__P Parameter: Treatment Value: 1uM BR vs. No Treatment
  misc_feature: MA Experiment ID: 20000451 Result: Up-regulated in Transcription
  misc_feature: MA Experiment 20000451 PARAMETER Experiment Name: At_CS6879_Shoots-Roots_P Parameter: Age (day) Value: 14
  misc_feature: MA Experiment 20000451 PARAMETER Experiment Name: At_CS6879_Shoots-Roots_P Parameter: Organism Value: A. thaliana
  misc_feature: MA Experiment 20000451 PARAMETER Experiment Name: At_CS6879_Shoots-Roots_P Parameter: Plant Line Value: CS6879 vs. WS
  misc_feature: MA Experiment 20000451 PARAMETER Experiment Name: At_CS6879_Shoots-Roots_P Parameter: Tissue Value: Roots
  misc_feature: MA Experiment ID: 20000794 Result: Down-regulated in Transcription
  misc_feature: MA Experiment 20000794 PARAMETER Experiment Name: At_Petals_P Parameter: Age (day) Value: 23-25 days
  misc_feature: MA Experiment 20000794 PARAMETER Experiment Name: At_Petals_P Parameter: Plant Line Value: WS
  misc_feature: MA Experiment 20000794 PARAMETER Experiment Name: At_Petals_P Parameter: Tissue Value: Petals vs. Whole plant
  misc_feature: MA Experiment ID: 20001248 Result: Down-regulated in Transcription
  misc_feature: MA Experiment 20001248 PARAMETER Experiment Name: At_Far-red-induction_P Parameter: Age (day) Value: 7
  misc_feature: MA Experiment 20001248 PARAMETER Experiment Name: At_Far-red-induction_P Parameter: Light Value: Far-red vs. White
  misc_feature: MA Experiment 20001248 PARAMETER Experiment Name: At_Far-red-induction_P Parameter: Organism Value: A. thaliana
  misc_feature: MA Experiment 20001248 PARAMETER Experiment Name: At_Far-red-induction_P Parameter: Plant Line Value: Columbia
  misc_feature: MA Experiment 20001248 PARAMETER Experiment Name: At_Far-red-induction_P Parameter: Timepoint (hr) Value: 4
  misc_feature: MA Experiment 20001248 PARAMETER Experiment Name: At_Far-red-induction_P Parameter: Tissue Value: Whole Plant
  misc_feature: MA Experiment ID: 20001555 Result: Down-regulated in Transcription
  misc_feature: MA Experiment 20001555 PARAMETER Experiment Name: At_Drought_Soil_Dry_P Parameter: Age (day) Value: 24
  misc_feature: MA Experiment 20001555 PARAMETER Experiment Name: At_Drought_Soil_Dry_P Parameter: Organism Value: A. thaliana
  misc_feature: MA Experiment 20001555 PARAMETER Experiment Name: At_Drought_Soil_Dry_P Parameter: Plant Line Value: WS
  misc_feature: MA Experiment 20001555 PARAMETER Experiment Name: At_Drought_Soil_Dry_P Parameter: Post Timepoint (hr) Value: None
  misc_feature: MA Experiment 20001555 PARAMETER Experiment Name: At_Drought_Soil_Dry_P Parameter: Post-Treatment Value: None
  misc_feature: MA Experiment 20001555 PARAMETER Experiment Name: At_Drought_Soil_Dry_P Parameter: Timepoint (day) Value: 10
  misc_feature: MA Experiment 20001555 PARAMETER Experiment Name: At_Drought_Soil_Dry_P Parameter: Treatment Value: Drought vs. No Drought
  misc_feature: MA Experiment ID: 20001556 Result: Down-regulated in Transcription
  misc_feature: MA Experiment 20001556 PARAMETER Experiment Name: At_Drought_Soil_Dry_P Parameter: Age (day) Value: 26
  misc_feature: MA Experiment 20001556 PARAMETER Experiment Name: At_Drought_Soil_Dry_P Parameter: Organism Value: A. thaliana
  misc_feature: MA Experiment 20001556 PARAMETER Experiment Name: At_Drought_Soil_Dry_P Parameter: Plant Line Value: WS
  misc_feature: MA Experiment 20001556 PARAMETER Experiment Name: At_Drought_Soil_Dry_P Parameter: Post Timepoint (hr) Value: None
  misc_feature: MA Experiment 20001556 PARAMETER Experiment Name: At_Drought_Soil_Dry_P Parameter: Post-Treatment Value: None
  misc_feature: MA Experiment 20001556 PARAMETER Experiment Name: At_Drought_Soil_Dry_P Parameter: Timepoint (day) Value: 12
  misc_feature: MA Experiment 20001556 PARAMETER Experiment Name: At_Drought_Soil_Dry_P Parameter: Treatment Value: Drought vs. No Drought
  misc_feature: MA Experiment ID: 20001559 Result: Down-regulated in Transcription
  misc_feature: MA Experiment 20001559 PARAMETER Experiment Name: At_Drought_Soil_Dry_P Parameter: Age (day) Value: 28
  misc_feature: MA Experiment 20001559 PARAMETER Experiment Name: At_Drought_Soil_Dry_P Parameter: Organism Value: A. thaliana
  misc_feature: MA Experiment 20001559 PARAMETER Experiment Name: At_Drought_Soil_Dry_P Parameter: Plant Line Value: WS
  misc_feature: MA Experiment 20001559 PARAMETER Experiment Name: At_Drought_Soil_Dry_P Parameter: Post Timepoint (hr) Value: 29
  misc_feature: MA Experiment 20001559 PARAMETER Experiment Name: At_Drought_Soil_Dry_P Parameter: Post-Treatment Value: Re-Water vs. No Drought
  misc_feature: MA Experiment 20001559 PARAMETER Experiment Name: At_Drought_Soil_Dry_P Parameter: Timepoint (day) Value: 14
  misc_feature: MA Experiment 20001559 PARAMETER Experiment Name: At_Drought_Soil_Dry_P Parameter: Treatment Value: Drought vs. No Drought
  misc_feature: MA Experiment ID: 20001560 Result: Down-regulated in Transcription
  misc_feature: MA Experiment 20001560 PARAMETER Experiment Name: At_Drought_Soil_Dry_P Parameter: Age (day) Value: 28
  misc_feature: MA Experiment 20001560 PARAMETER Experiment Name: At_Drought_Soil_Dry_P Parameter: Organism Value: A. thaliana
  misc_feature: MA Experiment 20001560 PARAMETER Experiment Name: At_Drought_Soil_Dry_P Parameter: Plant Line Value: WS
  misc_feature: MA Experiment 20001560 PARAMETER Experiment Name: At_Drought_Soil_Dry_P Parameter: Post Timepoint (hr) Value: None
  misc_feature: MA Experiment 20001560 PARAMETER Experiment Name: At_Drought_Soil_Dry_P Parameter: Post-Treatment Value: None
  misc_feature: MA Experiment 20001560 PARAMETER Experiment Name: At_Drought_Soil_Dry_P Parameter: Timepoint (day) Value: 14
  misc_feature: MA Experiment 20001560 PARAMETER Experiment Name: At_Drought_Soil_Dry_P Parameter: Treatment Value: Drought vs. No Drought
  misc_feature: MA Experiment ID: 20001904 Result: Down-regulated in Transcription
  misc_feature: MA Experiment 20001904 PARAMETER Experiment Name: At_Drought_Reproduction_P Parameter: Age (day) Value: 37
  misc_feature: MA Experiment 20001904 PARAMETER Experiment Name: At_Drought_Reproduction_P Parameter: Organism Value: A. thaliana
  misc_feature: MA Experiment 20001904 PARAMETER Experiment Name: At_Drought_Reproduction_P Parameter: Plant Line Value: WS
  misc_feature: MA Experiment 20001904 PARAMETER Experiment Name: At_Drought_Reproduction_P Parameter: Timepoint (day) Value: 7
  misc_feature: MA Experiment 20001904 PARAMETER Experiment Name: At_Drought_Reproduction_P Parameter: Tissue Value: Rosettes
  misc_feature: MA Experiment 20001904 PARAMETER Experiment Name: At_Drought_Reproduction_P Parameter: Treatment Value: Drought vs. No Drought
  misc_feature: MA Experiment ID: 20001905 Result: Down-regulated in Transcription
  misc_feature: MA Experiment 20001905 PARAMETER Experiment Name: At_Drought_Reproduction_P Parameter: Age (day) Value: 40
  misc_feature: MA Experiment 20001905 PARAMETER Experiment Name: At_Drought_Reproduction_P Parameter: Organism Value: A. thaliana
  misc_feature: MA Experiment 20001905 PARAMETER Experiment Name: At_Drought_Reproduction_P Parameter: Plant Line Value: WS
  misc_feature: MA Experiment 20001905 PARAMETER Experiment Name: At_Drought_Reproduction_P Parameter: Timepoint (day) Value: 10
  misc_feature: MA Experiment 20001905 PARAMETER Experiment Name: At_Drought_Reproduction_P Parameter: Tissue Value: Rosettes
  misc_feature: MA Experiment 20001905 PARAMETER Experiment Name: At_Drought_Reproduction_P Parameter: Treatment Value: Drought vs. No Drought
  misc_feature: MA Experiment ID: 20001906 Result: Down-regulated in Transcription
  misc_feature: MA Experiment 20001906 PARAMETER Experiment Name: At_Drought_Reproduction_P Parameter: Age (day) Value: 35
  misc_feature: MA Experiment 20001906 PARAMETER Experiment Name: At_Drought_Reproduction_P Parameter: Organism Value: A. thaliana
  misc_feature: MA Experiment 20001906 PARAMETER Experiment Name: At_Drought_Reproduction_P Parameter: Plant Line Value: WS
  misc_feature: MA Experiment 20001906 PARAMETER Experiment Name: At_Drought_Reproduction_P Parameter: Timepoint (day) Value: 5
  misc_feature: MA Experiment 20001906 PARAMETER Experiment Name: At_Drought_Reproduction_P Parameter: Tissue Value: Siliques
  misc_feature: MA Experiment 20001906 PARAMETER Experiment Name: At_Drought_Reproduction_P Parameter: Treatment Value: Drought vs. No Drought
aaaattcttcaattctcttctcgtttttttttttttatcaattccaatgatctgtcacgttttagtaattttcactattctcgtttccgccgtcgtcgacgcaacggcgtcgtatgagcccactgatgtctttctcatcaattgcggcgatacctccaacaacatggactacagtggccggaactggacgacggagaatccgaaatttatgtcatcgaatgcagttgacgacgcgtcgttcacttcatctgcgtcataccaagaatcagggattcctcaagtgccgtacttgaaagctaggattttccgatatgatttcacttacagttttccagtctctcccggctggaaattcctccggttatacttttatccgacccgttacggatccgatttcgacgccgttaaatccttcttctccgtcaacgtcaaccgtttcactctcttgcataacttcagtgtaaaagcttccataccggagtcaagttctctaatcaaagagtttatcgttccggttaaccaaactcttgatctcacgttcacgccctctccgaattcattagctttcgttaacggaatcgagattatctccatgcctgaccggttttactcaaagggaggatttgacgacgttgtaagaaacgttggtagggacgttgacttcgagatagacaactccacggctttcgagaccgtttatcgggtaaacgtaggtggaaaagtggtgggcgacgtcggagattcgggaatgttccggcgttggctttccgatgaaggtttcttactcggtattaattcgggagccattccgaatataacaggtgtaaagatcaactacacggataaaactcccgcgtacgttgcgccggaagatgtatacacgacgtgtcgcctgatggggaacaaagacagtcctgagctaaacctgaatttcaacctgacgtggctctttgaagtcgatgccgggtttgcctatatagtgaggcttcatttctgtgagacgcaaccggaagtcaacaaaacgggtgaccgcgtcttctccatcttcttcggatatcaactggccatgcgtgaaatggacgtgtttcggctgagtggtggttttcggctaccgatgtatctagatttcaaggtacttgtcgacgccgacggaactagccagagacctagtcttcgagttgacttgacaccttacaaagaggactatccaacctattacgacgctattttgagtggtgtagagattctcaagctgagtaattctgatggtaatcttgcggggcttaatccaattcctcaactaagtccaccaccacaatctataacgccactaaaaggaaaaggcaagtcatcacatgttttgccaataataattgcagtggttggttctgcagttgcgctagcgttttttgttcttgttgttgtcctcgttgttatgaagagaaagaagaagagcaacgagtctagtgtagataccacgaacaagccttctacgaactcgtcatggggtcctcttctgcacgggacaggctctacaaatacaaaatctgcctcatctcttccatcagatctctgccgtcgattctccatctacgaaatcaaatccgccacaaatgatttcgaggaaaaactaatcataggagtaggcgggtttggttctgtctacaaaggacgaatagacggtggagccacacttgttgcggttaaacggctggaaattacatcgaaccaaggtgctaaagagttcgatacagagctcgagatgctttcaaagcttcgacatgtacacctcgtctctctaatcggatattgcgatgacgacaacgagatggtacttgtctatgagtatttgccacatggtacacttaaagatcatcttttcaggagagacaaggcctctgatcctccattgtcatggaaacgaaggctagagatttgcattggagcagctcgtggattacagtatcttcatactggagccaagtacacgatcatacatagagacatcaaaaccacaaacatacttctcgatgagaacttcgtcgctaaagtatctgactttggtttatcaagagttggtcctactagtgcttctcaaacgcatgtctccaccgtcgttaaaggaacgtttggttacttggatcccgagtactatcgccgtcaaatcttgaccgaaaaatccgacgtgtactcttttggagttgttctgttggaggttttgtgctgtagaccgatcagaatgcaaagtgttccaccggaacaagcagatttgatccgatgggtgaagtcaaatttcaataaaagaaccgttgatcagatcattgactcagatttaaccgctgatatcacttcgacctcgatggagaagttttgtgagatagccattagatgtgttcaagaccgtggtatggaacggccaccgatgaacgacgttgtttgggcgcttgagtttgctcttcagcttcacgagactgctaagaagaagaatgacaacgtggagtctctggatctaatgccaagtggtgaagttggtacgaccacggacggagaagatgacttgtttagtaggactacaggacacgttgggaaatcgaccacgaccgatgactctgttctagttgttggtgatgagaggagtggttcgagttggggagtattttcggagatcaatgaacctaaagcacggtagatttgatggcttggtaaacaagtatcacattctggttagggttgatatatatttgtgtatgtataattgttgaataaacacattattgtatttaaattacattttgatgattatttagcagcttaaatttag

SEQ ID NO: 43680 - protein, 895 aa, Arabidopsis thaliana
  peptide (1)..(895): Ceres Seq. ID no. 13580520
  misc_feature (5)..(427): Homolog of NCBI NO: 15234944 NR Description: protein kinase family [Arabidopsis thaliana]
  misc_feature (457)..(890): Homolog of NCBI NO: 15234944 NR Description: protein kinase family [Arabidopsis thaliana]
  misc_feature (46)..(895): Homolog of NCBI NO: 15241880 NR Description: protein kinase family [Arabidopsis thaliana]
  misc_feature (20)..(853): Homolog of NCBI NO: 15229329 NR Description: protein kinase family [Arabidopsis thaliana]
  misc_feature (524)..(853): Homolog of NCBI NO: 15241612 NR Description: protein kinase family [Arabidopsis thaliana]
  misc_feature (16)..(490): Homolog of NCBI NO: 15241612 NR Description: protein kinase family [Arabidopsis thaliana]
  misc_feature (21)..(895): Homolog of NCBI NO: 14334760 NR Description: putative receptor-protein kinase [Arabidopsis
  misc_feature (513)..(851): Homolog of NCBI NO: 15241610 NR Description: protein kinase family [Arabidopsis thaliana]
  misc_feature (16)..(490): Homolog of NCBI NO: 15241610 NR Description: protein kinase family [Arabidopsis thaliana]
  misc_feature (21)..(895): Homolog of NCBI NO: 15230520 NR Description: protein kinase family [Arabidopsis thaliana]
KFFNSLLVFFFLSIPMICHVLVIFTILVSAVVDATASYEPTDVFLINCGDTSNNMDYSGRNWTTENPKFMSSNAVDDASFTSSASYQESGIPQVPYLKARIFRYDFTYSFPVSPGWKFLRLYFYPTRYGSDFDAVKSFFSVNVNRFTLLHNFSVKASIPESSSLIKEFIVPVNQTLDLTFTPSPNSLAFVNGIEIISMPDRFYSKGGFDDVVRNVGRDVDFEIDNSTAFETVYRVNVGGKVVGDVGDSGMFRRWLSDEGFLLGINSGAIPNITGVKINYTDKTPAYVAPEDVYTTCRLMGNKDSPELNLNFNLTWLFEVDAGFAYIVRLHFCETQPEVNKTGDRVFSIFFGYQLAMREMDVFRLSGGFRLPMYLDFKVLVDADGTSQRPSLRVDLTPYKEDYPTYYDAILSGVEILKLSNSDGNLAGLNPIPQLSPPPQSITPLKGKGKSSHVLPIIIAVVGSAVALAFFVLVVVLVVMKRKKKSNESSVDTTNKPSTNSSWGPLLHGTGSTNTKSASSLPSDLCRRFSIYEIKSATNDFEEKLIIGVGGFGSVYKGRIDGGATLVAVKRLEITSNQGAKEFDTELEMLSKLRHVHLVSLIGYCDDDNEMVLVYEYLPHGTLKDHLFRRDKASDPPLSWKRRLEICIGAARGLQYLHTGAKYTIIHRDIKTTNILLDENFVAKVSDFGLSRVGPTSASQTHVSTVVKGTFGYLDPEYYRRQILTEKSDVYSFGVVLLEVLCCRPIRMQSVPPEQADLIRWVKSNFNKRTVDQIIDSDLTADITSTSMEKFCEIAIRCVQDRGMERPPMNDVVWALEFALQLHETAKKKNDNVESLDLMPSGEVGTTTDGEDDLFSRTTGHVGKSTTTDDSVLVVGDERSGSSWGVFSEINEPKAR

SEQ ID NO: 43681 - protein, 880 aa, Arabidopsis thaliana
  peptide (1)..(880): Ceres Seq. ID no. 13580521
  misc_feature (1)..(412): Homolog of NCBI NO: 15234944 NR Description: protein kinase family [Arabidopsis thaliana]
  misc_feature (442)..(875): Homolog of NCBI NO: 15234944 NR Description: protein kinase family [Arabidopsis thaliana]
  misc_feature (31)..(880): Homolog of NCBI NO: 15241880 NR Description: protein kinase family [Arabidopsis thaliana]
  misc_feature (5)..(838): Homolog of NCBI NO: 15229329 NR Description: protein kinase family [Arabidopsis thaliana]
  misc_feature (509)..(838): Homolog of NCBI NO: 15241612 NR Description: protein kinase family [Arabidopsis thaliana]
  misc_feature (1)..(475): Homolog of NCBI NO: 15241612 NR Description: protein kinase family [Arabidopsis thaliana]
  misc_feature (6)..(880): Homolog of NCBI NO: 14334760 NR Description: putative receptor-protein kinase [Arabidopsis
  misc_feature (498)..(836): Homolog of NCBI NO: 15241610 NR Description: protein kinase family [Arabidopsis thaliana]
  misc_feature (1)..(475): Homolog of NCBI NO: 15241610 NR Description: protein kinase family [Arabidopsis thaliana]
  misc_feature (6)..(880): Homolog of NCBI NO: 15230520 NR Description: protein kinase family [Arabidopsis thaliana]
MICHVLVIFTILVSAVVDATASYEPTDVFLINCGDTSNNMDYSGRNWTTENPKFMSSNAVDDASFTSSASYQESGIPQVPYLKARIFRYDFTYSFPVSPGWKFLRLYFYPTRYGSDFDAVKSFFSVNVNRFTLLHNFSVKASIPESSSLIKEFIVPVNQTLDLTFTPSPNSLAFVNGIEIISMPDRFYSKGGFDDVVRNVGRDVDFEIDNSTAFETVYRVNVGGKVVGDVGDSGMFRRWLSDEGFLLGINSGAIPNITGVKINYTDKTPAYVAPEDVYTTCRLMGNKDSPELNLNFNLTWLFEVDAGFAYIVRLHFCETQPEVNKTGDRVFSIFFGYQLAMREMDVFRLSGGFRLPMYLDFKVLVDADGTSQRPSLRVDLTPYKEDYPTYYDAILSGVEILKLSNSDGNLAGLNPIPQLSPPPQSITPLKGKGKSSHVLPIIIAVVGSAVALAFFVLVVVLVVMKRKKKSNESSVDTTNKPSTNSSWGPLLHGTGSTNTKSASSLPSDLCRRFSIYEIKSATNDFEEKLIIGVGGFGSVYKGRIDGGATLVAVKRLEITSNQGAKEFDTELEMLSKLRHVHLVSLIGYCDDDNEMVLVYEYLPHGTLKDHLFRRDKASDPPLSWKRRLEICIGAARGLQYLHTGAKYTIIHRDIKTTNILLDENFVAKVSDFGLSRVGPTSASQTHVSTVVKGTFGYLDPEYYRRQILTEKSDVYSFGVVLLEVLCCRPIRMQSVPPEQADLIRWVKSNFNKRTVDQIIDSDLTADITSTSMEKFCEIAIRCVQDRGMERPPMNDVVWALEFALQLHETAKKKNDNVESLDLMPSGEVGTTTDGEDDLFSRTTGHVGKSTTTDDSVLVVGDERSGSSWGVFSEINEPKAR

SEQ ID NO: 43682 - protein, 841 aa, Arabidopsis thaliana
  peptide (1)..(841): Ceres Seq. ID no. 13580522
  misc_feature (1)..(373): Homolog of NCBI NO: 15234944 NR Description: protein kinase family [Arabidopsis thaliana]
  misc_feature (403)..(836): Homolog of NCBI NO: 15234944 NR Description: protein kinase family [Arabidopsis thaliana]
  misc_feature (1)..(841): Homolog of NCBI NO: 15241880 NR Description: protein kinase family [Arabidopsis thaliana]
  misc_feature (1)..(799): Homolog of NCBI NO: 15229329 NR Description: protein kinase family [Arabidopsis thaliana]
  misc_feature (470)..(799): Homolog of NCBI NO: 15241612 NR Description: protein kinase family [Arabidopsis thaliana]
  misc_feature (1)..(436): Homolog of NCBI NO: 15241612 NR Description: protein kinase family [Arabidopsis thaliana]
  misc_feature (1)..(841): Homolog of NCBI NO: 14334760 NR Description: putative receptor-protein kinase [Arabidopsis
  misc_feature (459)..(797): Homolog of NCBI NO: 15241610 NR Description: protein kinase family [Arabidopsis thaliana]
  misc_feature (1)..(436): Homolog of NCBI NO: 15241610 NR Description: protein kinase family [Arabidopsis thaliana]
  misc_feature (1)..(841): Homolog of NCBI NO: 15230520 NR Description: protein kinase family [Arabidopsis thaliana]
MDYSGRNWTTENPKFMSSNAVDDASFTSSASYQESGIPQVPYLKARIFRYDFTYSFPVSPGWKFLRLYFYPTRYGSDFDAVKSFFSVNVNRFTLLHNFSVKASIPESSSLIKEFIVPVNQTLDLTFTPSPNSLAFVNGIEIISMPDRFYSKGGFDDVVRNVGRDVDFEIDNSTAFETVYRVNVGGKVVGDVGDSGMFRRWLSDEGFLLGINSGAIPNITGVKINYTDKTPAYVAPEDVYTTCRLMGNKDSPELNLNFNLTWLFEVDAGFAYIVRLHFCETQPEVNKTGDRVFSIFFGYQLAMREMDVFRLSGGFRLPMYLDFKVLVDADGTSQRPSLRVDLTPYKEDYPTYYDAILSGVEILKLSNSDGNLAGLNPIPQLSPPPQSITPLKGKGKSSHVLPIIIAVVGSAVALAFFVLVVVLVVMKRKKKSNESSVDTTNKPSTNSSWGPLLHGTGSTNTKSASSLPSDLCRRFSIYEIKSATNDFEEKLIIGVGGFGSVYKGRIDGGATLVAVKRLEITSNQGAKEFDTELEMLSKLRHVHLVSLIGYCDDDNEMVLVYEYLPHGTLKDHLFRRDKASDPPLSWKRRLEICIGAARGLQYLHTGAKYTIIHRDIKTTNILLDENFVAKVSDFGLSRVGPTSASQTHVSTVVKGTFGYLDPEYYRRQILTEKSDVYSFGVVLLEVLCCRPIRMQSVPPEQADLIRWVKSNFNKRTVDQIIDSDLTADITSTSMEKFCEIAIRCVQDRGMERPPMNDVVWALEFALQLHETAKKKNDNVESLDLMPSGEVGTTTDGEDDLFSRTTGHVGKSTTTDDSVLVVGDERSGSSWGVFSEINEPKAR

SEQ ID NO: 43683 - DNA, 1373 bp, Arabidopsis thaliana
  misc_feature (1)..(1373): Ceres Seq. ID no. 12339572
  misc_feature: MA Experiment ID: 108572 Result: Up-regulated in Transcription
  misc_feature: MA Experiment 108572 PARAMETER Experiment Name: At_Drought_cDNA_P Parameter: Timepoint (hr) Value: 1
  misc_feature: MA Experiment 108572 PARAMETER Experiment Name: At_Drought_cDNA_P Parameter: Tissue Value: Aerial
  misc_feature: MA Experiment 108572 PARAMETER Experiment Name: At_Drought_cDNA_P Parameter: Treatment Value: Drought vs. No Drought
  misc_feature: MA Experiment ID: 108573 Result: Up-regulated in Transcription
  misc_feature: MA Experiment 108573 PARAMETER Experiment Name: At_Drought_cDNA_P Parameter: Timepoint (hr) Value: 6
  misc_feature: MA Experiment 108573 PARAMETER Experiment Name: At_Drought_cDNA_P Parameter: Tissue Value: Aerial
  misc_feature: MA Experiment 108573 PARAMETER Experiment Name: At_Drought_cDNA_P Parameter: Treatment Value: Drought vs. No Drought
  misc_feature: MA Experiment ID: 108605 Result: Up-regulated in Transcription
  misc_feature: MA Experiment 108605 PARAMETER Experiment Name: At_100uM_ABA_cDNA_P Parameter: Timepoint (hr) Value: 6
  misc_feature: MA Experiment 108605 PARAMETER Experiment Name: At_100uM_ABA_cDNA_P Parameter: Tissue Value: Aerial
  misc_feature: MA Experiment 108605 PARAMETER Experiment Name: At_100uM_ABA_cDNA_P Parameter: Treatment Value: 100uM ABA vs. No Treatment
  misc_feature: MA Experiment ID: 108607 Result: Up-regulated in Transcription
  misc_feature: MA Experiment 108607 PARAMETER Experiment Name: At_100uM_ABA_cDNA_P Parameter: Timepoint (hr) Value: 4
  misc_feature: MA Experiment 108607 PARAMETER Experiment Name: At_100uM_ABA_cDNA_P Parameter: Tissue Value: Aerial
  misc_feature: MA Experiment 108607 PARAMETER Experiment Name: At_100uM_ABA_cDNA_P Parameter: Treatment Value: 100uM ABA vs. No Treatment
  misc_feature: MA Experiment ID: 108609 Result: Up-regulated in Transcription
  misc_feature: MA Experiment 108609 PARAMETER Experiment Name: At_100uM_ABA_cDNA_P Parameter: Timepoint (hr) Value: 24
  misc_feature: MA Experiment 108609 PARAMETER Experiment Name: At_100uM_ABA_cDNA_P Parameter: Tissue Value: Aerial
  misc_feature: MA Experiment 108609 PARAMETER Experiment Name: At_100uM_ABA_cDNA_P Parameter: Treatment Value: 100uM ABA vs. No Treatment
  misc_feature: MA Experiment ID: 20000069 Result: Up-regulated in Transcription
  misc_feature: MA Experiment 20000069 PARAMETER Experiment Name: At_100uM_ABA_Mutants_cDNA_P Parameter: Plant Line Value: CS23
  misc_feature: MA Experiment 20000069 PARAMETER Experiment Name: At_100uM_ABA_Mutants_cDNA_P Parameter: Timepoint (hr) Value: 6
  misc_feature: MA Experiment 20000069 PARAMETER Experiment Name: At_100uM_ABA_Mutants_cDNA_P Parameter: Tissue Value: Aerial
  misc_feature: MA Experiment 20000069 PARAMETER Experiment Name: At_100uM_ABA_Mutants_cDNA_P Parameter: Treatment Value: 100uM ABA vs. No Treatment
  misc_feature: MA Experiment ID: 20000070 Result: Up-regulated in Transcription
  misc_feature: MA Experiment 20000070 PARAMETER Experiment Name: At_100uM_ABA_Mutants_cDNA_P Parameter: Plant Line Value: CS24
  misc_feature: MA Experiment 20000070 PARAMETER Experiment Name: At_100uM_ABA_Mutants_cDNA_P Parameter: Timepoint (hr) Value: 6
  misc_feature: MA Experiment 20000070 PARAMETER Experiment Name: At_100uM_ABA_Mutants_cDNA_P Parameter: Tissue Value: Aerial
  misc_feature: MA Experiment 20000070 PARAMETER Experiment Name: At_100uM_ABA_Mutants_cDNA_P Parameter: Treatment Value: 100uM ABA vs. No Treatment
  misc_feature: MA Experiment ID: 20000071 Result: Up-regulated in Transcription
  misc_feature: MA Experiment 20000071 PARAMETER Experiment Name: At_100uM_ABA_Mutants_cDNA_P Parameter: Plant Line Value: CS8104
  misc_feature: MA Experiment 20000071 PARAMETER Experiment Name: At_100uM_ABA_Mutants_cDNA_P Parameter: Timepoint (hr) Value: 6
  misc_feature: MA Experiment 20000071 PARAMETER Experiment Name: At_100uM_ABA_Mutants_cDNA_P Parameter: Tissue Value: Aerial
  misc_feature: MA Experiment 20000071 PARAMETER Experiment Name: At_100uM_ABA_Mutants_cDNA_P Parameter: Treatment Value: 100uM ABA vs. No Treatment
  misc_feature: MA Experiment ID: 20000088 Result: Up-regulated in Transcription
  misc_feature: MA Experiment 20000088 PARAMETER Experiment Name: At_100uM_ABA_Mutants_cDNA_P Parameter: Plant Line Value: Landsberg
  misc_feature: MA Experiment 20000088 PARAMETER Experiment Name: At_100uM_ABA_Mutants_cDNA_P Parameter: Timepoint (hr) Value: 6
  misc_feature: MA Experiment 20000088 PARAMETER Experiment Name: At_100uM_ABA_Mutants_cDNA_P Parameter: Tissue Value: Aerial
  misc_feature: MA Experiment 20000088 PARAMETER Experiment Name: At_100uM_ABA_Mutants_cDNA_P Parameter: Treatment Value: 100uM ABA vs. No Treatment
  misc_feature: MA Experiment ID: 20000113 Result: Down-regulated in Transcription
  misc_feature: MA Experiment 20000113 PARAMETER Experiment Name: At_42deg_Heat_cDNA_P Parameter: Temperature (deg C) Value: 42 vs. 22
  misc_feature: MA Experiment 20000113 PARAMETER Experiment Name: At_42deg_Heat_cDNA_P Parameter: Timepoint (hr) Value: 8
  misc_feature: MA Experiment 20000113 PARAMETER Experiment Name: At_42deg_Heat_cDNA_P Parameter: Tissue Value: Aerial
  misc_feature: MA Experiment ID: 20000117 Result: Up-regulated in Transcription
  misc_feature: MA Experiment 20000117 PARAMETER Experiment Name: At_100uM_ABA_Mutants_cDNA_P Parameter: Plant Line Value: Columbia
  misc_feature: MA Experiment 20000117 PARAMETER Experiment Name: At_100uM_ABA_Mutants_cDNA_P Parameter: Timepoint (hr) Value: 6
  misc_feature: MA Experiment 20000117 PARAMETER Experiment Name: At_100uM_ABA_Mutants_cDNA_P Parameter: Tissue Value: Aerial
  misc_feature: MA Experiment 20000117 PARAMETER Experiment Name: At_100uM_ABA_Mutants_cDNA_P Parameter: Treatment Value: 100uM ABA vs. No Treatment
actctttgattagggttttatcattctcaatcagggttttagtttaaacatcgaattaagcactggattagctgattttgtgtgatttgatttcaaagttcacagcttttagtttctctgatcctaatttatgatttgaagtttctatcaaaaggtcaggaactgatgaataaccctgtaccgtgtcagtcggtctctggtggcaattctggtggttatttgtttccttcttcctctggatactgcaatgtttcagctgtcttgcctcatggaaggaatttgcaaaaccagccacctgtttccaccgtgcctagagacagattggctatgcaggattgtcctttgatagctcaatcctcgttgattaatcatcaccctcaagagttcatagatccacttcatgagttctttgatttctctgatcatgttcctgttcagaatctacaagcagagagtagtggagtaagggtggactcatccgtggaacttcataagaaaagtgaatggcaagattgggcagatcagctgatttctgttgacgatggttctgagccaaattggtctgaacttcttggagattcaagttcccacaatccaaattcagagatacctacaccatttttggatgtaccaaggctagatataacagctaaccagcagcaacagatggtttcatcagaggaccagctcagcggcagaaactcatcatctagtgtagcaacatctaaacaacgtatgcgttggacaccagaacttcacgaggcattcgttgaagctgttaatcagcttggtggtagtgaacgagccacccctaaggctgttttgaagctcttgaataaccctggcttgaccatttatcatgtaaaaagccatttgcagaaatatagaacggcaaggtataaaccggagacttcggaagttacaggagaacctcaagagaagaagatgacatctattgaagatatcaaatctcttgacatgaaaacgagcgttgagatcacacaagctctacggttacaaatggaagtgcagaaacgtctccacgagcagctcgagatccaacggtcactgcagttacagattgaaaaacagggccggtacctacagatgatgttcgagaaacaacaaaagatacaagacaacaagagctcttcttcagaagcatcaccaaagcaatgcaatggttcatttgcagaagttgaagttggtcttgagacactaacaggggaccaaaatgaatctgcttcagcatcaaggaaacgtgtcagagaagattaaagcatgtttaatttgatctcgtttgacgaaacatgtttattgggaattaattgtggaaaccaactccagttttgttaaaagaatctgtttctttc

SEQ ID NO: 43684 - protein, 370 aa, Arabidopsis thaliana; identical to SEQ ID NO: 29235
  peptide (1)..(370): Ceres Seq. ID no. 12339573
  misc_feature (190)..(241): Pfam Name: Myb-like DNA-binding domain Pfam Description: Myb-like DNA-binding domain
  misc_feature (125)..(322): Homolog of NCBI NO: 4519671 NR Description: transfactor [Nicotiana tabacum]
  misc_feature (1)..(344): Homolog of NCBI NO: 6942190 NR Description: CDPK substrate protein 1; CSP1 [Mesembryanthemum
  misc_feature (81)..(336): Homolog of NCBI NO: 7487685 NR Description: hypothetical protein T5F17.60 - Arabidopsis
  misc_feature (81)..(336): Homolog of NCBI NO: 22329004 NR Description: putative protein
  misc_feature (1)..(334): Homolog of NCBI NO: 15229298 NR Description: transfactor, putative; protein id: At3g04450.1
  misc_feature (2)..(334): Homolog of NCBI NO: 26452281 NR Description: putative transfactor [Arabidopsis thaliana]
  misc_feature (1)..(370): Homolog of NCBI NO: 30692105 NR Description: expressed protein [Arabidopsis thaliana]
  misc_feature (1)..(370): Homolog of NCBI NO: 21954075 NR Description: unknown protein [Arabidopsis thaliana]
  misc_feature (1)..(370): Homolog of NCBI NO: 30692110 NR Description: expressed protein [Arabidopsis thaliana]
  misc_feature (1)..(370): Homolog of NCBI NO: 21537366 NR Description: transfactor, putative [Arabidopsis thaliana]

SEQ ID NO: 43685 - protein, 316 aa, Arabidopsis thaliana; identical to SEQ ID NO: 37572
  peptide (1)..(316): Ceres Seq. ID no. 12339574
  misc_feature (136)..(187): Pfam Name: Myb-like DNA-binding domain Pfam Description: Myb-like DNA-binding domain
  misc_feature (71)..(268): Homolog of NCBI NO: 4519671 NR Description: transfactor [Nicotiana tabacum]
  misc_feature (1)..(290): Homolog of NCBI NO: 6942190 NR Description: CDPK substrate protein 1; CSP1 [Mesembryanthemum
  misc_feature (27)..(282): Homolog of NCBI NO: 7487685 NR Description: hypothetical protein T5F17.60 - Arabidopsis
  misc_feature (27)..(282): Homolog of NCBI NO: 22329004 NR Description: putative protein
  misc_feature (1)..(280): Homolog of NCBI NO: 15229298 NR Description: transfactor, putative; protein id: At3g04450.1
  misc_feature (1)..(280): Homolog of NCBI NO: 26452281 NR Description: putative transfactor [Arabidopsis thaliana]
  misc_feature (1)..(316): Homolog of NCBI NO: 30692105 NR Description: expressed protein [Arabidopsis thaliana]
  misc_feature (1)..(316): Homolog of NCBI NO: 21954075 NR Description: unknown protein [Arabidopsis thaliana]
  misc_feature (1)..(316): Homolog of NCBI NO: 30692110 NR Description: expressed protein [Arabidopsis thaliana]
  misc_feature (1)..(316): Homolog of NCBI NO: 21537366 NR Description: transfactor, putative [Arabidopsis thaliana]

SEQ ID NO: 43686 - protein, 203 aa, Arabidopsis thaliana
  peptide (1)..(203): Ceres Seq. ID no. 12339575
  misc_feature (23)..(74): Pfam Name: Myb-like DNA-binding domain Pfam Description: Myb-like DNA-binding domain
  misc_feature (1)..(155): Homolog of NCBI NO: 4519671 NR Description: transfactor [Nicotiana tabacum]
  misc_feature (1)..(177): Homolog of NCBI NO: 6942190 NR Description: CDPK substrate protein 1; CSP1 [Mesembryanthemum
  misc_feature (1)..(169): Homolog of NCBI NO: 7487685 NR Description: hypothetical protein T5F17.60 - Arabidopsis
  misc_feature (1)..(169): Homolog of NCBI NO: 22329004 NR Description: putative protein
  misc_feature (1)..(167): Homolog of NCBI NO: 15229298 NR Description: transfactor, putative; protein id: At3g04450.1
  misc_feature (1)..(167): Homolog of NCBI NO: 26452281 NR Description: putative transfactor [Arabidopsis thaliana]
  misc_feature (1)..(203): Homolog of NCBI NO: 30692105 NR Description: expressed protein [Arabidopsis thaliana]
  misc_feature (1)..(203): Homolog of NCBI NO: 21954075 NR Description: unknown protein [Arabidopsis thaliana]
  misc_feature (1)..(203): Homolog of NCBI NO: 30692110 NR Description: expressed protein [Arabidopsis thaliana]
  misc_feature (1)..(203): Homolog of NCBI NO: 21537366 NR Description: transfactor, putative [Arabidopsis thaliana]
MVSSEDQLSGRNSSSSVATSKQRMRWTPELHEAFVEAVNQLGGSERATPKAVLKLLNNPGLTIYHVKSHLQKYRTARYKPETSEVTGEPQEKKMTSIEDIKSLDMKTSVEITQALRLQMEVQKRLHEQLEIQRSLQLQIEKQGRYLQMMFEKQQKIQDNKSSSSEASPKQCNGSFAEVEVGLETLTGDQNESASASRKRVRED

SEQ ID NO: 43687 - DNA, 1010 bp, Arabidopsis thaliana; identical to SEQ ID NO: 41607
  misc_feature (1)..(1010): Ceres Seq. ID no. 13646176
  misc_feature: MA Experiment ID: 108501 Result: Down-regulated in Transcription
  misc_feature: MA Experiment 108501 PARAMETER Experiment Name: At_ap2_floral_buds_cDNA_P Parameter: Plant Line Value: ap2 (Ler.)
  misc_feature: MA Experiment 108501 PARAMETER Experiment Name: At_ap2_floral_buds_cDNA_P Parameter: Tissue Value: Closed Flower
  misc_feature: MA Experiment ID: 20000113 Result: Down-regulated in Transcription
  misc_feature: MA Experiment 20000113 PARAMETER Experiment Name: At_42deg_Heat_cDNA_P Parameter: Temperature (deg C) Value: 42 vs. 22
  misc_feature: MA Experiment 20000113 PARAMETER Experiment Name: At_42deg_Heat_cDNA_P Parameter: Timepoint (hr) Value: 8
  misc_feature: MA Experiment 20000113 PARAMETER Experiment Name: At_42deg_Heat_cDNA_P Parameter: Tissue Value: Aerial
  misc_feature: MA Experiment ID: 20000234 Result: Up-regulated in Transcription
  misc_feature: MA Experiment 20000234 PARAMETER Experiment Name: At_Siliques_P Parameter: Age (day) Value: 21
  misc_feature: MA Experiment 20000234 PARAMETER Experiment Name: At_Siliques_P Parameter: Organism Value: A. thaliana
  misc_feature: MA Experiment 20000234 PARAMETER Experiment Name: At_Siliques_P Parameter: Plant Line Value: WS
  misc_feature: MA Experiment 20000234 PARAMETER Experiment Name: At_Siliques_P Parameter: Tissue Value: Less Than 5mm Siliques vs. Whole Plant
  misc_feature: MA Experiment ID: 20000235 Result: Up-regulated in Transcription
  misc_feature: MA Experiment 20000235 PARAMETER Experiment Name: At_Siliques_P Parameter: Age (day) Value: 21
  misc_feature: MA Experiment 20000235 PARAMETER Experiment Name: At_Siliques_P Parameter: Organism Value: A. thaliana
  misc_feature: MA Experiment 20000235 PARAMETER Experiment Name: At_Siliques_P Parameter: Plant Line Value: WS
  misc_feature: MA Experiment 20000235 PARAMETER Experiment Name: At_Siliques_P Parameter: Tissue Value: 5-10mm Siliques vs. Whole Plant
  misc_feature: MA Experiment ID: 20000264 Result: Up-regulated in Transcription
  misc_feature: MA Experiment 20000264 PARAMETER Experiment Name: At_Open_Flower_P Parameter: Age (day) Value: 21
  misc_feature: MA Experiment 20000264 PARAMETER Experiment Name: At_Open_Flower_P Parameter: Plant Line Value: WS
  misc_feature: MA Experiment 20000264 PARAMETER Experiment Name: At_Open_Flower_P Parameter: Tissue Value: Open Flower vs. Whole Plant
  misc_feature: MA Experiment ID: 20000265 Result: Up-regulated in Transcription
  misc_feature: MA Experiment 20000265 PARAMETER Experiment Name: At_Open_Flower_P Parameter: Age (day) Value: 21
  misc_feature: MA Experiment 20000265 PARAMETER Experiment Name: At_Open_Flower_P Parameter: Plant Line Value: WS
  misc_feature: MA Experiment 20000265 PARAMETER Experiment Name: At_Open_Flower_P Parameter: Tissue Value: Closed Flower vs. Whole Plant
  misc_feature: MA Experiment ID: 20000286 Result: Up-regulated in Transcription
  misc_feature: MA Experiment 20000286 PARAMETER Experiment Name: At_Open_Flower_P Parameter: Age (day) Value: 21
  misc_feature: MA Experiment 20000286 PARAMETER Experiment Name: At_Open_Flower_P Parameter: Plant Line Value: WS
  misc_feature: MA Experiment 20000286 PARAMETER Experiment Name: At_Open_Flower_P Parameter: Tissue Value: Half Open vs. Whole Plant
  misc_feature: MA Experiment ID: 20000794 Result: Up-regulated in Transcription
  misc_feature: MA Experiment 20000794 PARAMETER Experiment Name: At_Petals_P Parameter: Age (day) Value: 23-25 days
  misc_feature: MA Experiment 20000794 PARAMETER Experiment Name: At_Petals_P Parameter: Plant Line Value: WS
  misc_feature: MA Experiment 20000794 PARAMETER Experiment Name: At_Petals_P Parameter: Tissue Value: Petals vs. Whole plant

SEQ ID NO: 43688 - protein, 251 aa, Arabidopsis thaliana; identical to SEQ ID NO: 41608
  peptide (1)..(251): Ceres Seq. ID no. 13646177
  misc_feature (90)..(189): Pfam Name: K-box region Pfam Description: K-box region
  misc_feature (90)..(189): Pfam Name: K-box region Pfam Description: K-box region
  misc_feature (20)..(251): Homolog of NCBI NO: 5805240 NR Description: floral homeotic protein AP3 [Arabidopsis thaliana]
  misc_feature (20)..(251): Homolog of NCBI NO: 21592970 NR Description: floral homeotic protein APETALA3 (AP3)
  misc_feature (20)..(251): Homolog of NCBI NO: 5805238 NR Description: floral homeotic protein AP3 [Arabidopsis thaliana]
  misc_feature (20)..(251): Homolog of NCBI NO: 5805228 NR Description: floral homeotic protein AP3 [Arabidopsis thaliana]
  misc_feature (20)..(251): Homolog of NCBI NO: 5805234 NR Description: floral homeotic protein AP3 [Arabidopsis thaliana]
  misc_feature (20)..(251): Homolog of NCBI NO: 5805240 NR Description: floral homeotic protein AP3 [Arabidopsis thaliana]
  misc_feature (20)..(251): Homolog of NCBI NO: 5805238 NR Description: floral homeotic protein AP3 [Arabidopsis thaliana]
  misc_feature (20)..(251): Homolog of NCBI NO: 5805234 NR Description: floral homeotic protein AP3 [Arabidopsis thaliana]
  misc_feature (20)..(251): Homolog of NCBI NO: 15232493 NR Description: floral homeotic protein APETALA3 (AP3)
  misc_feature (20)..(251): Homolog of NCBI NO: 5805230 NR Description: floral homeotic protein AP3 [Arabidopsis thaliana]
  misc_feature (20)..(251): Homolog of NCBI NO: 5805210 NR Description: floral homeotic protein AP3 [Arabidopsis
  misc_feature (20)..(251): Homolog of NCBI NO: 1384044 NR Description: APETALA3 [Arabidopsis thaliana]
  misc_feature (20)..(251): Homolog of NCBI NO: 5805226 NR Description: floral homeotic protein AP3 [Arabidopsis thaliana]
  misc_feature (20)..(251): Homolog of NCBI NO: 5805228 NR Description: floral homeotic protein AP3 [Arabidopsis thaliana]
  misc_feature (20)..(251): Homolog of NCBI NO: 21592970 NR Description: floral homeotic protein APETALA3 (AP3)
  misc_feature (20)..(251): Homolog of NCBI NO: 5805226 NR Description: floral homeotic protein AP3 [Arabidopsis thaliana]
  misc_feature (20)..(251): Homolog of NCBI NO: 1384044 NR Description: APETALA3 [Arabidopsis thaliana]
  misc_feature (20)..(251): Homolog of NCBI NO: 5805210 NR Description: floral homeotic protein AP3 [Arabidopsis
  misc_feature (20)..(251): Homolog of NCBI NO: 5805230 NR Description: floral homeotic protein AP3 [Arabidopsis thaliana]
  misc_feature (20)..(251): Homolog of NCBI NO: 15232493 NR Description: floral homeotic protein APETALA3 (AP3)

SEQ ID NO: 43689 - protein, 232 aa, Arabidopsis thaliana; identical to SEQ ID NO: 41609
  peptide (1)..(232): Ceres Seq. ID no. 13646178
  misc_feature (71)..(170): Pfam Name: K-box region Pfam Description: K-box region
  misc_feature (71)..(170): Pfam Name: K-box region Pfam Description: K-box region
  misc_feature (1)..(232): Homolog of NCBI NO: 5805240 NR Description: floral homeotic protein AP3 [Arabidopsis thaliana]
  misc_feature (1)..(232): Homolog of NCBI NO: 21592970 NR Description: floral homeotic protein APETALA3 (AP3)
  misc_feature (1)..(232): Homolog of NCBI NO: 5805238 NR Description: floral homeotic protein AP3 [Arabidopsis thaliana]
  misc_feature (1)..(232): Homolog of NCBI NO: 5805228 NR Description: floral homeotic protein AP3 [Arabidopsis thaliana]
  misc_feature (1)..(232): Homolog of NCBI NO: 5805226 NR Description: floral homeotic protein AP3 [Arabidopsis thaliana]
  misc_feature (1)..(232): Homolog of NCBI NO: 5805240 NR Description: floral homeotic protein AP3 [Arabidopsis thaliana]
  misc_feature (1)..(232): Homolog of NCBI NO: 5805238 NR Description: floral homeotic protein AP3 [Arabidopsis thaliana]
  misc_feature (1)..(232): Homolog of NCBI NO: 5805226 NR Description: floral homeotic protein AP3 [Arabidopsis thaliana]
  misc_feature (1)..(232): Homolog of NCBI NO: 15232493 NR Description: floral homeotic protein APETALA3 (AP3)
  misc_feature (1)..(232): Homolog of NCBI NO: 5805230 NR Description: floral homeotic protein AP3 [Arabidopsis thaliana]
  misc_feature (1)..(232): Homolog of NCBI NO: 5805210 NR Description: floral homeotic protein AP3 [Arabidopsis
  misc_feature (1)..(232): Homolog of NCBI NO: 1384044 NR Description: APETALA3 [Arabidopsis thaliana]
  misc_feature (1)..(232): Homolog of NCBI NO: 5805234 NR Description: floral homeotic protein AP3 [Arabidopsis thaliana]
  misc_feature (1)..(232): Homolog of NCBI NO: 5805228 NR Description: floral homeotic protein AP3 [Arabidopsis thaliana]
  misc_feature (1)..(232): Homolog of NCBI NO: 21592970 NR Description: floral homeotic protein APETALA3 (AP3)
  misc_feature (1)..(232): Homolog of NCBI NO: 5805234 NR Description: floral homeotic protein AP3 [Arabidopsis thaliana]
  misc_feature (1)..(232): Homolog of NCBI NO: 1384044 NR Description: APETALA3 [Arabidopsis thaliana]
  misc_feature (1)..(232): Homolog of NCBI NO: 5805210 NR Description: floral homeotic protein AP3 [Arabidopsis
  misc_feature (1)..(232): Homolog of NCBI NO: 5805230 NR Description: floral homeotic protein AP3 [Arabidopsis thaliana]
  misc_feature (1)..(232): Homolog of NCBI NO: 15232493 NR Description: floral homeotic protein APETALA3 (AP3)

SEQ ID NO: 43690 - protein, 186 aa, Arabidopsis thaliana; identical to SEQ ID NO: 41610
  peptide (1)..(186): Ceres Seq. ID no. 13646179
  misc_feature (25)..(124): Pfam Name: K-box region Pfam Description: K-box region
  misc_feature (25)..(124): Pfam Name: K-box region Pfam Description: K-box region
  misc_feature (1)..(186): Homolog of NCBI NO: 5805240 NR Description: floral homeotic protein AP3 [Arabidopsis thaliana]
  misc_feature (1)..(186): Homolog of NCBI NO: 21592970 NR Description: floral homeotic protein APETALA3 (AP3)
  misc_feature (1)..(186): Homolog of NCBI NO: 5805238 NR Description: floral homeotic protein AP3 [Arabidopsis thaliana]
  misc_feature (1)..(186): Homolog of NCBI NO: 5805228 NR Description: floral homeotic protein AP3 [Arabidopsis thaliana]
  misc_feature (1)..(186): Homolog of NCBI NO: 5805234 NR Description: floral homeotic protein AP3 [Arabidopsis thaliana]
  misc_feature (1)..(186): Homolog of NCBI NO: 5805240 NR Description: floral homeotic protein AP3 [Arabidopsis thaliana]
  misc_feature (1)..(186): Homolog of NCBI NO: 5805238 NR Description: floral homeotic protein AP3 [Arabidopsis thaliana]
  misc_feature (1)..(186): Homolog of NCBI NO: 5805234 NR Description: floral homeotic protein AP3 [Arabidopsis thaliana]
  misc_feature (1)..(186): Homolog of NCBI NO: 15232493 NR Description: floral homeotic protein APETALA3 (AP3)
  misc_feature (1)..(186): Homolog of NCBI NO: 5805230 NR Description: floral homeotic protein AP3 [Arabidopsis thaliana]
  misc_feature (1)..(186): Homolog of NCBI NO: 5805210 NR Description: floral homeotic protein AP3 [Arabidopsis
  misc_feature (1)..(186): Homolog of NCBI NO: 1384044 NR Description: APETALA3 [Arabidopsis thaliana]
  misc_feature (1)..(186): Homolog of NCBI NO: 5805226 NR Description: floral homeotic protein AP3 [Arabidopsis thaliana]
  misc_feature (1)..(186): Homolog of NCBI NO: 5805228 NR Description: floral homeotic protein AP3 [Arabidopsis thaliana]
  misc_feature (1)..(186): Homolog of NCBI NO: 21592970 NR Description: floral homeotic protein APETALA3 (AP3)
  misc_feature (1)..(186): Homolog of NCBI NO: 5805226 NR Description: floral homeotic protein AP3 [Arabidopsis thaliana]
  misc_feature (1)..(186): Homolog of NCBI NO: 1384044 NR Description: APETALA3 [Arabidopsis thaliana]
  misc_feature (1)..(186): Homolog of NCBI NO: 5805210 NR Description: floral homeotic protein AP3 [Arabidopsis
  misc_feature (1)..(186): Homolog of NCBI NO: 5805230 NR Description: floral homeotic protein AP3 [Arabidopsis thaliana]
  misc_feature (1)..(186): Homolog of NCBI NO: 15232493 NR Description: floral homeotic protein APETALA3 (AP3)

SEQ ID NO: 43691 - DNA, 1152 bp, Arabidopsis thaliana
  misc_feature (1)..(1152): Ceres Seq. ID no. 12336310
  misc_feature: MA Experiment ID: 20000182 Result: Up-regulated in Transcription
  misc_feature: MA Experiment 20000182 PARAMETER Experiment Name: At_2mM_SA_P Parameter: Age (day) Value: 14
  misc_feature: MA Experiment 20000182 PARAMETER Experiment Name: At_2mM_SA_P Parameter: Organism Value: A. thaliana
  misc_feature: MA Experiment 20000182 PARAMETER Experiment Name: At_2mM_SA_P Parameter: Plant Line Value: WS
  misc_feature: MA Experiment 20000182 PARAMETER Experiment Name: At_2mM_SA_P Parameter: Timepoint (hr) Value: 6
  misc_feature: MA Experiment 20000182 PARAMETER Experiment Name: At_2mM_SA_P Parameter: Tissue Value: Aerial
  misc_feature: MA Experiment 20000182 PARAMETER Experiment Name: At_2mM_SA_P Parameter: Treatment Value: 2mM SA vs. No Treatment
  misc_feature: MA Experiment ID: 20000184 Result: Down-regulated in Transcription
  misc_feature: MA Experiment 20000184 PARAMETER Experiment Name: At_Shoots__P Parameter: Age (day) Value: 7
  misc_feature: MA Experiment 20000184 PARAMETER Experiment Name: At_Shoots__P Parameter: Tissue Value: Shoots vs. Whole Plant
  misc_feature: MA Experiment ID: 20000227 Result: Down-regulated in Transcription
  misc_feature: MA Experiment 20000227 PARAMETER Experiment Name: At_Root-Tips-vs-Tops_P Parameter: Tissue Value: Root Tips vs. Root Tops
  misc_feature: MA Experiment ID: 20000235 Result: Down-regulated in Transcription
  misc_feature: MA Experiment 20000235 PARAMETER Experiment Name: At_Siliques_P Parameter: Age (day) Value: 21
  misc_feature: MA Experiment 20000235 PARAMETER Experiment Name: At_Siliques_P Parameter: Organism Value: A. thaliana
  misc_feature: MA Experiment 20000235 PARAMETER Experiment Name: At_Siliques_P Parameter: Plant Line Value: WS
  misc_feature: MA Experiment 20000235 PARAMETER Experiment Name: At_Siliques_P Parameter: Tissue Value: 5-10mm Siliques vs. Whole Plant
  misc_feature: MA Experiment ID: 20000436 Result: Up-regulated in Transcription
  misc_feature: MA Experiment 20000436 PARAMETER Experiment Name: At_Drought_P Parameter: Age (day) Value: 7
  misc_feature: MA Experiment 20000436 PARAMETER Experiment Name: At_Drought_P Parameter: Organism Value: A. thaliana
  misc_feature: MA Experiment 20000436 PARAMETER Experiment Name: At_Drought_P Parameter: Plant Line Value: WS
  misc_feature: MA Experiment 20000436 PARAMETER Experiment Name: At_Drought_P Parameter: Timepoint (hr) Value: 12
  misc_feature: MA Experiment 20000436 PARAMETER Experiment Name: At_Drought_P Parameter: Tissue Value: Whole Plant
  misc_feature: MA Experiment 20000436 PARAMETER Experiment Name: At_Drought_P Parameter: Treatment Value: Drought vs. No Drought
  misc_feature: MA Experiment ID: 20000437 Result: Up-regulated in Transcription
  misc_feature: MA Experiment 20000437 PARAMETER Experiment Name: At_Drought_P Parameter: Age (day) Value: 8
  misc_feature: MA Experiment 20000437 PARAMETER Experiment Name: At_Drought_P Parameter: Organism Value: A. thaliana
  misc_feature: MA Experiment 20000437 PARAMETER Experiment Name: At_Drought_P Parameter: Plant Line Value: WS
  misc_feature: MA Experiment 20000437 PARAMETER Experiment Name: At_Drought_P Parameter: Timepoint (hr) Value: 24
  misc_feature: MA Experiment 20000437 PARAMETER Experiment Name: At_Drought_P Parameter: Tissue Value: Whole Plant
  misc_feature: MA Experiment 20000437 PARAMETER Experiment Name: At_Drought_P Parameter: Treatment Value: Drought vs. No Drought
  misc_feature: MA Experiment ID: 20000438 Result: Down-regulated in Transcription
  misc_feature: MA Experiment 20000438 PARAMETER Experiment Name: At_Shoots__P Parameter: Age (day) Value: 14
  misc_feature: MA Experiment 20000438 PARAMETER Experiment Name: At_Shoots__P Parameter: Tissue Value: Shoots vs. Whole Plant
  misc_feature: MA Experiment ID: 20000460 Result: Up-regulated in Transcription
  misc_feature: MA Experiment 20000460 PARAMETER Experiment Name: At_10percent_PEG_P Parameter: Age (day) Value: 12
  misc_feature: MA Experiment 20000460 PARAMETER Experiment Name: At_10percent_PEG_P Parameter: Organism Value: A. thaliana
  misc_feature: MA Experiment 20000460 PARAMETER Experiment Name: At_10percent_PEG_P Parameter: Plant Line Value: WS
  misc_feature: MA Experiment 20000460 PARAMETER Experiment Name: At_10percent_PEG_P Parameter: Timepoint (day) Value: 12
  misc_feature: MA Experiment 20000460 PARAMETER Experiment Name: At_10percent_PEG_P Parameter: Tissue Value: Whole Plant
  misc_feature: MA Experiment 20000460 PARAMETER Experiment Name: At_10percent_PEG_P Parameter: Treatment Value: 10percent PEG vs. No Treatment
  misc_feature: MA Experiment ID: 20000495 Result: Down-regulated in Transcription
  misc_feature: MA Experiment 20000495 PARAMETER Experiment Name: At_Guard_Cells_P Parameter: Harvest Date Value: 8/2/2002
  misc_feature: MA Experiment 20000495 PARAMETER Experiment Name: At_Guard_Cells_P Parameter: Organism Value: A. thaliana
  misc_feature: MA Experiment 20000495 PARAMETER Experiment Name: At_Guard_Cells_P Parameter: Tissue Value: Guard Cells vs. Leaves
  misc_feature: MA Experiment ID: 20000527 Result: Up-regulated in Transcription
  misc_feature: MA Experiment 20000527 PARAMETER Experiment Name: At_10percent_PEG_P Parameter: Age (day) Value: 20
  misc_feature: MA Experiment 20000527 PARAMETER Experiment Name: At_10percent_PEG_P Parameter: Organism Value: A. thaliana
  misc_feature: MA Experiment 20000527 PARAMETER Experiment Name: At_10percent_PEG_P Parameter: Plant Line Value: WS
  misc_feature: MA Experiment 20000527 PARAMETER Experiment Name: At_10percent_PEG_P Parameter: Timepoint (day) Value: 20
  misc_feature: MA Experiment 20000527 PARAMETER Experiment Name: At_10percent_PEG_P Parameter: Tissue Value: Whole Plant
  misc_feature: MA Experiment 20000527 PARAMETER Experiment Name: At_10percent_PEG_P Parameter: Treatment Value: 10percent PEG vs. No Treatment
  misc_feature: MA Experiment ID: 20000794 Result: Down-regulated in Transcription
  misc_feature: MA Experiment 20000794 PARAMETER Experiment Name: At_Petals_P Parameter: Age (day) Value: 23-25 days
  misc_feature: MA Experiment 20000794 PARAMETER Experiment Name: At_Petals_P Parameter: Plant Line Value: WS
  misc_feature: MA Experiment 20000794 PARAMETER Experiment Name: At_Petals_P Parameter: Tissue Value: Petals vs. Whole plant
  misc_feature: MA Experiment ID: 20001905 Result: Up-regulated in Transcription
  misc_feature: MA Experiment 20001905 PARAMETER Experiment Name: At_Drought_Reproduction_P Parameter: Age (day) Value: 40
  misc_feature: MA Experiment 20001905 PARAMETER Experiment Name: At_Drought_Reproduction_P Parameter: Organism Value: A. thaliana
  misc_feature: MA Experiment 20001905 PARAMETER Experiment Name: At_Drought_Reproduction_P Parameter: Plant Line Value: WS
  misc_feature: MA Experiment 20001905 PARAMETER Experiment Name: At_Drought_Reproduction_P Parameter: Timepoint (day) Value: 10
  misc_feature: MA Experiment 20001905 PARAMETER Experiment Name: At_Drought_Reproduction_P Parameter: Tissue Value: Rosettes
  misc_feature: MA Experiment 20001905 PARAMETER Experiment Name: At_Drought_Reproduction_P Parameter: Treatment Value: Drought vs. No Drought
acagagatatcttcctctctactttttcgccaccatctctcccatctctcctctctctctttgagttgcgactatgtccggcgaaaactggattcgagtggccatgtctgacgattccatggtggcggaggcgcttcttcggctccgccactccgaaccgaagaatagagtcgacgcgtcccctctcaagctgaaatggagcgtgcgtcaacggagatcgaagaaaggagaccagacgcgagcaagccccaccacaccgctttcctggagcggtgccacgtctcttagcggcggaggcggcagcggtggaagcggcgccggtgctaccaccatggaaggcctcgaggagtctagcgccgccgtaaaaccctctgagccatttagatctaagatttctcaaacgagtgcaataacaacaacaacaacaacaacccttttcaagagatcaagaaagaagaagactttggctgagcttaaagaggaagagatcatgctcttgaaggaaagtaacggcctgaaaaatgaattggcaaatatgcgcgatttgctcgagcaacaaagagcaagaaacactgctctaaagaagatgaaggctgaatcacaatctgccttatcgtgcaaactcactttcgaacaaggttcttccttcttgctccctgacctaaacatgcctctagataacgacccgagccctgaagttgtctgctgaacgggcgagccacaagcatatcattcttttgtttttcccattacacaacactataccactatacctcctccgtccacaaacatgttttttgaactgtaactatatgaatatgaagaacgtagattaatcctatatatccttcacccatatcccggtggaagctgaagaagattcgcctgaaggtgaagtggttcgagactatggttaagtgtgttaacaatatcttctagtttagctggtagtaagatttttgttctgccaatctcctaaatgattcttatctttctcccattttattaggatgagatgtaattatctacttagataatagatgtacaccttttttttttttttgttctttcttattatctctggtaagatgtattacatcgacatttataatcagtgtaacacgttccaaacattttactatattttgtatt

SEQ ID NO: 43692 - protein, 211 aa, Arabidopsis thaliana
  peptide (1)..(211): Ceres Seq. ID no. 12336311
  misc_feature (1)..(146): Homolog of NCBI NO: 18420894 NR Description: putative protein
  misc_feature (4)..(178): Homolog of NCBI NO: 15236647 NR Description: putative protein
  misc_feature (1)..(125): Homolog of NCBI NO: 25402801 NR Description: protein F7H2.14 [imported] - Arabidopsis thaliana
  misc_feature (85)..(208): Homolog of NCBI NO: 25402801 NR Description: protein F7H2.14 [imported] - Arabidopsis thaliana
  misc_feature (1)..(107): Homolog of NCBI NO: 25406677 NR Description: hypothetical protein T21F11.6 [imported] -
  misc_feature (103)..(208): Homolog of NCBI NO: 15218326 NR Description: hypothetical protein; protein id: At1g15800.1
  misc_feature (1)..(107): Homolog of NCBI NO: 15218326 NR Description: hypothetical protein; protein id: At1g15800.1
  misc_feature (1)..(211): Homolog of NCBI NO: 22330774 NR Description: hypothetical protein
MSGENWIRVAMSDDSMVAEALLRLRHSEPKNRVDASPLKLKWSVRQRRSKKGDQTRASPTTPLSWSGATSLSGGGGSGGSGAGATTMEGLEESSAAVKPSEPFRSKISQTSAITTTTTTTLFKRSRKKKTLAELKEEEIMLLKESNGLKNELANMRDLLEQQRARNTALKKMKAESQSALSCKLTFEQGSSFLLPDLNMPLDNDPSPEVVC

SEQ ID NO: 43693 - protein, 201 aa, Arabidopsis thaliana
  peptide (1)..(201): Ceres Seq. ID no. 12336312
  misc_feature (1)..(136): Homolog of NCBI NO: 18420894 NR Description: putative protein
  misc_feature (1)..(168): Homolog of NCBI NO: 15236647 NR Description: putative protein
  misc_feature (1)..(115): Homolog of NCBI NO: 25402801 NR Description: protein F7H2.14 [imported] - Arabidopsis thaliana
  misc_feature (75)..(198): Homolog of NCBI NO: 25402801 NR Description: protein F7H2.14 [imported] - Arabidopsis thaliana
  misc_feature (1)..(97): Homolog of NCBI NO: 25406677 NR Description: hypothetical protein T21F11.6 [imported] -
  misc_feature (93)..(198): Homolog of NCBI NO: 15218326 NR Description: hypothetical protein; protein id: At1g15800.1
  misc_feature (1)..(97): Homolog of NCBI NO: 15218326 NR Description: hypothetical protein; protein id: At1g15800.1
  misc_feature (1)..(201): Homolog of NCBI NO: 22330774 NR Description: hypothetical protein
MSDDSMVAEALLRLRHSEPKNRVDASPLKLKWSVRQRRSKKGDQTRASPTTPLSWSGATSLSGGGGSGGSGAGATTMEGLEESSAAVKPSEPFRSKISQTSAITTTTTTTLFKRSRKKKTLAELKEEEIMLLKESNGLKNELANMRDLLEQQRARNTALKKMKAESQSALSCKLTFEQGSSFLLPDLNMPLDNDPSPEVVC

SEQ ID NO: 43694 - protein, 196 aa, Arabidopsis thaliana
  peptide (1)..(196): Ceres Seq. ID no. 12336313
  misc_feature (1)..(131): Homolog of NCBI NO: 18420894 NR Description: putative protein
  misc_feature (1)..(163): Homolog of NCBI NO: 15236647 NR Description: putative protein
  misc_feature (1)..(110): Homolog of NCBI NO: 25402801 NR Description: protein F7H2.14 [imported] - Arabidopsis thaliana
  misc_feature (70)..(193): Homolog of NCBI NO: 25402801 NR Description: protein F7H2.14 [imported] - Arabidopsis thaliana
  misc_feature (1)..(92): Homolog of NCBI NO: 25406677 NR Description: hypothetical protein T21F11.6 [imported] -
  misc_feature (88)..(193): Homolog of NCBI NO: 15218326 NR Description: hypothetical protein; protein id: At1g15800.1
  misc_feature (1)..(92): Homolog of NCBI NO: 15218326 NR Description: hypothetical protein; protein id: At1g15800.1
  misc_feature (1)..(196): Homolog of NCBI NO: 22330774 NR Description: hypothetical protein
MVAEALLRLRHSEPKNRVDASPLKLKWSVRQRRSKKGDQTRASPTTPLSWSGATSLSGGGGSGGSGAGATTMEGLEESSAAVKPSEPFRSKISQTSAITTTTTTTLFKRSRKKKTLAELKEEEIMLLKESNGLKNELANMRDLLEQQRARNTALKKMKAESQSALSCKLTFEQGSSFLLPDLNMPLDNDPSPEVVC

SEQ ID NO: 43695 - DNA, 1954 bp, Arabidopsis thaliana
  misc_feature (1)..(1954): Ceres Seq. ID no. 13575154
  misc_feature: MA Experiment ID: 20000169 Result: Up-regulated in Transcription
  misc_feature: MA Experiment 20000169 PARAMETER Experiment Name: At_100uM_ABA_P Parameter: Age (day) Value: 14
  misc_feature: MA Experiment 20000169 PARAMETER Experiment Name: At_100uM_ABA_P Parameter: Organism Value: A. thaliana
  misc_feature: MA Experiment 20000169 PARAMETER Experiment Name: At_100uM_ABA_P Parameter: Plant Line Value: WS
  misc_feature: MA Experiment 20000169 PARAMETER Experiment Name: At_100uM_ABA_P Parameter: Timepoint (hr) Value: 6
  misc_feature: MA Experiment 20000169 PARAMETER Experiment Name: At_100uM_ABA_P Parameter: Tissue Value: Aerial
  misc_feature: MA Experiment 20000169 PARAMETER Experiment Name: At_100uM_ABA_P Parameter: Treatment Value: 100uM ABA vs. No Treatment
  misc_feature: MA Experiment ID: 20000173 Result: Down-regulated in Transcription
  misc_feature: MA Experiment 20000173 PARAMETER Experiment Name: At_42deg_Heat_P Parameter: Age (day) Value: 14
  misc_feature: MA Experiment 20000173 PARAMETER Experiment Name: At_42deg_Heat_P Parameter: Organism Value: A. thaliana
  misc_feature: MA Experiment 20000173 PARAMETER Experiment Name: At_42deg_Heat_P Parameter: Plant Line Value: WS
  misc_feature: MA Experiment 20000173 PARAMETER Experiment Name: At_42deg_Heat_P Parameter: Temperature (deg C) Value: 42 vs. 22
  misc_feature: MA Experiment 20000173 PARAMETER Experiment Name: At_42deg_Heat_P Parameter: Timepoint (hr) Value: 6
  misc_feature: MA Experiment 20000173 PARAMETER Experiment Name: At_42deg_Heat_P Parameter: Tissue Value: Aerial
  misc_feature: MA Experiment ID: 20000179 Result: Down-regulated in Transcription
  misc_feature: MA Experiment 20000179 PARAMETER Experiment Name: At_Germinating_Seeds_P Parameter: Age (hr) Value: 6 vs. 0
  misc_feature: MA Experiment 20000179 PARAMETER Experiment Name: At_Germinating_Seeds_P Parameter: Tissue Value: Germinating Seeds
  misc_feature: MA Experiment ID: 20000182 Result: Up-regulated in Transcription
  misc_feature: MA Experiment 20000182 PARAMETER Experiment Name: At_2mM_SA_P Parameter: Age (day) Value: 14
  misc_feature: MA Experiment 20000182 PARAMETER Experiment Name: At_2mM_SA_P Parameter: Organism Value: A. thaliana
  misc_feature: MA Experiment 20000182 PARAMETER Experiment Name: At_2mM_SA_P Parameter: Plant Line Value: WS
  misc_feature: MA Experiment 20000182 PARAMETER Experiment Name: At_2mM_SA_P Parameter: Timepoint (hr) Value: 6
  misc_feature: MA Experiment 20000182 PARAMETER Experiment Name: At_2mM_SA_P Parameter: Tissue Value: Aerial
  misc_feature: MA Experiment 20000182 PARAMETER Experiment Name: At_2mM_SA_P Parameter: Treatment Value: 2mM SA vs. No Treatment
  misc_feature: MA Experiment ID: 20000185 Result: Down-regulated in Transcription
  misc_feature: MA Experiment 20000185 PARAMETER Experiment Name: At_Roots__P Parameter: Age (day) Value: 7 vs. 21
  misc_feature: MA Experiment 20000185 PARAMETER Experiment Name: At_Roots__P Parameter: Organism Value: A. thaliana
  misc_feature: MA Experiment 20000185 PARAMETER Experiment Name: At_Roots__P Parameter: Tissue Value: Roots vs. Whole Plant
  misc_feature: MA Experiment ID: 20000234 Result: Down-regulated in Transcription
  misc_feature: MA Experiment 20000234 PARAMETER Experiment Name: At_Siliques_P Parameter: Age (day) Value: 21
  misc_feature: MA Experiment 20000234 PARAMETER Experiment Name: At_Siliques_P Parameter: Organism Value: A. thaliana
  misc_feature: MA Experiment 20000234 PARAMETER Experiment Name: At_Siliques_P Parameter: Plant Line Value: WS
  misc_feature: MA Experiment 20000234 PARAMETER Experiment Name: At_Siliques_P Parameter: Tissue Value: Less Than 5mm Siliques vs. Whole Plant
  misc_feature: MA Experiment ID: 20000235 Result: Down-regulated in Transcription
  misc_feature: MA Experiment 20000235 PARAMETER Experiment Name: At_Siliques_P Parameter: Age (day) Value: 21
  misc_feature: MA Experiment 20000235 PARAMETER Experiment Name: At_Siliques_P Parameter: Organism Value: A. thaliana
  misc_feature: MA Experiment 20000235 PARAMETER Experiment Name: At_Siliques_P Parameter: Plant Line Value: WS
  misc_feature: MA Experiment 20000235 PARAMETER Experiment Name: At_Siliques_P Parameter: Tissue Value: 5-10mm Siliques vs. Whole Plant
  misc_feature: MA Experiment ID: 20000264 Result: Down-regulated in Transcription
  misc_feature: MA Experiment 20000264 PARAMETER Experiment Name: At_Open_Flower_P Parameter: Age (day) Value: 21
  misc_feature: MA Experiment 20000264 PARAMETER Experiment Name: At_Open_Flower_P Parameter: Plant Line Value: WS
  misc_feature: MA Experiment 20000264 PARAMETER Experiment Name: At_Open_Flower_P Parameter: Tissue Value: Open Flower vs. Whole Plant
  misc_feature: MA Experiment ID: 20000267 Result: Up-regulated in Transcription
  misc_feature: MA Experiment 20000267 PARAMETER Experiment Name: At_Drought_P Parameter: Age (day) Value: 7
  misc_feature: MA Experiment 20000267 PARAMETER Experiment Name: At_Drought_P Parameter: Organism Value: A. thaliana
  misc_feature: MA Experiment 20000267 PARAMETER Experiment Name: At_Drought_P Parameter: Plant Line Value: WS
  misc_feature: MA Experiment 20000267 PARAMETER Experiment Name: At_Drought_P Parameter: Timepoint (hr) Value: 6
  misc_feature: MA Experiment 20000267 PARAMETER Experiment Name: At_Drought_P Parameter: Tissue Value: Whole Plant
  misc_feature: MA Experiment 20000267 PARAMETER Experiment Name: At_Drought_P Parameter: Treatment Value: Drought vs. No Drought
  misc_feature: MA Experiment ID: 20000268 Result: Up-regulated in Transcription
  misc_feature: MA Experiment 20000268 PARAMETER Experiment Name: At_100mM_NaCl__P Parameter: Age (day) Value: 14
  misc_feature: MA Experiment 20000268 PARAMETER Experiment Name: At_100mM_NaCl__P Parameter: Organism Value: A. thaliana
  misc_feature: MA Experiment 20000268 PARAMETER Experiment Name: At_100mM_NaCl__P Parameter: Plant Line Value: WS
  misc_feature: MA Experiment 20000268 PARAMETER Experiment Name: At_100mM_NaCl__P Parameter: Timepoint (hr) Value: 6
  misc_feature: MA Experiment 20000268 PARAMETER Experiment Name: At_100mM_NaCl__P Parameter: Tissue Value: Whole Plant
  misc_feature: MA Experiment 20000268 PARAMETER Experiment Name: At_100mM_NaCl__P Parameter: Treatment Value: 100mM NaCl vs. No Treatment
  misc_feature: MA Experiment ID: 20000286 Result: Down-regulated in Transcription
  misc_feature: MA Experiment 20000286 PARAMETER Experiment Name: At_Open_Flower_P Parameter: Age (day) Value: 21
  misc_feature: MA Experiment 20000286 PARAMETER Experiment Name: At_Open_Flower_P Parameter: Plant Line Value: WS
  misc_feature: MA Experiment 20000286 PARAMETER Experiment Name: At_Open_Flower_P Parameter: Tissue Value: Half Open vs. Whole Plant
  misc_feature: MA Experiment ID: 20000436 Result: Up-regulated in Transcription
  misc_feature: MA Experiment 20000436 PARAMETER Experiment Name: At_Drought_P Parameter: Age (day) Value: 7
  misc_feature: MA Experiment 20000436 PARAMETER Experiment Name: At_Drought_P Parameter: Organism Value: A. thaliana
  misc_feature: MA Experiment 20000436 PARAMETER Experiment Name: At_Drought_P Parameter: Plant Line Value: WS
  misc_feature: MA Experiment 20000436 PARAMETER Experiment Name: At_Drought_P Parameter: Timepoint (hr) Value: 12
  misc_feature: MA Experiment 20000436 PARAMETER Experiment Name: At_Drought_P Parameter: Tissue Value: Whole Plant
  misc_feature: MA Experiment 20000436 PARAMETER Experiment Name: At_Drought_P Parameter: Treatment Value: Drought vs. No Drought
  misc_feature: MA Experiment ID: 20000437 Result: Up-regulated in Transcription
  misc_feature: MA Experiment 20000437 PARAMETER Experiment Name: At_Drought_P Parameter: Age (day) Value: 8
  misc_feature: MA Experiment 20000437 PARAMETER Experiment Name: At_Drought_P Parameter: Organism Value: A. thaliana
  misc_feature: MA Experiment 20000437 PARAMETER Experiment Name: At_Drought_P Parameter: Plant Line Value: WS
  misc_feature: MA Experiment 20000437 PARAMETER Experiment Name: At_Drought_P Parameter: Timepoint (hr) Value: 24
  misc_feature: MA Experiment 20000437 PARAMETER Experiment Name: At_Drought_P Parameter: Tissue Value: Whole Plant
  misc_feature: MA Experiment 20000437 PARAMETER Experiment Name: At_Drought_P Parameter: Treatment Value: Drought vs. No Drought
  misc_feature: MA Experiment ID: 20000439 Result: Down-regulated in Transcription
  misc_feature: MA Experiment 20000439 PARAMETER Experiment Name: At_Roots__P Parameter: Age (day) Value: 14 vs. 21
  misc_feature: MA Experiment 20000439 PARAMETER Experiment Name: At_Roots__P Parameter: Organism Value: A. thaliana
  misc_feature: MA Experiment 20000439 PARAMETER Experiment Name: At_Roots__P Parameter: Tissue Value: Roots vs. Whole Plant
  misc_feature: MA Experiment ID: 20000441 Result: Up-regulated in Transcription
  misc_feature: MA Experiment 20000441 PARAMETER Experiment Name: At_1uM_BR-BRZ__P Parameter: Tissue Value: Shoot Apices
  misc_feature: MA Experiment 20000441 PARAMETER Experiment Name: At_1uM_BR-BRZ__P Parameter: Treatment Value: 1uM BR vs. No Treatment
  misc_feature: MA Experiment ID: 20000453 Result: Up-regulated in Transcription
  misc_feature: MA Experiment 20000453 PARAMETER Experiment Name: At_100uM_ABA_P Parameter: Age (day) Value: 15
  misc_feature: MA Experiment 20000453 PARAMETER Experiment Name: At_100uM_ABA_P Parameter: Organism Value: A. thaliana
  misc_feature: MA Experiment 20000453 PARAMETER Experiment Name: At_100uM_ABA_P Parameter: Plant Line Value: WS
  misc_feature: MA Experiment 20000453 PARAMETER Experiment Name: At_100uM_ABA_P Parameter: Timepoint (hr) Value: 24
  misc_feature: MA Experiment 20000453 PARAMETER Experiment Name: At_100uM_ABA_P Parameter: Tissue Value: Aerial
  misc_feature: MA Experiment 20000453 PARAMETER Experiment Name: At_100uM_ABA_P Parameter: Treatment Value: 100uM ABA vs. No Treatment
  misc_feature: MA Experiment ID: 20000455 Result: Up-regulated in Transcription
  misc_feature: MA Experiment 20000455 PARAMETER Experiment Name: At_100uM_ABA_P Parameter: Age (day) Value: 16
  misc_feature: MA Experiment 20000455 PARAMETER Experiment Name: At_100uM_ABA_P Parameter: Organism Value: A. thaliana
  misc_feature: MA Experiment 20000455 PARAMETER Experiment Name: At_100uM_ABA_P Parameter: Plant Line Value: WS
  misc_feature: MA Experiment 20000455 PARAMETER Experiment Name: At_100uM_ABA_P Parameter: Timepoint (hr) Value: 48
  misc_feature: MA Experiment 20000455 PARAMETER Experiment Name: At_100uM_ABA_P Parameter: Tissue Value: Aerial
  misc_feature: MA Experiment 20000455 PARAMETER Experiment Name: At_100uM_ABA_P Parameter: Treatment Value: 100uM ABA vs. No Treatment
  misc_feature: MA Experiment ID: 20000496 Result: Up-regulated in Transcription
  misc_feature: MA Experiment 20000496 PARAMETER Experiment Name: At_Guard_Cells_P Parameter: Harvest Date Value: 7/19/2002
  misc_feature: MA Experiment 20000496 PARAMETER Experiment Name: At_Guard_Cells_P Parameter: Organism Value: Canola
  misc_feature: MA Experiment 20000496 PARAMETER Experiment Name: At_Guard_Cells_P Parameter: Tissue Value: Guard Cells vs. Leaves
  misc_feature: MA Experiment ID: 20000573 Result: Up-regulated in Transcription
  misc_feature: MA Experiment 20000573 PARAMETER Experiment Name: At_100uM_ABA_Mutants__P Parameter: Organism Value: A. thaliana
  misc_feature: MA Experiment 20000573 PARAMETER Experiment Name: At_100uM_ABA_Mutants__P Parameter: Plant Line Value: CS22 vs. Ler wt
  misc_feature: MA Experiment 20000573 PARAMETER Experiment Name: At_100uM_ABA_Mutants__P Parameter: Timepoint (hr) Value: N/A
  misc_feature: MA Experiment 20000573 PARAMETER Experiment Name: At_100uM_ABA_Mutants__P Parameter: Tissue Value: Whole Plant
  misc_feature: MA Experiment 20000573 PARAMETER Experiment Name: At_100uM_ABA_Mutants__P Parameter: Treatment Value: None
  misc_feature: MA Experiment ID: 20001247 Result: Up-regulated in Transcription
  misc_feature: MA Experiment 20001247 PARAMETER Experiment Name: At_Far-red-induction_P Parameter: Age (day) Value: 7
  misc_feature: MA Experiment 20001247 PARAMETER Experiment Name: At_Far-red-induction_P Parameter: Light Value: Far-red vs. White
  misc_feature: MA Experiment 20001247 PARAMETER Experiment Name: At_Far-red-induction_P Parameter: Organism Value: A. thaliana
  misc_feature: MA Experiment 20001247 PARAMETER Experiment Name: At_Far-red-induction_P Parameter: Plant Line Value: Columbia
  misc_feature: MA Experiment 20001247 PARAMETER Experiment Name: At_Far-red-induction_P Parameter: Timepoint (hr) Value: 1
  misc_feature: MA Experiment 20001247 PARAMETER Experiment Name: At_Far-red-induction_P Parameter: Tissue Value: Whole Plant
  misc_feature: MA Experiment ID: 20001450 Result: Up-regulated in Transcription
  misc_feature: MA Experiment 20001450 PARAMETER Experiment Name: At_Far-red-induction_P Parameter: Age (day) Value: 7
  misc_feature: MA Experiment 20001450 PARAMETER Experiment Name: At_Far-red-induction_P Parameter: Light Value: Far-red vs. White
  misc_feature: MA Experiment 20001450 PARAMETER Experiment Name: At_Far-red-induction_P Parameter: Organism Value: A. thaliana
  misc_feature: MA Experiment 20001450 PARAMETER Experiment Name: At_Far-red-induction_P Parameter: Plant Line Value: Columbia
  misc_feature: MA Experiment 20001450 PARAMETER Experiment Name: At_Far-red-induction_P Parameter: Timepoint (hr) Value: 8
  misc_feature: MA Experiment 20001450 PARAMETER Experiment Name: At_Far-red-induction_P Parameter: Tissue Value: Whole Plant
  misc_feature: MA Experiment ID: 20001451 Result: Up-regulated in Transcription
  misc_feature: MA Experiment 20001451 PARAMETER Experiment Name: At_Far-red-induction_P Parameter: Age (day) Value: 7
  misc_feature: MA Experiment 20001451 PARAMETER Experiment Name: At_Far-red-induction_P Parameter: Light Value: Far-red vs. White
  misc_feature: MA Experiment 20001451 PARAMETER Experiment Name: At_Far-red-induction_P Parameter: Organism Value: A. thaliana
  misc_feature: MA Experiment 20001451 PARAMETER Experiment Name: At_Far-red-induction_P Parameter: Plant Line Value: Columbia
  misc_feature: MA Experiment 20001451 PARAMETER Experiment Name: At_Far-red-induction_P Parameter: Timepoint (hr) Value: 24
  misc_feature: MA Experiment 20001451 PARAMETER Experiment Name: At_Far-red-induction_P Parameter: Tissue Value: Whole Plant
  misc_feature: MA Experiment ID: 20001554 Result: Up-regulated in Transcription
  misc_feature: MA Experiment 20001554 PARAMETER Experiment Name: At_Drought_Soil_Dry_P Parameter: Age (day) Value: 21
  misc_feature: MA Experiment 20001554 PARAMETER Experiment Name: At_Drought_Soil_Dry_P Parameter: Organism Value: A. thaliana
  misc_feature: MA Experiment 20001554 PARAMETER Experiment Name: At_Drought_Soil_Dry_P Parameter: Plant Line Value: WS
  misc_feature: MA Experiment 20001554 PARAMETER Experiment Name: At_Drought_Soil_Dry_P Parameter: Post Timepoint (hr) Value: None
  misc_feature: MA Experiment 20001554 PARAMETER Experiment Name: At_Drought_Soil_Dry_P Parameter: Post-Treatment Value: None
  misc_feature: MA Experiment 20001554 PARAMETER Experiment Name: At_Drought_Soil_Dry_P Parameter: Timepoint (day) Value: 7
  misc_feature: MA Experiment 20001554 PARAMETER Experiment Name: At_Drought_Soil_Dry_P Parameter: Treatment Value: Drought vs. No Drought
  misc_feature: MA Experiment ID: 20001555 Result: Up-regulated in Transcription
  misc_feature: MA Experiment 20001555 PARAMETER Experiment Name: At_Drought_Soil_Dry_P Parameter: Age (day) Value: 24
  misc_feature: MA Experiment 20001555 PARAMETER Experiment Name: At_Drought_Soil_Dry_P Parameter: Organism Value: A. thaliana
  misc_feature: MA Experiment 20001555 PARAMETER Experiment Name: At_Drought_Soil_Dry_P Parameter: Plant Line Value: WS
  misc_feature: MA Experiment 20001555 PARAMETER Experiment Name: At_Drought_Soil_Dry_P Parameter: Post Timepoint (hr) Value: None
  misc_feature: MA Experiment 20001555 PARAMETER Experiment Name: At_Drought_Soil_Dry_P Parameter: Post-Treatment Value: None
  misc_feature: MA Experiment 20001555 PARAMETER Experiment Name: At_Drought_Soil_Dry_P Parameter: Timepoint (day) Value: 10
  misc_feature: MA Experiment 20001555 PARAMETER Experiment Name: At_Drought_Soil_Dry_P Parameter: Treatment Value: Drought vs. No Drought
  misc_feature: MA Experiment ID: 20001559 Result: Up-regulated in Transcription
  misc_feature: MA Experiment 20001559 PARAMETER Experiment Name: At_Drought_Soil_Dry_P Parameter: Age (day) Value: 28
  misc_feature: MA Experiment 20001559 PARAMETER Experiment Name: At_Drought_Soil_Dry_P Parameter: Organism Value: A. thaliana
  misc_feature: MA Experiment 20001559 PARAMETER Experiment Name: At_Drought_Soil_Dry_P Parameter: Plant Line Value: WS
  misc_feature: MA Experiment 20001559 PARAMETER Experiment Name: At_Drought_Soil_Dry_P Parameter: Post Timepoint (hr) Value: 29
  misc_feature: MA Experiment 20001559 PARAMETER Experiment Name: At_Drought_Soil_Dry_P Parameter: Post-Treatment Value: Re-Water vs. No Drought
  misc_feature: MA Experiment 20001559 PARAMETER Experiment Name: At_Drought_Soil_Dry_P Parameter: Timepoint (day) Value: 14
  misc_feature: MA Experiment 20001559 PARAMETER Experiment Name: At_Drought_Soil_Dry_P Parameter: Treatment Value: Drought vs. No Drought
  misc_feature: MA Experiment ID: 20001757 Result: Down-regulated in Transcription
  misc_feature: MA Experiment 20001757 PARAMETER Experiment Name: At_50mM_NH4NO3_L-to-H_P Parameter: Timepoint (hr) Value: 6
  misc_feature: MA Experiment 20001757 PARAMETER Experiment Name: At_50mM_NH4NO3_L-to-H_P Parameter: Tissue Value: Leaf
  misc_feature: MA Experiment 20001757 PARAMETER Experiment Name: At_50mM_NH4NO3_L-to-H_P Parameter: Treatment Value: 50mM NH4NO3 vs 100mM Mannitol
  misc_feature: MA Experiment ID: 20001904 Result: Up-regulated in Transcription
  misc_feature: MA Experiment 20001904 PARAMETER Experiment Name: At_Drought_Reproduction_P Parameter: Age (day) Value: 37
  misc_feature: MA Experiment 20001904 PARAMETER Experiment Name: At_Drought_Reproduction_P Parameter: Organism Value: A. thaliana
  misc_feature: MA Experiment 20001904 PARAMETER Experiment Name: At_Drought_Reproduction_P Parameter: Plant Line Value: WS
  misc_feature: MA Experiment 20001904 PARAMETER Experiment Name: At_Drought_Reproduction_P Parameter: Timepoint (day) Value: 7
  misc_feature: MA Experiment 20001904 PARAMETER Experiment Name: At_Drought_Reproduction_P Parameter: Tissue Value: Rosettes
  misc_feature: MA Experiment 20001904 PARAMETER Experiment Name: At_Drought_Reproduction_P Parameter: Treatment Value: Drought vs. No Drought
cttcttcttctctactcttctccattttcttctcttcttctcttctttgtccattttttgacagatatggcgatctggtttgctagatccaaaacccttgtttctagcttgagacataatctaaatttgtcgacaattctcataaaacgtgattactctcatcgtcccatcttctatacaacttctcagttatcttcaacggcgtatttgagtcccttcggtagcctccgtcatgagtctacggccgtggagacacaggctgatcatttggttcagcagattgatgaagtcgatgcccaggaactggatttcccaggaggcaaagtcggttacacatcggagatgaaattcataccggaatcatcttcaaggaggattccatgttaccgggttcttgacgaagacggacgaatcatccccgatagcgattttattccggtgagtgagaaactcgctgttagaatgtacgaacaaatggcgacgctacaagtaatggatcacatcttctacgaagctcaacgtcaaggaagaatatctttttatcttacttccgtcggagaagaagccattaacatcgcttcagcagctgctctcagtcctgacgacgtcgttttacctcagtaccgagaacctggagttcttttgtggcgtggcttcacgttggaggagtttgctaatcagtgttttgggaacaaagctgattatggcaaaggcagacaaatgccaattcattacggttccaatcgtcttaattacttcactatctcctctccaattgccacgcaacttcctcaagctgctggagttggttattctttgaaaatggacaagaagaatgcttgtactgttacattcatcggagatggtggcacaagcgagggagattttcacgccggattgaattttgcggccgtaatggaagctccggttgtgtttatatgtcggaacaacggttgggcgattagtactcatatctcagaacagtttagaagtgatggaatagttgtgaaaggtcaagcttacggtatccgaagcatccgtgtggacggtaacgatgcacttgcggtttatagtgctgtacgctcagctcgagaaatggctgtaacagaacaaagacctgttctcattgagatgatgacatatagagtaggacatcattctacatcagatgattcaactaagtacagggcggcggatgaaatccagtactggaaaatgtcgagaaaccctgtgaatagatttcggaaatgggtcgaagataacggatggtggagtgaggaagatgaatccaagctaagatctaacgcaagaaaacagcttctgcaagcgattcaggctgcggagaagtgggagaaacaaccattgacagagttgtttaacgatgtatatgatgttaaaccgaagaacctagaagagcaagaacttggtttgaaggaattagtaaagaaacaacctcaagattatcctcctggctttcatgtttgaatctagaggaactgtgtggttaaaatacctcatatagtatcatgtccatatcgacttctcattgcagactatttatattgtccacgtatcgaatagtaatcaagtatcaatgtagagaccagcatttggagcatcatgaaatggccttgagaatgttattttcatggtccggctgacccttaaccggttcaaactggagtaaatgagtgaatgttaatgctcgagaatgggtgaggctccgttaatcgttaagaaaaaaacgtgcctacctagccaaatgacatcttcctcttttgtgtttagcacaagtgaatgatccaaatatcatctacctaatatgacccataaaatagtatgtgattgtctttggatgttatcccataacataacttaaatttgggatgcatgcatatattatatacttcatataaaatgagtggacctcataagttgcggtttcgatttttat

SEQ ID NO: 43696 - protein, 494 aa, Arabidopsis thaliana
  peptide (1)..(494): Ceres Seq. ID no. 13575155
  misc_feature (156)..(456): Pfam Name: Dehydrogenase E1 component Pfam Description: Dehydrogenase E1 component
  misc_feature (108)..(253): Homolog of NCBI NO: 17555798 NR Description: Dehydrogenase E1 component (54.9 kD)
  misc_feature (237)..(489): Homolog of NCBI NO: 17555798 NR Description: Dehydrogenase E1 component (54.9 kD)
  misc_feature (104)..(489): Homolog of NCBI NO: 12964598 NR Description: branched-chain alpha-keto acid dehydrogenase
  misc_feature (108)..(489): Homolog of NCBI NO: 30145768 NR Description: Hypothetical protein Y39E4A.3 [Caenorhabditis
  misc_feature (267)..(488): Homolog of NCBI NO: 15242835 NR Description: 3-methyl-2-oxobutanoate dehydrogenase-related
  misc_feature (88)..(492): Homolog of NCBI NO: 7431561 NR Description: 3-methyl-2-oxobutanoate dehydrogenase (lipoamide)
  misc_feature (100)..(489): Homolog of NCBI NO: 9955517 NR Description: branched-chain alpha keto-acid dehydrogenase E1
  misc_feature (27)..(489): Homolog of NCBI NO: 18415939 NR Description: branched-chain alpha keto-acid dehydrogenase E1
  misc_feature (24)..(494): Homolog of NCBI NO: 11357201 NR Description: branched-chain alpha keto-acid dehydrogenase E1
  misc_feature (23)..(494): Homolog of NCBI NO: 15218984 NR Description: branched-chain alpha keto-acid dehydrogenase
LLLLYSSPFSSLLLFFVHFLTDMAIWFARSKTLVSSLRHNLNLSTILIKRDYSHRPIFYTTSQLSSTAYLSPFGSLRHESTAVETQADHLVQQIDEVDAQELDFPGGKVGYTSEMKFIPESSSRRIPCYRVLDEDGRIIPDSDFIPVSEKLAVRMYEQMATLQVMDHIFYEAQRQGRISFYLTSVGEEAINIASAAALSPDDVVLPQYREPGVLLWRGFTLEEFANQCFGNKADYGKGRQMPIHYGSNRLNYFTISSPIATQLPQAAGVGYSLKMDKKNACTVTFIGDGGTSEGDFHAGLNFAAVMEAPVVFICRNNGWAISTHISEQFRSDGIVVKGQAYGIRSIRVDGNDALAVYSAVRSAREMAVTEQRPVLIEMMTYRVGHHSTSDDSTKYRAADEIQYWKMSRNPVNRFRKWVEDNGWWSEEDESKLRSNARKQLLQAIQAAEKWEKQPLTELFNDVYDVKPKNLEEQELGLKELVKKQPQDYPPGFHV

SEQ ID NO: 43697 - protein, 472 aa, Arabidopsis thaliana
  peptide (1)..(472): Ceres Seq. ID no. 13575156
  misc_feature (134)..(434): Pfam Name: Dehydrogenase E1 component Pfam Description: Dehydrogenase E1 component
  misc_feature (86)..(231): Homolog of NCBI NO: 17555798 NR Description: Dehydrogenase E1 component (54.9 kD)
  misc_feature (215)..(467): Homolog of NCBI NO: 17555798 NR Description: Dehydrogenase E1 component (54.9 kD)
  misc_feature (82)..(467): Homolog of NCBI NO: 12964598 NR Description: branched-chain alpha-keto acid dehydrogenase
  misc_feature (86)..(467): Homolog of NCBI NO: 30145768 NR Description: Hypothetical protein Y39E4A.3 [Caenorhabditis
  misc_feature (245)..(466): Homolog of NCBI NO: 15242835 NR Description: 3-methyl-2-oxobutanoate dehydrogenase-related
  misc_feature (66)..(470): Homolog of NCBI NO: 7431561 NR Description: 3-methyl-2-oxobutanoate dehydrogenase (lipoamide)
  misc_feature (78)..(467): Homolog of NCBI NO: 9955517 NR Description: branched-chain alpha keto-acid dehydrogenase E1
  misc_feature (5)..(467): Homolog of NCBI NO: 18415939 NR Description: branched-chain alpha keto-acid dehydrogenase E1
  misc_feature (2)..(472): Homolog of NCBI NO: 11357201 NR Description: branched-chain alpha keto-acid dehydrogenase E1
  misc_feature (1)..(472): Homolog of NCBI NO: 15218984 NR Description: branched-chain alpha keto-acid dehydrogenase
MAIWFARSKTLVSSLRHNLNLSTILIKRDYSHRPIFYTTSQLSSTAYLSPFGSLRHESTAVETQADHLVQQIDEVDAQELDFPGGKVGYTSEMKFIPESSSRRIPCYRVLDEDGRIIPDSDFIPVSEKLAVRMYEQMATLQVMDHIFYEAQRQGRISFYLTSVGEEAINIASAAALSPDDVVLPQYREPGVLLWRGFTLEEFANQCFGNKADYGKGRQMPIHYGSNRLNYFTISSPIATQLPQAAGVGYSLKMDKKNACTVTFIGDGGTSEGDFHAGLNFAAVMEAPVVFICRNNGWAISTHISEQFRSDGIVVKGQAYGIRSIRVDGNDALAVYSAVRSAREMAVTEQRPVLIEMMTYRVGHHSTSDDSTKYRAADEIQYWKMSRNPVNRFRKWVEDNGWWSEEDESKLRSNARKQLLQAIQAAEKWEKQPLTELFNDVYDVKPKNLEEQELGLKELVKKQPQDYPPGFHV

SEQ ID NO: 43698 - protein, 380 aa, Arabidopsis thaliana
  peptide (1)..(380): Ceres Seq. ID no. 13575157
  misc_feature (42)..(342): Pfam Name: Dehydrogenase E1 component Pfam Description: Dehydrogenase E1 component
  misc_feature (1)..(139): Homolog of NCBI NO: 17555798 NR Description: Dehydrogenase E1 component (54.9 kD)
  misc_feature (123)..(375): Homolog of NCBI NO: 17555798 NR Description: Dehydrogenase E1 component (54.9 kD)
  misc_feature (1)..(375): Homolog of NCBI NO: 12964598 NR Description: branched-chain alpha-keto acid dehydrogenase
  misc_feature (1)..(375): Homolog of NCBI NO: 30145768 NR Description: Hypothetical protein Y39E4A.3 [Caenorhabditis
  misc_feature (153)..(374): Homolog of NCBI NO: 15242835 NR Description: 3-methyl-2-oxobutanoate dehydrogenase-related
  misc_feature (1)..(378): Homolog of NCBI NO: 7431561 NR Description: 3-methyl-2-oxobutanoate dehydrogenase (lipoamide)
  misc_feature (1)..(375): Homolog of NCBI NO: 9955517 NR Description: branched-chain alpha keto-acid dehydrogenase E1
  misc_feature (1)..(375): Homolog of NCBI NO: 18415939 NR Description: branched-chain alpha keto-acid dehydrogenase E1
  misc_feature (1)..(380): Homolog of NCBI NO: 11357201 NR Description: branched-chain alpha keto-acid dehydrogenase E1
  misc_feature (1)..(380): Homolog of NCBI NO: 15218984 NR Description: branched-chain alpha keto-acid dehydrogenase
MKFIPESSSRRIPCYRVLDEDGRIIPDSDFIPVSEKLAVRMYEQMATLQVMDHIFYEAQRQGRISFYLTSVGEEAINIASAAALSPDDVVLPQYREPGVLLWRGFTLEEFANQCFGNKADYGKGRQMPIHYGSNRLNYFTISSPIATQLPQAAGVGYSLKMDKKNACTVTFIGDGGTSEGDFHAGLNFAAVMEAPVVFICRNNGWAISTHISEQFRSDGIVVKGQAYGIRSIRVDGNDALAVYSAVRSAREMAVTEQRPVLIEMMTYRVGHHSTSDDSTKYRAADEIQYWKMSRNPVNRFRKWVEDNGWWSEEDESKLRSNARKQLLQAIQAAEKWEKQPLTELFNDVYDVKPKNLEEQELGLKELVKKQPQDYPPGFHV

SEQ ID NO: 43699 - DNA, 1655 bp, Arabidopsis thaliana
  misc_feature (1)..(1655): Ceres Seq. ID no. 12558738
  misc_feature: MA Experiment ID: 20000179 Result: Down-regulated in Transcription
  misc_feature: MA Experiment 20000179 PARAMETER Experiment Name: At_Germinating_Seeds_P Parameter: Age (hr) Value: 6 vs. 0
  misc_feature: MA Experiment 20000179 PARAMETER Experiment Name: At_Germinating_Seeds_P Parameter: Tissue Value: Germinating Seeds
  misc_feature: MA Experiment ID: 20000180 Result: Down-regulated in Transcription
  misc_feature: MA Experiment 20000180 PARAMETER Experiment Name: At_Germinating_Seeds_P Parameter: Age (hr) Value: 24 vs. 0
  misc_feature: MA Experiment 20000180 PARAMETER Experiment Name: At_Germinating_Seeds_P Parameter: Tissue Value: Germinating Seeds
cattcacgagatacgttgacctaaagggtaaattttcccgccattgttagtaccagaactctctgggccgccgcgtctccgtcgtcgtggctatctacagatggcggataagaagaagcgaaagcgatcaaaagatgacgaggcggaggaacttcctttcaaaagcattctggaatcagacgacgttatcacggagcttctcaaatcgtatatttcctcttctatcaaagccgccgccggagccggcggtgcctcctcctcttcatcgaaacctctaaccctagctgacctctctctatcatcttcctgtcgtgaagtcgcagatctctcactctcctccgtgcagacagagatagagacagtcatcgtccagatcgcccgttctattctcgccggtgatggcttctccttcagtgttccttcacgcgccgcctcgaatcagctgtatgttcctgagctcgaccgtatagtgctaaaagacaaatctaccctccgtccatttgcctccgtttcttctgtcaggaaaaccaccatcaccactcgtatcctcgcccttatccaccaactctgcctcaggaacattcacgttactaagcgtgatctcttctacaccgacgttaagcttttccaggaccagacacagagtgatgctgtgttggatgatgtctcatgtatgctcggttgcacaaggtcaagtctcaatgtcattgcagcagagaaaggtgtggtggtgggaaggcttatattcagtgacaatggagacatgatagattgcacaaagatgggaatgggtgggaaagccattccaccaaacattgaccgggttggagatatgcagagtgatgctatgttcatactcttagttgaaaaagatgcagcttatatgaggttagctgaagacagattctataaccggttcccttgtatcatcgtgactgcaaaaggccagcctgatgtagctacaaggctcttcttgaggaaaatgaaaatggagcttaagcttccggtacttgccttggtggatagtgatccttacggattgaagatcttgtcggtgtatggatgtgggtcgaagaacatgtcatatgatagtgcaaacttgactacgcctgatattaagtggcttggaattaggccgagtgatttggacaagtataagatacctgaacagtgtaggttgccgatgactgagcaggatattaagaccgggaaggatatgctagaggaggatttcgtgaagaaaaatcccgggtgggtcgaggaacttaacctgatggtgaaaacgaagcaaaaggctgagattcaggcgttgagctcttttggtttccagtatttatcggaagtttacttgcccctgaaactgcagcagcaggattggctctgataatcaggtttcttcctgatcaattagatagaccaacaagtgtactctacaaatttcgaatttttgataatgcaattgcctgtttcttagcatgtgaattattattgcaaagatcgaaatttggttttaaatttatggttgaatctacacagaactggaaagatagctgtcagatgattatttagaagacaactcttttgtttatttagaagattgtatacaatatgatgggcattgagatgatatgcaatctttccccattcttttctgc

SEQ ID NO: 43700 - protein, 427 aa, Arabidopsis thaliana
  peptide (1)..(427): Ceres Seq. ID no. 12558739
  misc_feature (136)..(203): Pfam Name: Type IIB DNA topoisomerase Pfam Description: Type IIB DNA topoisomerase
  misc_feature (74)..(427): Homolog of NCBI NO: 30696943 NR Description: expressed protein [Arabidopsis thaliana]
  misc_feature (136)..(427): Homolog of NCBI NO: 5733397 NR Description: SPO11 protein [Mus musculus]
  misc_feature (136)..(427): Homolog of NCBI NO: 5453474 NR Description: meiotic DNA transesterase/topoisomerase homolog
  misc_feature (136)..(427): Homolog of NCBI NO: 5453472 NR Description: meiotic DNA transesterase/topoisomerase homolog
  misc_feature (136)..(427): Homolog of NCBI NO: 9501146 NR Description: dJ481F12.2.2 (meiotic protein covalently bound to (S.cerevisiae)-like (meiotic DNA transesterase/topoisomerase
  misc_feature (77)..(427): Homolog of NCBI NO: 6912680 NR Description: SPO11 meiotic protein covalently bound to
  misc_feature (76)..(427): Homolog of NCBI NO: 9501147 NR Description: dJ481F12.2.1 (meiotic protein covalently bound to (S. cerevisiae)-like (a DNA transesterase/topoisomerase homolog
  misc_feature (77)..(427): Homolog of NCBI NO: 6755624 NR Description: sporulation protein, meiosis-specific, SPO11
  misc_feature (2)..(427): Homolog of NCBI NO: 27476077 NR Description: Hypothetical protein [Oryza sativa (japonica
  misc_feature (1)..(427): Homolog of NCBI NO: 15241959 NR Description: meiosis specific - like protein
MADKKKRKRSKDDEAEELPFKSILESDDVITELLKSYISSSIKAAAGAGGASSSSSKPLTLADLSLSSSCREVADLSLSSVQTEIETVIVQIARSILAGDGFSFSVPSRAASNQLYVPELDRIVLKDKSTLRPFASVSSVRKTTITTRILALIHQLCLRNIHVTKRDLFYTDVKLFQDQTQSDAVLDDVSCMLGCTRSSLNVIAAEKGVVVGRLIFSDNGDMIDCTKMGMGGKAIPPNIDRVGDMQSDAMFILLVEKDAAYMRLAEDRFYNRFPCIIVTAKGQPDVATRLFLRKMKMELKLPVLALVDSDPYGLKILSVYGCGSKNMSYDSANLTTPDIKWLGIRPSDLDKYKIPEQCRLPMTEQDIKTGKDMLEEDFVKKNPGWVEELNLMVKTKQKAEIQALSSFGFQYLSEVYLPLKLQQQDWL

SEQ ID NO: 43701 - protein, 236 aa, Arabidopsis thaliana
  peptide (1)..(236): Ceres Seq. ID no. 12558740
  misc_feature (60)..(132): Pfam Name: Toprim domain Pfam Description: Toprim domain
  misc_feature (1)..(236): Homolog of NCBI NO: 30696943 NR Description: expressed protein [Arabidopsis thaliana]
  misc_feature (1)..(236): Homolog of NCBI NO: 5733397 NR Description: SPO11 protein [Mus musculus]
  misc_feature (1)..(236): Homolog of NCBI NO: 5453474 NR Description: meiotic DNA transesterase/topoisomerase homolog
  misc_feature (1)..(236): Homolog of NCBI NO: 5453472 NR Description: meiotic DNA transesterase/topoisomerase homolog
  misc_feature (1)..(236): Homolog of NCBI NO: 9501146 NR Description: dJ481F12.2.2 (meiotic protein covalently bound to (S.cerevisiae)-like (meiotic DNA transesterase/topoisomerase
  misc_feature (1)..(236): Homolog of NCBI NO: 6912680 NR Description: SPO11 meiotic protein covalently bound to
  misc_feature (1)..(236): Homolog of NCBI NO: 9501147 NR Description: dJ481F12.2.1 (meiotic protein covalently bound to (S. cerevisiae)-like (a DNA transesterase/topoisomerase homolog
  misc_feature (1)..(236): Homolog of NCBI NO: 6755624 NR Description: sporulation protein, meiosis-specific, SPO11
  misc_feature (1)..(236): Homolog of NCBI NO: 27476077 NR Description: Hypothetical protein [Oryza sativa (japonica
  misc_feature (1)..(236): Homolog of NCBI NO: 15241959 NR Description: meiosis specific - like protein
MLGCTRSSLNVIAAEKGVVVGRLIFSDNGDMIDCTKMGMGGKAIPPNIDRVGDMQSDAMFILLVEKDAAYMRLAEDRFYNRFPCIIVTAKGQPDVATRLFLRKMKMELKLPVLALVDSDPYGLKILSVYGCGSKNMSYDSANLTTPDIKWLGIRPSDLDKYKIPEQCRLPMTEQDIKTGKDMLEEDFVKKNPGWVEELNLMVKTKQKAEIQALSSFGFQYLSEVYLPLKLQQQDWL

SEQ ID NO: 43702 - DNA, 1762 bp, Arabidopsis thaliana
  misc_feature (1)..(1762): Ceres Seq. ID no. 12337098
  misc_feature: MA Experiment ID: 108488 Result: Up-regulated in Transcription
  misc_feature: MA Experiment ID: 108585 Result: Down-regulated in Transcription
  misc_feature: MA Experiment 108585 PARAMETER Experiment Name: At_5mM_NaNP_cDNA_P Parameter: Timepoint (hr) Value: 6
  misc_feature: MA Experiment 108585 PARAMETER Experiment Name: At_5mM_NaNP_cDNA_P Parameter: Tissue Value: Aerial
  misc_feature: MA Experiment 108585 PARAMETER Experiment Name: At_5mM_NaNP_cDNA_P Parameter: Treatment Value: null
  misc_feature: MA Experiment ID: 108595 Result: Down-regulated in Transcription
  misc_feature: MA Experiment 108595 PARAMETER Experiment Name: At_Ler-pi_Ovule_cDNA_P Parameter: Plant Line Value: null
  misc_feature: MA Experiment ID: 108668 Result: Down-regulated in Transcription
  misc_feature: MA Experiment 108668 PARAMETER Experiment Name: At_2mM_SA_cDNA_P Parameter: Plant Line Value: WS
  misc_feature: MA Experiment 108668 PARAMETER Experiment Name: At_2mM_SA_cDNA_P Parameter: Timepoint (hr) Value: 6
  misc_feature: MA Experiment 108668 PARAMETER Experiment Name: At_2mM_SA_cDNA_P Parameter: Treatment Value: 2mM SA vs. No Treatment
  misc_feature: MA Experiment ID: 20000069 Result: Down-regulated in Transcription
  misc_feature: MA Experiment 20000069 PARAMETER Experiment Name: At_100uM_ABA_Mutants_cDNA_P Parameter: Plant Line Value: CS23
  misc_feature: MA Experiment 20000069 PARAMETER Experiment Name: At_100uM_ABA_Mutants_cDNA_P Parameter: Timepoint (hr) Value: 6
  misc_feature: MA Experiment 20000069 PARAMETER Experiment Name: At_100uM_ABA_Mutants_cDNA_P Parameter: Tissue Value: Aerial
  misc_feature: MA Experiment 20000069 PARAMETER Experiment Name: At_100uM_ABA_Mutants_cDNA_P Parameter: Treatment Value: 100uM ABA vs. No Treatment
  misc_feature: MA Experiment ID: 20000070 Result: Down-regulated in Transcription
  misc_feature: MA Experiment 20000070 PARAMETER Experiment Name: At_100uM_ABA_Mutants_cDNA_P Parameter: Plant Line Value: CS24
  misc_feature: MA Experiment 20000070 PARAMETER Experiment Name: At_100uM_ABA_Mutants_cDNA_P Parameter: Timepoint (hr) Value: 6
  misc_feature: MA Experiment 20000070 PARAMETER Experiment Name: At_100uM_ABA_Mutants_cDNA_P Parameter: Tissue Value: Aerial
  misc_feature: MA Experiment 20000070 PARAMETER Experiment Name: At_100uM_ABA_Mutants_cDNA_P Parameter: Treatment Value: 100uM ABA vs. No Treatment
  misc_feature: MA Experiment ID: 20000071 Result: Down-regulated in Transcription
  misc_feature: MA Experiment 20000071 PARAMETER Experiment Name: At_100uM_ABA_Mutants_cDNA_P Parameter: Plant Line Value: CS8104
  misc_feature: MA Experiment 20000071 PARAMETER Experiment Name: At_100uM_ABA_Mutants_cDNA_P Parameter: Timepoint (hr) Value: 6
  misc_feature: MA Experiment 20000071 PARAMETER Experiment Name: At_100uM_ABA_Mutants_cDNA_P Parameter: Tissue Value: Aerial
  misc_feature: MA Experiment 20000071 PARAMETER Experiment Name: At_100uM_ABA_Mutants_cDNA_P Parameter: Treatment Value: 100uM ABA vs. No Treatment
  misc_feature: MA Experiment ID: 20000072 Result: Down-regulated in Transcription
  misc_feature: MA Experiment 20000072 PARAMETER Experiment Name: At_100uM_ABA_Mutants_cDNA_P Parameter: Plant Line Value: CS8105
  misc_feature: MA Experiment 20000072 PARAMETER Experiment Name: At_100uM_ABA_Mutants_cDNA_P Parameter: Timepoint (hr) Value: 6
  misc_feature: MA Experiment 20000072 PARAMETER Experiment Name: At_100uM_ABA_Mutants_cDNA_P Parameter: Tissue Value: Aerial
  misc_feature: MA Experiment 20000072 PARAMETER Experiment Name: At_100uM_ABA_Mutants_cDNA_P Parameter: Treatment Value: 100uM ABA vs. No Treatment
  misc_feature: MA Experiment ID: 20000086 Result: Down-regulated in Transcription
  misc_feature: MA Experiment 20000086 PARAMETER Experiment Name: At_100uM_ABA_Mutants_cDNA_P Parameter: Plant Line Value: CS22
  misc_feature: MA Experiment 20000086 PARAMETER Experiment Name: At_100uM_ABA_Mutants_cDNA_P Parameter: Timepoint (hr) Value: 6
  misc_feature: MA Experiment 20000086 PARAMETER Experiment Name: At_100uM_ABA_Mutants_cDNA_P Parameter: Tissue Value: Aerial
  misc_feature: MA Experiment 20000086 PARAMETER Experiment Name: At_100uM_ABA_Mutants_cDNA_P Parameter: Treatment Value: 100uM ABA vs. No Treatment
  misc_feature: MA Experiment ID: 20000087 Result: Down-regulated in Transcription
  misc_feature: MA Experiment 20000087 PARAMETER Experiment Name: At_100uM_ABA_Mutants_cDNA_P Parameter: Plant Line Value: WS
  misc_feature: MA Experiment 20000087 PARAMETER Experiment Name: At_100uM_ABA_Mutants_cDNA_P Parameter: Timepoint (hr) Value: 6
  misc_feature: MA Experiment 20000087 PARAMETER Experiment Name: At_100uM_ABA_Mutants_cDNA_P Parameter: Tissue Value: Aerial
  misc_feature: MA Experiment 20000087 PARAMETER Experiment Name: At_100uM_ABA_Mutants_cDNA_P Parameter: Treatment Value: 100uM ABA vs. No Treatment
  misc_feature: MA Experiment ID: 20000088 Result: Down-regulated in Transcription
  misc_feature: MA Experiment 20000088 PARAMETER Experiment Name: At_100uM_ABA_Mutants_cDNA_P Parameter: Plant Line Value: Landsberg
  misc_feature: MA Experiment 20000088 PARAMETER Experiment Name: At_100uM_ABA_Mutants_cDNA_P Parameter: Timepoint (hr) Value: 6
  misc_feature: MA Experiment 20000088 PARAMETER Experiment Name: At_100uM_ABA_Mutants_cDNA_P Parameter: Tissue Value: Aerial
  misc_feature: MA Experiment 20000088 PARAMETER Experiment Name: At_100uM_ABA_Mutants_cDNA_P Parameter: Treatment Value: 100uM ABA vs. No Treatment
  misc_feature: MA Experiment ID: 20000090 Result: Down-regulated in Transcription
  misc_feature: MA Experiment ID: 20000117 Result: Down-regulated in Transcription
  misc_feature: MA Experiment 20000117 PARAMETER Experiment Name: At_100uM_ABA_Mutants_cDNA_P Parameter: Plant Line Value: Columbia
  misc_feature: MA Experiment 20000117 PARAMETER Experiment Name: At_100uM_ABA_Mutants_cDNA_P Parameter: Timepoint (hr) Value: 6
  misc_feature: MA Experiment 20000117 PARAMETER Experiment Name: At_100uM_ABA_Mutants_cDNA_P Parameter: Tissue Value: Aerial
  misc_feature: MA Experiment 20000117 PARAMETER Experiment Name: At_100uM_ABA_Mutants_cDNA_P Parameter: Treatment Value: 100uM ABA vs. No Treatment
  misc_feature: MA Experiment ID: 20000185 Result: Down-regulated in Transcription
  misc_feature: MA Experiment 20000185 PARAMETER Experiment Name: At_Roots__P Parameter: Age (day) Value: 7 vs. 21
  misc_feature: MA Experiment 20000185 PARAMETER Experiment Name: At_Roots__P Parameter: Organism Value: A. thaliana
  misc_feature: MA Experiment 20000185 PARAMETER Experiment Name: At_Roots__P Parameter: Tissue Value: Roots vs. Whole Plant
  misc_feature: MA Experiment ID: 20000438 Result: Up-regulated in Transcription
  misc_feature: MA Experiment 20000438 PARAMETER Experiment Name: At_Shoots__P Parameter: Age (day) Value: 14
  misc_feature: MA Experiment 20000438 PARAMETER Experiment Name: At_Shoots__P Parameter: Tissue Value: Shoots vs. Whole Plant
  misc_feature: MA Experiment ID: 20000439 Result: Down-regulated in Transcription
  misc_feature: MA Experiment 20000439 PARAMETER Experiment Name: At_Roots__P Parameter: Age (day) Value: 14 vs. 21
  misc_feature: MA Experiment 20000439 PARAMETER Experiment Name: At_Roots__P Parameter: Organism Value: A. thaliana
  misc_feature: MA Experiment 20000439 PARAMETER Experiment Name: At_Roots__P Parameter: Tissue Value: Roots vs. Whole Plant
  misc_feature: MA Experiment ID: 20000794 Result: Down-regulated in Transcription
  misc_feature: MA Experiment 20000794 PARAMETER Experiment Name: At_Petals_P Parameter: Age (day) Value: 23-25 days
  misc_feature: MA Experiment 20000794 PARAMETER Experiment Name: At_Petals_P Parameter: Plant Line Value: WS
  misc_feature: MA Experiment 20000794 PARAMETER Experiment Name: At_Petals_P Parameter: Tissue Value: Petals vs. Whole plant
  misc_feature: MA Experiment ID: 20001450 Result: Down-regulated in Transcription
  misc_feature: MA Experiment 20001450 PARAMETER Experiment Name: At_Far-red-induction_P Parameter: Age (day) Value: 7
  misc_feature: MA Experiment 20001450 PARAMETER Experiment Name: At_Far-red-induction_P Parameter: Light Value: Far-red vs. White
  misc_feature: MA Experiment 20001450 PARAMETER Experiment Name: At_Far-red-induction_P Parameter: Organism Value: A. thaliana
  misc_feature: MA Experiment 20001450 PARAMETER Experiment Name: At_Far-red-induction_P Parameter: Plant Line Value: Columbia
  misc_feature: MA Experiment 20001450 PARAMETER Experiment Name: At_Far-red-induction_P Parameter: Timepoint (hr) Value: 8
  misc_feature: MA Experiment 20001450 PARAMETER Experiment Name: At_Far-red-induction_P Parameter: Tissue Value: Whole Plant
  misc_feature: MA Experiment ID: 20001906 Result: Down-regulated in Transcription
  misc_feature: MA Experiment 20001906 PARAMETER Experiment Name: At_Drought_Reproduction_P Parameter: Age (day) Value: 35
  misc_feature: MA Experiment 20001906 PARAMETER Experiment Name: At_Drought_Reproduction_P Parameter: Organism Value: A. thaliana
  misc_feature: MA Experiment 20001906 PARAMETER Experiment Name: At_Drought_Reproduction_P Parameter: Plant Line Value: WS
  misc_feature: MA Experiment 20001906 PARAMETER Experiment Name: At_Drought_Reproduction_P Parameter: Timepoint (day) Value: 5
  misc_feature: MA Experiment 20001906 PARAMETER Experiment Name: At_Drought_Reproduction_P Parameter: Tissue Value: Siliques
  misc_feature: MA Experiment 20001906 PARAMETER Experiment Name: At_Drought_Reproduction_P Parameter: Treatment Value: Drought vs. No Drought
  misc_feature: MA Experiment ID: 20001911 Result: Down-regulated in Transcription
  misc_feature: MA Experiment 20001911 PARAMETER Experiment Name: At_Drought_Reproduction_P Parameter: Age (day) Value: 40
  misc_feature: MA Experiment 20001911 PARAMETER Experiment Name: At_Drought_Reproduction_P Parameter: Organism Value: A. thaliana
  misc_feature: MA Experiment 20001911 PARAMETER Experiment Name: At_Drought_Reproduction_P Parameter: Plant Line Value: WS
  misc_feature: MA Experiment 20001911 PARAMETER Experiment Name: At_Drought_Reproduction_P Parameter: Timepoint (day) Value: 10
  misc_feature: MA Experiment 20001911 PARAMETER Experiment Name: At_Drought_Reproduction_P Parameter: Tissue Value: Flowers
  misc_feature: MA Experiment 20001911 PARAMETER Experiment Name: At_Drought_Reproduction_P Parameter: Treatment Value: Drought vs. No Drought
agaccgctagtttttttttgccactctcttcgtctctctcttgtagcaatgccgcttcttcatccacagtcgttgcggcatccttctttcgagattcagacccaaagaagaagcaattccacaacaagattgcttctttctcacaagtttctccattctcaagcttccattatctcaatctccaggacaagaatcctcaaacgggtctctcagaatctctctgtagctaaagctgcttcagctcaagctagtagtagtgttggtgagagtgttgctcaaacatcagaaaaagatgtgttgaaggctctgtctcagattattgatcctgattttgggacagatattgtttcttgtggttttgtgaaagatttggggattaatgaagctttgggtgaggtttcgttccgtttggagctgacaacacccgcatgtccagtcaaagacatgtttgagaacaaggcaaatgaggtagttgcagcccttccatgggtgaagaaggtaaatctgacaatgtcagcacaaccagccaagcccatttttgcagggcagcttccctttggattatcaagaatttcgaacatcatcgctgtttctagttgcaagggtggtgttgggaaatcaacagtagctgtaaatcttgcttatacattagctggtatgggtgctagagttggtatctttgatgctgatgtctatggtccaagtctaccaaccatggtcaatcctgagagccgtatattggaaatgaacccggagaagaagaccatcattccaacagaatacatgggcgtcaagctagtctcatttggatttgcaggacaagggcgtgccattatgagaggtcctatggtgtctggtgttataaaccaactccttacaacaactgaatggggagagctggactatcttgttatcgacatgcctcctggaactggtgatatacaactgaccttatgccaggttgcgccattgacagcagcggtaattgtcaccacccctcaaaagttggcgtttattgatgttgcaaaaggtgtaaggatgttctcaaaacttaaggtgccttgcgttgctgttgtggagaatatgtgccactttgacgctgatgggaaacgttattacccttttgggaaaggttcaggttctgaggtggtcaagcaattcggcatacctcacctctttgacctccccattagaccaacgttatctgcttcgggggatagcggaactcctgaagtagtgtcggatcctctaagtgacgttgccagaacgttccaggatcttggtgtatgtgtagtgcaacaatgcgccaagatacgccagcaagtatcaacggccgtgacatacgacaagtatctcaaggcaattagagtgaaggtaccaaactcagacgaagagttcttactgcaccctgcaaccgtcagaagaaatgatagatctgcacaaagtgtggatgaatggactggagagcaaaaagttctatatggcgatgtagcggaagatatcgaacctgaggacatacgaccaatgggaaactacgctgtctcgataacctggcccgacgggtttagccagattgctccatatgaccagttggaagaaattgaaaggctagtagatgttcctccattgtctccagtcgaagtctagttcttgaacaatatgttttcgctttacgatatctcttgaaaatgaaatttgtatattcatattaagagcattgttatgaatcttacaatgatgaaaagagggttactgtaagctg

SEQ ID NO: 43703 - protein, 548 aa, Arabidopsis thaliana
  peptide (1)..(548): Ceres Seq. ID no. 12337099
  misc_feature (95)..(171): Pfam Name: Domain of unknown function DUF59 Pfam Description: Domain of unknown function DUF59
  misc_feature (97)..(431): Homolog of NCBI NO: 17228148 NR Description: mrp protein homolog [Nostoc sp. PCC 7120]
  misc_feature (95)..(447): Homolog of NCBI NO: 23136009 NR Description: hypothetical protein [Cytophaga hutchinsonii]
  misc_feature (91)..(174): Homolog of NCBI NO: 21674599 NR Description: ATP-binding protein, Mrp/Nbp35 family [Chlorobium
  misc_feature (188)..(416): Homolog of NCBI NO: 21674599 NR Description: ATP-binding protein, Mrp/Nbp35 family [Chlorobium
  misc_feature (92)..(427): Homolog of NCBI NO: 22970050 NR Description: hypothetical protein [Chloroflexus aurantiacus]
  misc_feature (83)..(541): Homolog of NCBI NO: 34910672 NR Description: putative MRP protein (ATP/GTP-binding protein)
  misc_feature (321)..(548): Homolog of NCBI NO: 11994706 NR Description: contains similarity to nucleotide-binding
  misc_feature (17)..(306): Homolog of NCBI NO: 11994706 NR Description: contains similarity to nucleotide-binding
  misc_feature (17)..(548): Homolog of NCBI NO: 15230111 NR Description: mrp protein, putative
  misc_feature (17)..(548): Homolog of NCBI NO: 21592386 NR Description: mrp protein, putative [Arabidopsis thaliana]
RPLVFFCHSLRLSLVAMPLLHPQSLRHPSFEIQTQRRSNSTTRLLLSHKFLHSQASIISISRTRILKRVSQNLSVAKAASAQASSSVGESVAQTSEKDVLKALSQIIDPDFGTDIVSCGFVKDLGINEALGEVSFRLELTTPACPVKDMFENKANEVVAALPWVKKVNLTMSAQPAKPIFAGQLPFGLSRISNIIAVSSCKGGVGKSTVAVNLAYTLAGMGARVGIFDADVYGPSLPTMVNPESRILEMNPEKKTIIPTEYMGVKLVSFGFAGQGRAIMRGPMVSGVINQLLTTTEWGELDYLVIDMPPGTGDIQLTLCQVAPLTAAVIVTTPQKLAFIDVAKGVRMFSKLKVPCVAVVENMCHFDADGKRYYPFGKGSGSEVVKQFGIPHLFDLPIRPTLSASGDSGTPEVVSDPLSDVARTFQDLGVCVVQQCAKIRQQVSTAVTYDKYLKAIRVKVPNSDEEFLLHPATVRRNDRSAQSVDEWTGEQKVLYGDVAEDIEPEDIRPMGNYAVSITWPDGFSQIAPYDQLEEIERLVDVPPLSPVEV

SEQ ID NO: 43704 - protein, 532 aa, Arabidopsis thaliana
  peptide (1)..(532): Ceres Seq. ID no. 12337100
  misc_feature (79)..(155): Pfam Name: Domain of unknown function DUF59 Pfam Description: Domain of unknown function DUF59
  misc_feature (81)..(415): Homolog of NCBI NO: 17228148 NR Description: mrp protein homolog [Nostoc sp. PCC 7120]
  misc_feature (79)..(431): Homolog of NCBI NO: 23136009 NR Description: hypothetical protein [Cytophaga hutchinsonii]
  misc_feature (75)..(158): Homolog of NCBI NO: 21674599 NR Description: ATP-binding protein, Mrp/Nbp35 family [Chlorobium
  misc_feature (172)..(400): Homolog of NCBI NO: 21674599 NR Description: ATP-binding protein, Mrp/Nbp35 family [Chlorobium
  misc_feature (76)..(411): Homolog of NCBI NO: 22970050 NR Description: hypothetical protein [Chloroflexus aurantiacus]
  misc_feature (67)..(525): Homolog of NCBI NO: 34910672 NR Description: putative MRP protein (ATP/GTP-binding protein)
  misc_feature (305)..(532): Homolog of NCBI NO: 11994706 NR Description: contains similarity to nucleotide-binding
  misc_feature (1)..(290): Homolog of NCBI NO: 11994706 NR Description: contains similarity to nucleotide-binding
  misc_feature (1)..(532): Homolog of NCBI NO: 15230111 NR Description: mrp protein, putative
  misc_feature (1)..(532): Homolog of NCBI NO: 21592386 NR Description: mrp protein, putative [Arabidopsis thaliana]
MPLLHPQSLRHPSFEIQTQRRSNSTTRLLLSHKFLHSQASIISISRTRILKRVSQNLSVAKAASAQASSSVGESVAQTSEKDVLKALSQIIDPDFGTDIVSCGFVKDLGINEALGEVSFRLELTTPACPVKDMFENKANEVVAALPWVKKVNLTMSAQPAKPIFAGQLPFGLSRISNIIAVSSCKGGVGKSTVAVNLAYTLAGMGARVGIFDADVYGPSLPTMVNPESRILEMNPEKKTIIPTEYMGVKLVSFGFAGQGRAIMRGPMVSGVINQLLTTTEWGELDYLVIDMPPGTGDIQLTLCQVAPLTAAVIVTTPQKLAFIDVAKGVRMFSKLKVPCVAVVENMCHFDADGKRYYPFGKGSGSEVVKQFGIPHLFDLPIRPTLSASGDSGTPEVVSDPLSDVARTFQDLGVCVVQQCAKIRQQVSTAVTYDKYLKAIRVKVPNSDEEFLLHPATVRRNDRSAQSVDEWTGEQKVLYGDVAEDIEPEDIRPMGNYAVSITWPDGFSQIAPYDQLEEIERLVDVPPLSPVEV

SEQ ID NO: 43705 - protein, 400 aa, Arabidopsis thaliana
  peptide (1)..(400): Ceres Seq. ID no. 12337101
  misc_feature (45)..(76): Pfam Name: 4Fe-4S iron sulfur cluster binding proteins, Pfam Description: 4Fe-4S iron sulfur cluster binding proteins,
  misc_feature (1)..(283): Homolog of NCBI NO: 17228148 NR Description: mrp protein homolog [Nostoc sp. PCC 7120]
  misc_feature (1)..(299): Homolog of NCBI NO: 23136009 NR Description: hypothetical protein [Cytophaga hutchinsonii]
  misc_feature (1)..(26): Homolog of NCBI NO: 21674599 NR Description: ATP-binding protein, Mrp/Nbp35 family [Chlorobium
  misc_feature (40)..(268): Homolog of NCBI NO: 21674599 NR Description: ATP-binding protein, Mrp/Nbp35 family [Chlorobium
  misc_feature (1)..(279): Homolog of NCBI NO: 22970050 NR Description: hypothetical protein [Chloroflexus aurantiacus]
  misc_feature (1)..(393): Homolog of NCBI NO: 34910672 NR Description: putative MRP protein (ATP/GTP-binding protein)
  misc_feature (173)..(400): Homolog of NCBI NO: 11994706 NR Description: contains similarity to nucleotide-binding
  misc_feature (1)..(158): Homolog of NCBI NO: 11994706 NR Description: contains similarity to nucleotide-binding
  misc_feature (1)..(400): Homolog of NCBI NO: 15230111 NR Description: mrp protein, putative
  misc_feature (1)..(400): Homolog of NCBI NO: 21592386 NR Description: mrp protein, putative [Arabidopsis thaliana]
MFENKANEVVAALPWVKKVNLTMSAQPAKPIFAGQLPFGLSRISNIIAVSSCKGGVGKSTVAVNLAYTLAGMGARVGIFDADVYGPSLPTMVNPESRILEMNPEKKTIIPTEYMGVKLVSFGFAGQGRAIMRGPMVSGVINQLLTTTEWGELDYLVIDMPPGTGDIQLTLCQVAPLTAAVIVTTPQKLAFIDVAKGVRMFSKLKVPCVAVVENMCHFDADGKRYYPFGKGSGSEVVKQFGIPHLFDLPIRPTLSASGDSGTPEVVSDPLSDVARTFQDLGVCVVQQCAKIRQQVSTAVTYDKYLKAIRVKVPNSDEEFLLHPATVRRNDRSAQSVDEWTGEQKVLYGDVAEDIEPEDIRPMGNYAVSITWPDGFSQIAPYDQLEEIERLVDVPPLSPVEV

SEQ ID NO: 43706 - DNA, 1475 bp, Arabidopsis thaliana
  misc_feature (1)..(1475): Ceres Seq. ID no. 13575158
  misc_feature: MA Experiment ID: 20000173 Result: Down-regulated in Transcription
  misc_feature: MA Experiment 20000173 PARAMETER Experiment Name: At_42deg_Heat_P Parameter: Age (day) Value: 14
  misc_feature: MA Experiment 20000173 PARAMETER Experiment Name: At_42deg_Heat_P Parameter: Organism Value: A. thaliana
  misc_feature: MA Experiment 20000173 PARAMETER Experiment Name: At_42deg_Heat_P Parameter: Plant Line Value: WS
  misc_feature: MA Experiment 20000173 PARAMETER Experiment Name: At_42deg_Heat_P Parameter: Temperature (deg C) Value: 42 vs. 22
  misc_feature: MA Experiment 20000173 PARAMETER Experiment Name: At_42deg_Heat_P Parameter: Timepoint (hr) Value: 6
  misc_feature: MA Experiment 20000173 PARAMETER Experiment Name: At_42deg_Heat_P Parameter: Tissue Value: Aerial
  misc_feature: MA Experiment ID: 20000265 Result: Up-regulated in Transcription
  misc_feature: MA Experiment 20000265 PARAMETER Experiment Name: At_Open_Flower_P Parameter: Age (day) Value: 21
  misc_feature: MA Experiment 20000265 PARAMETER Experiment Name: At_Open_Flower_P Parameter: Plant Line Value: WS
  misc_feature: MA Experiment 20000265 PARAMETER Experiment Name: At_Open_Flower_P Parameter: Tissue Value: Closed Flower vs. Whole Plant
  misc_feature: MA Experiment ID: 20000286 Result: Up-regulated in Transcription
  misc_feature: MA Experiment 20000286 PARAMETER Experiment Name: At_Open_Flower_P Parameter: Age (day) Value: 21
  misc_feature: MA Experiment 20000286 PARAMETER Experiment Name: At_Open_Flower_P Parameter: Plant Line Value: WS
  misc_feature: MA Experiment 20000286 PARAMETER Experiment Name: At_Open_Flower_P Parameter: Tissue Value: Half Open vs. Whole Plant
  misc_feature: MA Experiment ID: 20001451 Result: Down-regulated in Transcription
  misc_feature: MA Experiment 20001451 PARAMETER Experiment Name: At_Far-red-induction_P Parameter: Age (day) Value: 7
  misc_feature: MA Experiment 20001451 PARAMETER Experiment Name: At_Far-red-induction_P Parameter: Light Value: Far-red vs. White
  misc_feature: MA Experiment 20001451 PARAMETER Experiment Name: At_Far-red-induction_P Parameter: Organism Value: A. thaliana
  misc_feature: MA Experiment 20001451 PARAMETER Experiment Name: At_Far-red-induction_P Parameter: Plant Line Value: Columbia
  misc_feature: MA Experiment 20001451 PARAMETER Experiment Name: At_Far-red-induction_P Parameter: Timepoint (hr) Value: 24
  misc_feature: MA Experiment 20001451 PARAMETER Experiment Name: At_Far-red-induction_P Parameter: Tissue Value: Whole Plant
aagtgacaaagattcaagctttaatgttctttgattggaattttttcaggttttgctcaatgtaaagaagttaaagattcaaactnttttttcacaatgggagagaatctgcatttgtctccacgacaccgatcttctctaaagaagccattgttgattgttttgttagtctgtatcacaagtgtgcttttggtgatcacttacatgtatccacaacacaacaacagtaagagctctgcttgtgcgggtttgtctagtagaggctgtcaagctgcgctctctggatggcttcctgttcatgtcaggaaattcactgatgaagaagtagcagctcgagttgtgatcaaagatatactgagactacctcctgctctaaccgctaaatcgaaaatcgcttttatgtttttgactcctggtactttgccatttgagaagctttgggataagtttttccagggtcaagaaggaagattctctatttacatccacccttccaggttacgaccagttcacattagccgtcacttttcagaccgtgaaattcatagtgatcatgtcacttggggaaggatttctatggttgatgctgagagacggcttctagcaaatgctcttgaagatcctgataaccagcactttgttcttctttcagaaagttgtataccgttgcatacatttgactacacctatcgatatttgatgcacgcaaatgtcagcttcattgatagttttgaggatcttggtcctcatgggactggcagacacatggatcacatgttacctgagatcccaaggcaagatttcagaaagggtgcacagtggttcacaatgaagcgtcaacacgctgtaatagtgatggctgatggtctctactactcgaaattccgggagtattgcagacctggagtagaagcaaacaagaactgcatcgcggatgaacattacctgccaacattctttcatatgcttgatcctggaggaatctcgaactggtcagtcacatatgttgattggtctgagcgtagatggcatccaaagacatatagagcacgcgatgtctcactcaagctcttgaaaaatatcacgtctgacgacatgagtgtacatgtaacaagcgttggcaagcgcggagaagagctgcgttggccttgtacatggaagggaattagacgaccatgttatctatttgcaaggaagcttcactcagatgctctttacaaactggtcagactctttccaaattacacaagcacagtggtctaagccagagacaaattcttgaaactaaaccatacgattcttgaaaccggaactaaacacttccagatatgccgagattggatcgcaatttactgtaaatttttgctttctcttgctgagatttagtgtctctttacatggtactctacttttattaaggtttagtataagaagaaagttagaagcagaaattttttggtcaaggagagatttgg

SEQ ID NO: 43707 - protein, 388 aa, Arabidopsis thaliana
  peptide (1)..(388): Ceres Seq. ID no. 13575159
  misc_feature (132)..(243): Pfam Name: Arabidopsis protein of unknown function, DUF266 Pfam Description: Arabidopsis protein of unknown function, DUF266
  misc_feature (9)..(384): Homolog of NCBI NO: 38637182 NR Description: unknown protein [Oryza sativa (japonica
  misc_feature (10)..(387): Homolog of NCBI NO: 26452247 NR Description: unknown protein [Arabidopsis thaliana]
  misc_feature (9)..(384): Homolog of NCBI NO: 38346557 NR Description: OSJNBa0035M09.18 [Oryza sativa (japonica
  misc_feature (10)..(340): Homolog of NCBI NO: 7487281 NR Description: hypothetical protein T20K24.18 - Arabidopsis
  misc_feature (10)..(387): Homolog of NCBI NO: 30680587 NR Description: expressed protein [Arabidopsis thaliana]
  misc_feature (16)..(387): Homolog of NCBI NO: 22329024 NR Description: expressed protein [Arabidopsis thaliana]
  misc_feature (1)..(388): Homolog of NCBI NO: 15236024 NR Description: expressed protein [Arabidopsis thaliana]
  misc_feature (1)..(343): Homolog of NCBI NO: 8777360 NR Description: gene_id:MJB24.8~pir||T04241~strong similarity to
  misc_feature (1)..(388): Homolog of NCBI NO: 17065016 NR Description: Unknown protein [Arabidopsis thaliana]
  misc_feature (1)..(388): Homolog of NCBI NO: 22327910 NR Description: expressed protein [Arabidopsis thaliana]
MGENLHLSPRHRSSLKKPLLIVLLVCITSVLLVITYMYPQHNNSKSSACAGLSSRGCQAALSGWLPVHVRKFTDEEVAARVVIKDILRLPPALTAKSKIAFMFLTPGTLPFEKLWDKFFQGQEGRFSIYIHPSRLRPVHISRHFSDREIHSDHVTWGRISMVDAERRLLANALEDPDNQHFVLLSESCIPLHTFDYTYRYLMHANVSFIDSFEDLGPHGTGRHMDHMLPEIPRQDFRKGAQWFTMKRQHAVIVMADGLYYSKFREYCRPGVEANKNCIADEHYLPTFFHMLDPGGISNWSVTYVDWSERRWHPKTYRARDVSLKLLKNITSDDMSVHVTSVGKRGEELRWPCTWKGIRRPCYLFARKLHSDALYKLVRLFPNYTSTVV

SEQ ID NO: 43708 - protein, 352 aa, Arabidopsis thaliana
  peptide (1)..(352): Ceres Seq. ID no. 13575160
  misc_feature (96)..(207): Pfam Name: Arabidopsis protein of unknown function, DUF266 Pfam Description: Arabidopsis protein of unknown function, DUF266
  misc_feature (1)..(348): Homolog of NCBI NO: 38637182 NR Description: unknown protein [Oryza sativa (japonica
  misc_feature (1)..(351): Homolog of NCBI NO: 26452247 NR Description: unknown protein [Arabidopsis thaliana]
  misc_feature (1)..(348): Homolog of NCBI NO: 38346557 NR Description: OSJNBa0035M09.18 [Oryza sativa (japonica
  misc_feature (1)..(304): Homolog of NCBI NO: 7487281 NR Description: hypothetical protein T20K24.18 - Arabidopsis
  misc_feature (1)..(351): Homolog of NCBI NO: 30680587 NR Description: expressed protein [Arabidopsis thaliana]
  misc_feature (1)..(351): Homolog of NCBI NO: 22329024 NR Description: expressed protein [Arabidopsis thaliana]
  misc_feature (1)..(352): Homolog of NCBI NO: 15236024 NR Description: expressed protein [Arabidopsis thaliana]
  misc_feature (1)..(307): Homolog of NCBI NO: 8777360 NR Description: gene_id:MJB24.8~pir||T04241~strong similarity to
  misc_feature (1)..(352): Homolog of NCBI NO: 17065016 NR Description: Unknown protein [Arabidopsis thaliana]
  misc_feature (1)..(352): Homolog of NCBI NO: 22327910 NR Description: expressed protein [Arabidopsis thaliana]
MYPQHNNSKSSACAGLSSRGCQAALSGWLPVHVRKFTDEEVAARVVIKDILRLPPALTAKSKIAFMFLTPGTLPFEKLWDKFFQGQEGRFSIYIHPSRLRPVHISRHFSDREIHSDHVTWGRISMVDAERRLLANALEDPDNQHFVLLSESCIPLHTFDYTYRYLMHANVSFIDSFEDLGPHGTGRHMDHMLPEIPRQDFRKGAQWFTMKRQHAVIVMADGLYYSKFREYCRPGVEANKNCIADEHYLPTFFHMLDPGGISNWSVTYVDWSERRWHPKTYRARDVSLKLLKNITSDDMSVHVTSVGKRGEELRWPCTWKGIRRPCYLFARKLHSDALYKLVRLFPNYTSTVV

SEQ ID NO: 43709 - protein, 287 aa, Arabidopsis thaliana
  peptide (1)..(287): Ceres Seq. ID no. 13575161
  misc_feature (31)..(142): Pfam Name: Arabidopsis protein of unknown function, DUF266 Pfam Description: Arabidopsis protein of unknown function, DUF266
  misc_feature (1)..(283): Homolog of NCBI NO: 38637182 NR Description: unknown protein [Oryza sativa (japonica
  misc_feature (1)..(286): Homolog of NCBI NO: 26452247 NR Description: unknown protein [Arabidopsis thaliana]
  misc_feature (1)..(283): Homolog of NCBI NO: 38346557 NR Description: OSJNBa0035M09.18 [Oryza sativa (japonica
  misc_feature (1)..(239): Homolog of NCBI NO: 7487281 NR Description: hypothetical protein T20K24.18 - Arabidopsis
  misc_feature (1)..(286): Homolog of NCBI NO: 30680587 NR Description: expressed protein [Arabidopsis thaliana]
  misc_feature (1)..(286): Homolog of NCBI NO: 22329024 NR Description: expressed protein [Arabidopsis thaliana]
  misc_feature (1)..(287): Homolog of NCBI NO: 15236024 NR Description: expressed protein [Arabidopsis thaliana]
  misc_feature (1)..(242): Homolog of NCBI NO: 8777360 NR Description: gene_id:MJB24.8~pir||T04241~strong similarity to
  misc_feature (1)..(287): Homolog of NCBI NO: 17065016 NR Description: Unknown protein [Arabidopsis thaliana]
  misc_feature (1)..(287): Homolog of NCBI NO: 22327910 NR Description: expressed protein [Arabidopsis thaliana]
MFLTPGTLPFEKLWDKFFQGQEGRFSIYIHPSRLRPVHISRHFSDREIHSDHVTWGRISMVDAERRLLANALEDPDNQHFVLLSESCIPLHTFDYTYRYLMHANVSFIDSFEDLGPHGTGRHMDHMLPEIPRQDFRKGAQWFTMKRQHAVIVMADGLYYSKFREYCRPGVEANKNCIADEHYLPTFFHMLDPGGISNWSVTYVDWSERRWHPKTYRARDVSLKLLKNITSDDMSVHVTSVGKRGEELRWPCTWKGIRRPCYLFARKLHSDALYKLVRLFPNYTSTVV

SEQ ID NO: 43710 - DNA, 866 bp, Arabidopsis thaliana; identical to SEQ ID NO: 26734
  misc_feature (1)..(866): Ceres Seq. ID no. 12559528
  misc_feature: MA Experiment ID: 108434 Result: Up-regulated in Transcription
  misc_feature: MA Experiment 108434 PARAMETER Experiment Name: At_Root_Tips_cDNA_P Parameter: Tissue Value: Root Tips
  misc_feature: MA Experiment ID: 108461 Result: Down-regulated in Transcription
  misc_feature: MA Experiment 108461 PARAMETER Experiment Name: At_Germinating_Seeds_cDNA_P Parameter: Age (day) Value: 1 vs. 0
  misc_feature: MA Experiment 108461 PARAMETER Experiment Name: At_Germinating_Seeds_cDNA_P Parameter: Tissue Value: Germinating Seeds
  misc_feature: MA Experiment ID: 108462 Result: Down-regulated in Transcription
  misc_feature: MA Experiment 108462 PARAMETER Experiment Name: At_Germinating_Seeds_cDNA_P Parameter: Age (day) Value: 2 vs. 0
  misc_feature: MA Experiment 108462 PARAMETER Experiment Name: At_Germinating_Seeds_cDNA_P Parameter: Tissue Value: Germinating Seeds
  misc_feature: MA Experiment ID: 108463 Result: Down-regulated in Transcription
  misc_feature: MA Experiment 108463 PARAMETER Experiment Name: At_Germinating_Seeds_cDNA_P Parameter: Age (day) Value: 3 vs. 0
  misc_feature: MA Experiment 108463 PARAMETER Experiment Name: At_Germinating_Seeds_cDNA_P Parameter: Tissue Value: Germinating Seeds
  misc_feature: MA Experiment ID: 108464 Result: Down-regulated in Transcription
  misc_feature: MA Experiment 108464 PARAMETER Experiment Name: At_Germinating_Seeds_cDNA_P Parameter: Age (day) Value: 4 vs. 0
  misc_feature: MA Experiment 108464 PARAMETER Experiment Name: At_Germinating_Seeds_cDNA_P Parameter: Tissue Value: Germinating Seeds
  misc_feature: MA Experiment ID: 108573 Result: Down-regulated in Transcription
  misc_feature: MA Experiment 108573 PARAMETER Experiment Name: At_Drought_cDNA_P Parameter: Timepoint (hr) Value: 6
  misc_feature: MA Experiment 108573 PARAMETER Experiment Name: At_Drought_cDNA_P Parameter: Tissue Value: Aerial
  misc_feature: MA Experiment 108573 PARAMETER Experiment Name: At_Drought_cDNA_P Parameter: Treatment Value: Drought vs. No Drought
  misc_feature: MA Experiment ID: 20000113 Result: Up-regulated in Transcription
  misc_feature: MA Experiment 20000113 PARAMETER Experiment Name: At_42deg_Heat_cDNA_P Parameter: Temperature (deg C) Value: 42 vs. 22
  misc_feature: MA Experiment 20000113 PARAMETER Experiment Name: At_42deg_Heat_cDNA_P Parameter: Timepoint (hr) Value: 8
  misc_feature: MA Experiment 20000113 PARAMETER Experiment Name: At_42deg_Heat_cDNA_P Parameter: Tissue Value: Aerial
  misc_feature: MA Experiment ID: 20000180 Result: Down-regulated in Transcription
  misc_feature: MA Experiment 20000180 PARAMETER Experiment Name: At_Germinating_Seeds_P Parameter: Age (hr) Value: 24 vs. 0
  misc_feature: MA Experiment 20000180 PARAMETER Experiment Name: At_Germinating_Seeds_P Parameter: Tissue Value: Germinating Seeds
  misc_feature: MA Experiment ID: 20000184 Result: Down-regulated in Transcription
  misc_feature: MA Experiment 20000184 PARAMETER Experiment Name: At_Shoots__P Parameter: Age (day) Value: 7
  misc_feature: MA Experiment 20000184 PARAMETER Experiment Name: At_Shoots__P Parameter: Tissue Value: Shoots vs. Whole Plant
  misc_feature: MA Experiment ID: 20000224 Result: Up-regulated in Transcription
  misc_feature: MA Experiment ID: 20001451 Result: Up-regulated in Transcription
  misc_feature: MA Experiment 20001451 PARAMETER Experiment Name: At_Far-red-induction_P Parameter: Age (day) Value: 7
  misc_feature: MA Experiment 20001451 PARAMETER Experiment Name: At_Far-red-induction_P Parameter: Light Value: Far-red vs. White
  misc_feature: MA Experiment 20001451 PARAMETER Experiment Name: At_Far-red-induction_P Parameter: Organism Value: A. thaliana
  misc_feature: MA Experiment 20001451 PARAMETER Experiment Name: At_Far-red-induction_P Parameter: Plant Line Value: Columbia
  misc_feature: MA Experiment 20001451 PARAMETER Experiment Name: At_Far-red-induction_P Parameter: Timepoint (hr) Value: 24
  misc_feature: MA Experiment 20001451 PARAMETER Experiment Name: At_Far-red-induction_P Parameter: Tissue Value: Whole Plant
  misc_feature: MA Experiment ID: 20001557 Result: Up-regulated in Transcription
  misc_feature: MA Experiment 20001557 PARAMETER Experiment Name: At_Drought_Soil_Dry_P Parameter: Age (day) Value: 27
  misc_feature: MA Experiment 20001557 PARAMETER Experiment Name: At_Drought_Soil_Dry_P Parameter: Organism Value: A. thaliana
  misc_feature: MA Experiment 20001557 PARAMETER Experiment Name: At_Drought_Soil_Dry_P Parameter: Plant Line Value: WS
  misc_feature: MA Experiment 20001557 PARAMETER Experiment Name: At_Drought_Soil_Dry_P Parameter: Post Timepoint (hr) Value: 3
  misc_feature: MA Experiment 20001557 PARAMETER Experiment Name: At_Drought_Soil_Dry_P Parameter: Post-Treatment Value: Re-Water vs. No Drought
  misc_feature: MA Experiment 20001557 PARAMETER Experiment Name: At_Drought_Soil_Dry_P Parameter: Timepoint (day) Value: 13
  misc_feature: MA Experiment 20001557 PARAMETER Experiment Name: At_Drought_Soil_Dry_P Parameter: Treatment Value: Drought vs. No Drought
  misc_feature: MA Experiment ID: 20001558 Result: Up-regulated in Transcription
  misc_feature: MA Experiment 20001558 PARAMETER Experiment Name: At_Drought_Soil_Dry_P Parameter: Age (day) Value: 27
  misc_feature: MA Experiment 20001558 PARAMETER Experiment Name: At_Drought_Soil_Dry_P Parameter: Organism Value: A. thaliana
  misc_feature: MA Experiment 20001558 PARAMETER Experiment Name: At_Drought_Soil_Dry_P Parameter: Plant Line Value: WS
  misc_feature: MA Experiment 20001558 PARAMETER Experiment Name: At_Drought_Soil_Dry_P Parameter: Post Timepoint (hr) Value: 6
  misc_feature: MA Experiment 20001558 PARAMETER Experiment Name: At_Drought_Soil_Dry_P Parameter: Post-Treatment Value: Re-Water vs. No Drought
  misc_feature: MA Experiment 20001558 PARAMETER Experiment Name: At_Drought_Soil_Dry_P Parameter: Timepoint (day) Value: 13
  misc_feature: MA Experiment 20001558 PARAMETER Experiment Name: At_Drought_Soil_Dry_P Parameter: Treatment Value: Drought vs. No Drought
  misc_feature: MA Experiment ID: 20001757 Result: Up-regulated in Transcription
  misc_feature: MA Experiment 20001757 PARAMETER Experiment Name: At_50mM_NH4NO3_L-to-H_P Parameter: Timepoint (hr) Value: 6
  misc_feature: MA Experiment 20001757 PARAMETER Experiment Name: At_50mM_NH4NO3_L-to-H_P Parameter: Tissue Value: Leaf
  misc_feature: MA Experiment 20001757 PARAMETER Experiment Name: At_50mM_NH4NO3_L-to-H_P Parameter: Treatment Value: 50mM NH4NO3 vs 100mM Mannitol

SEQ ID NO: 43711 - protein, 245 aa, Arabidopsis thaliana; identical to SEQ ID NO: 26735
  peptide (1)..(245): Ceres Seq. ID no. 12559529
  misc_feature (85)..(156): Pfam Name: RNA recognition motif. (a.k.a. RRM, RBD, or RNP domain) Pfam Description: RNA recognition motif. (a.k.a. RRM, RBD, or RNP
  misc_feature (85)..(156): Pfam Name: RNA recognition motif. (a.k.a. RRM, RBD, or RNP domain) Pfam Description: RNA recognition motif. (a.k.a. RRM, RBD, or RNP
  misc_feature (84)..(226): Homolog of NCBI NO: 38111220 NR Description: hypothetical protein MG07186.4 [Magnaporthe
  misc_feature (78)..(207): Homolog of NCBI NO: 6324219 NR Description: Nucleolar protein 15; Nop15p [Saccharomyces
  misc_feature (58)..(224): Homolog of NCBI NO: 20302745 NR Description: unknown [Branchiostoma floridae]
  misc_feature (50)..(237): Homolog of NCBI NO: 21314753 NR Description: MKI67 (FHA domain) interacting nucleolar
  misc_feature (50)..(237): Homolog of NCBI NO: 13699902 NR Description: nucleolar phosphoprotein Nopp34 [Homo sapiens]
  misc_feature (84)..(226): Homolog of NCBI NO: 38111220 NR Description: hypothetical protein MG07186.4 [Magnaporthe
  misc_feature (58)..(224): Homolog of NCBI NO: 20302745 NR Description: unknown [Branchiostoma floridae]
  misc_feature (50)..(237): Homolog of NCBI NO: 13699902 NR Description: nucleolar phosphoprotein Nopp34 [Homo sapiens]
  misc_feature (24)..(245): Homolog of NCBI NO: 15238220 NR Description: RRM-containing protein
  misc_feature (24)..(245): Homolog of NCBI NO: 18652180 NR Description: RNA binding protein [Elaeis oleifera]
  misc_feature (84)..(237): Homolog of NCBI NO: 40741317 NR Description: hypothetical protein AN4346.2 [Aspergillus
  misc_feature (50)..(245): Homolog of NCBI NO: 27545352 NR Description: mki67 (FHA domain) interacting nucleolar
  misc_feature (78)..(224): Homolog of NCBI NO: 19076051 NR Description: putative RNA-binding protein [Schizosaccharomyces
  misc_feature (50)..(237): Homolog of NCBI NO: 21314753 NR Description: MKI67 (FHA domain) interacting nucleolar
  misc_feature (78)..(207): Homolog of NCBI NO: 6324219 NR Description: Nucleolar protein 15; Nop15p [Saccharomyces
  misc_feature (78)..(224): Homolog of NCBI NO: 19076051 NR Description: putative RNA-binding protein [Schizosaccharomyces
  misc_feature (50)..(245): Homolog of NCBI NO: 27545352 NR Description: mki67 (FHA domain) interacting nucleolar
  misc_feature (84)..(237): Homolog of NCBI NO: 40741317 NR Description: hypothetical protein AN4346.2 [Aspergillus
  misc_feature (24)..(245): Homolog of NCBI NO: 18652180 NR Description: RNA binding protein [Elaeis oleifera]
  misc_feature (24)..(245): Homolog of NCBI NO: 15238220 NR Description: RRM-containing protein

SEQ ID NO: 43712 - protein, 222 aa, Arabidopsis thaliana; identical to SEQ ID NO: 26736
  peptide (1)..(222): Ceres Seq. ID no. 12559530
  misc_feature (62)..(133): Pfam Name: RNA recognition motif. (a.k.a. RRM, RBD, or RNP domain) Pfam Description: RNA recognition motif. (a.k.a. RRM, RBD, or RNP
  misc_feature (62)..(133): Pfam Name: RNA recognition motif. (a.k.a. RRM, RBD, or RNP domain) Pfam Description: RNA recognition motif. (a.k.a. RRM, RBD, or RNP
  misc_feature (61)..(203): Homolog of NCBI NO: 38111220 NR Description: hypothetical protein MG07186.4 [Magnaporthe
  misc_feature (55)..(184): Homolog of NCBI NO: 6324219 NR Description: Nucleolar protein 15; Nop15p [Saccharomyces
  misc_feature (35)..(201): Homolog of NCBI NO: 20302745 NR Description: unknown [Branchiostoma floridae]
  misc_feature (27)..(214): Homolog of NCBI NO: 21314753 NR Description: MKI67 (FHA domain) interacting nucleolar
  misc_feature (27)..(214): Homolog of NCBI NO: 13699902 NR Description: nucleolar phosphoprotein Nopp34 [Homo sapiens]
  misc_feature (61)..(203): Homolog of NCBI NO: 38111220 NR Description: hypothetical protein MG07186.4 [Magnaporthe
  misc_feature (35)..(201): Homolog of NCBI NO: 20302745 NR Description: unknown [Branchiostoma floridae]
  misc_feature (27)..(214): Homolog of NCBI NO: 13699902 NR Description: nucleolar phosphoprotein Nopp34 [Homo sapiens]
  misc_feature (1)..(222): Homolog of NCBI NO: 15238220 NR Description: RRM-containing protein
  misc_feature (1)..(222): Homolog of NCBI NO: 18652180 NR Description: RNA binding protein [Elaeis oleifera]
  misc_feature (61)..(214): Homolog of NCBI NO: 40741317 NR Description: hypothetical protein AN4346.2 [Aspergillus
  misc_feature (27)..(222): Homolog of NCBI NO: 27545352 NR Description: mki67 (FHA domain) interacting nucleolar
  misc_feature (55)..(201): Homolog of NCBI NO: 19076051 NR Description: putative RNA-binding protein [Schizosaccharomyces
  misc_feature (27)..(214): Homolog of NCBI NO: 21314753 NR Description: MKI67 (FHA domain) interacting nucleolar
  misc_feature (55)..(184): Homolog of NCBI NO: 6324219 NR Description: Nucleolar protein 15; Nop15p [Saccharomyces
  misc_feature (55)..(201): Homolog of NCBI NO: 19076051 NR Description: putative RNA-binding protein [Schizosaccharomyces
  misc_feature (27)..(222): Homolog of NCBI NO: 27545352 NR Description: mki67 (FHA domain) interacting nucleolar
  misc_feature (61)..(214): Homolog of NCBI NO: 40741317 NR Description: hypothetical protein AN4346.2 [Aspergillus
  misc_feature (1)..(222): Homolog of NCBI NO: 18652180 NR Description: RNA binding protein [Elaeis oleifera]
  misc_feature (1)..(222): Homolog of NCBI NO: 15238220 NR Description: RRM-containing protein

SEQ ID NO: 43713 - protein, 210 aa, Arabidopsis thaliana; identical to SEQ ID NO: 26737
  peptide (1)..(210): Ceres Seq. ID no. 12559531
  misc_feature (50)..(121): Pfam Name: RNA recognition motif. (a.k.a. RRM, RBD, or RNP domain) Pfam Description: RNA recognition motif. (a.k.a. RRM, RBD, or RNP
  misc_feature (50)..(121): Pfam Name: RNA recognition motif. (a.k.a. RRM, RBD, or RNP domain) Pfam Description: RNA recognition motif. (a.k.a. RRM, RBD, or RNP
  misc_feature (49)..(191): Homolog of NCBI NO: 38111220 NR Description: hypothetical protein MG07186.4 [Magnaporthe
  misc_feature (43)..(172): Homolog of NCBI NO: 6324219 NR Description: Nucleolar protein 15; Nop15p [Saccharomyces
  misc_feature (23)..(189): Homolog of NCBI NO: 20302745 NR Description: unknown [Branchiostoma floridae]
  misc_feature (15)..(202): Homolog of NCBI NO: 21314753 NR Description: MKI67 (FHA domain) interacting nucleolar
  misc_feature (15)..(202): Homolog of NCBI NO: 13699902 NR Description: nucleolar phosphoprotein Nopp34 [Homo sapiens]
  misc_feature (49)..(191): Homolog of NCBI NO: 38111220 NR Description: hypothetical protein MG07186.4 [Magnaporthe
  misc_feature (23)..(189): Homolog of NCBI NO: 20302745 NR Description: unknown [Branchiostoma floridae]
  misc_feature (15)..(202): Homolog of NCBI NO: 13699902 NR Description: nucleolar phosphoprotein Nopp34 [Homo sapiens]
  misc_feature (1)..(210): Homolog of NCBI NO: 15238220 NR Description: RRM-containing protein
  misc_feature (1)..(210): Homolog of NCBI NO: 18652180 NR Description: RNA binding protein [Elaeis oleifera]
  misc_feature (49)..(202): Homolog of NCBI NO: 40741317 NR Description: hypothetical protein AN4346.2 [Aspergillus
  misc_feature (15)..(210): Homolog of NCBI NO: 27545352 NR Description: mki67 (FHA domain) interacting nucleolar
  misc_feature (43)..(189): Homolog of NCBI NO: 19076051 NR Description: putative RNA-binding protein [Schizosaccharomyces
  misc_feature (15)..(202): Homolog of NCBI NO: 21314753 NR Description: MKI67 (FHA domain) interacting nucleolar
  misc_feature (43)..(172): Homolog of NCBI NO: 6324219 NR Description: Nucleolar protein 15; Nop15p [Saccharomyces
  misc_feature (43)..(189): Homolog of NCBI NO: 19076051 NR Description: putative RNA-binding protein [Schizosaccharomyces
  misc_feature (15)..(210): Homolog of NCBI NO: 27545352 NR Description: mki67 (FHA domain) interacting nucleolar
  misc_feature (49)..(202): Homolog of NCBI NO: 40741317 NR Description: hypothetical protein AN4346.2 [Aspergillus
  misc_feature (1)..(210): Homolog of NCBI NO: 18652180 NR Description: RNA binding protein [Elaeis oleifera]
  misc_feature (1)..(210): Homolog of NCBI NO: 15238220 NR Description: RRM-containing protein

SEQ ID NO: 43714 - DNA, 1211 bp, Arabidopsis thaliana
  misc_feature (1)..(1211): Ceres Seq. ID no. 12336314
  misc_feature: MA Experiment ID: 108434 Result: Down-regulated in Transcription
  misc_feature: MA Experiment 108434 PARAMETER Experiment Name: At_Root_Tips_cDNA_P Parameter: Tissue Value: Root Tips
  misc_feature: MA Experiment ID: 108435 Result: Up-regulated in Transcription
  misc_feature: MA Experiment 108435 PARAMETER Experiment Name: At_stm_Mutants_cDNA_P Parameter: Plant Line Value: wt Landsburg vs stm
  misc_feature: MA Experiment 108435 PARAMETER Experiment Name: At_stm_Mutants_cDNA_P Parameter: Tissue Value: Shoot Apical Meristem Region
  misc_feature: MA Experiment ID: 108461 Result: Down-regulated in Transcription
  misc_feature: MA Experiment 108461 PARAMETER Experiment Name: At_Germinating_Seeds_cDNA_P Parameter: Age (day) Value: 1 vs. 0
  misc_feature: MA Experiment 108461 PARAMETER Experiment Name: At_Germinating_Seeds_cDNA_P Parameter: Tissue Value: Germinating Seeds
  misc_feature: MA Experiment ID: 108464 Result: Down-regulated in Transcription
  misc_feature: MA Experiment 108464 PARAMETER Experiment Name: At_Germinating_Seeds_cDNA_P Parameter: Age (day) Value: 4 vs. 0
  misc_feature: MA Experiment 108464 PARAMETER Experiment Name: At_Germinating_Seeds_cDNA_P Parameter: Tissue Value: Germinating Seeds
  misc_feature: MA Experiment ID: 108469 Result: Down-regulated in Transcription
  misc_feature: MA Experiment ID: 108488 Result: Down-regulated in Transcription
  misc_feature: MA Experiment ID: 108501 Result: Up-regulated in Transcription
  misc_feature: MA Experiment 108501 PARAMETER Experiment Name: At_ap2_floral_buds_cDNA_P Parameter: Plant Line Value: ap2 (Ler.)
  misc_feature: MA Experiment 108501 PARAMETER Experiment Name: At_ap2_floral_buds_cDNA_P Parameter: Tissue Value: Closed Flower
  misc_feature: MA Experiment ID: 108561 Result: Up-regulated in Transcription
  misc_feature: MA Experiment 108561 PARAMETER Experiment Name: At_100uM_ABA_cDNA_P Parameter: Timepoint (hr) Value: 6
  misc_feature: MA Experiment 108561 PARAMETER Experiment Name: At_100uM_ABA_cDNA_P Parameter: Tissue Value: Aerial
  misc_feature: MA Experiment 108561 PARAMETER Experiment Name: At_100uM_ABA_cDNA_P Parameter: Treatment Value: 100uM ABA vs. No Treatment
  misc_feature: MA Experiment ID: 108573 Result: Up-regulated in Transcription
  misc_feature: MA Experiment 108573 PARAMETER Experiment Name: At_Drought_cDNA_P Parameter: Timepoint (hr) Value: 6
  misc_feature: MA Experiment 108573 PARAMETER Experiment Name: At_Drought_cDNA_P Parameter: Tissue Value: Aerial
  misc_feature: MA Experiment 108573 PARAMETER Experiment Name: At_Drought_cDNA_P Parameter: Treatment Value: Drought vs. No Drought
  misc_feature: MA Experiment ID: 108595 Result: Up-regulated in Transcription
  misc_feature: MA Experiment 108595 PARAMETER Experiment Name: At_Ler-pi_Ovule_cDNA_P Parameter: Plant Line Value: null
  misc_feature: MA Experiment ID: 108605 Result: Up-regulated in Transcription
  misc_feature: MA Experiment 108605 PARAMETER Experiment Name: At_100uM_ABA_cDNA_P Parameter: Timepoint (hr) Value: 6
  misc_feature: MA Experiment 108605 PARAMETER Experiment Name: At_100uM_ABA_cDNA_P Parameter: Tissue Value: Aerial
  misc_feature: MA Experiment 108605 PARAMETER Experiment Name: At_100uM_ABA_cDNA_P Parameter: Treatment Value: 100uM ABA vs. No Treatment
  misc_feature: MA Experiment ID: 108607 Result: Up-regulated in Transcription
  misc_feature: MA Experiment 108607 PARAMETER Experiment Name: At_100uM_ABA_cDNA_P Parameter: Timepoint (hr) Value: 4
  misc_feature: MA Experiment 108607 PARAMETER Experiment Name: At_100uM_ABA_cDNA_P Parameter: Tissue Value: Aerial
  misc_feature: MA Experiment 108607 PARAMETER Experiment Name: At_100uM_ABA_cDNA_P Parameter: Treatment Value: 100uM ABA vs. No Treatment
  misc_feature: MA Experiment ID: 108609 Result: Up-regulated in Transcription
  misc_feature: MA Experiment 108609 PARAMETER Experiment Name: At_100uM_ABA_cDNA_P Parameter: Timepoint (hr) Value: 24
  misc_feature: MA Experiment 108609 PARAMETER Experiment Name: At_100uM_ABA_cDNA_P Parameter: Tissue Value: Aerial
  misc_feature: MA Experiment 108609 PARAMETER Experiment Name: At_100uM_ABA_cDNA_P Parameter: Treatment Value: 100uM ABA vs. No Treatment
  misc_feature: MA Experiment ID: 108668 Result: Down-regulated in Transcription
  misc_feature: MA Experiment 108668 PARAMETER Experiment Name: At_2mM_SA_cDNA_P Parameter: Plant Line Value: WS
  misc_feature: MA Experiment 108668 PARAMETER Experiment Name: At_2mM_SA_cDNA_P Parameter: Timepoint (hr) Value: 6
  misc_feature: MA Experiment 108668 PARAMETER Experiment Name: At_2mM_SA_cDNA_P Parameter: Treatment Value: 2mM SA vs. No Treatment
  misc_feature: MA Experiment ID: 20000068 Result: Up-regulated in Transcription
  misc_feature: MA Experiment ID: 20000069 Result: Up-regulated in Transcription
  misc_feature: MA Experiment 20000069 PARAMETER Experiment Name: At_100uM_ABA_Mutants_cDNA_P Parameter: Plant Line Value: CS23
  misc_feature: MA Experiment 20000069 PARAMETER Experiment Name: At_100uM_ABA_Mutants_cDNA_P Parameter: Timepoint (hr) Value: 6
  misc_feature: MA Experiment 20000069 PARAMETER Experiment Name: At_100uM_ABA_Mutants_cDNA_P Parameter: Tissue Value: Aerial
  misc_feature: MA Experiment 20000069 PARAMETER Experiment Name: At_100uM_ABA_Mutants_cDNA_P Parameter: Treatment Value: 100uM ABA vs. No Treatment
  misc_feature: MA Experiment ID: 20000070 Result: Up-regulated in Transcription
  misc_feature: MA Experiment 20000070 PARAMETER Experiment Name: At_100uM_ABA_Mutants_cDNA_P Parameter: Plant Line Value: CS24
  misc_feature: MA Experiment 20000070 PARAMETER Experiment Name: At_100uM_ABA_Mutants_cDNA_P Parameter: Timepoint (hr) Value: 6
  misc_feature: MA Experiment 20000070 PARAMETER Experiment Name: At_100uM_ABA_Mutants_cDNA_P Parameter: Tissue Value: Aerial
  misc_feature: MA Experiment 20000070 PARAMETER Experiment Name: At_100uM_ABA_Mutants_cDNA_P Parameter: Treatment Value: 100uM ABA vs. No Treatment
  misc_feature: MA Experiment ID: 20000071 Result: Up-regulated in Transcription
  misc_feature: MA Experiment 20000071 PARAMETER Experiment Name: At_100uM_ABA_Mutants_cDNA_P Parameter: Plant Line Value: CS8104
  misc_feature: MA Experiment 20000071 PARAMETER Experiment Name: At_100uM_ABA_Mutants_cDNA_P Parameter: Timepoint (hr) Value: 6
  misc_feature: MA Experiment 20000071 PARAMETER Experiment Name: At_100uM_ABA_Mutants_cDNA_P Parameter: Tissue Value: Aerial
  misc_feature: MA Experiment 20000071 PARAMETER Experiment Name: At_100uM_ABA_Mutants_cDNA_P Parameter: Treatment Value: 100uM ABA vs. No Treatment
  misc_feature: MA Experiment ID: 20000072 Result: Up-regulated in Transcription
  misc_feature: MA Experiment 20000072 PARAMETER Experiment Name: At_100uM_ABA_Mutants_cDNA_P Parameter: Plant Line Value: CS8105
  misc_feature: MA Experiment 20000072 PARAMETER Experiment Name: At_100uM_ABA_Mutants_cDNA_P Parameter: Timepoint (hr) Value: 6
  misc_feature: MA Experiment 20000072 PARAMETER Experiment Name: At_100uM_ABA_Mutants_cDNA_P Parameter: Tissue Value: Aerial
  misc_feature: MA Experiment 20000072 PARAMETER Experiment Name: At_100uM_ABA_Mutants_cDNA_P Parameter: Treatment Value: 100uM ABA vs. No Treatment
  misc_feature: MA Experiment ID: 20000086 Result: Up-regulated in Transcription
  misc_feature: MA Experiment 20000086 PARAMETER Experiment Name: At_100uM_ABA_Mutants_cDNA_P Parameter: Plant Line Value: CS22
  misc_feature: MA Experiment 20000086 PARAMETER Experiment Name: At_100uM_ABA_Mutants_cDNA_P Parameter: Timepoint (hr) Value: 6
  misc_feature: MA Experiment 20000086 PARAMETER Experiment Name: At_100uM_ABA_Mutants_cDNA_P Parameter: Tissue Value: Aerial
  misc_feature: MA Experiment 20000086 PARAMETER Experiment Name: At_100uM_ABA_Mutants_cDNA_P Parameter: Treatment Value: 100uM ABA vs. No Treatment
  misc_feature: MA Experiment ID: 20000087 Result: Up-regulated in Transcription
  misc_feature: MA Experiment 20000087 PARAMETER Experiment Name: At_100uM_ABA_Mutants_cDNA_P Parameter: Plant Line Value: WS
  misc_feature: MA Experiment 20000087 PARAMETER Experiment Name: At_100uM_ABA_Mutants_cDNA_P Parameter: Timepoint (hr) Value: 6
  misc_feature: MA Experiment 20000087 PARAMETER Experiment Name: At_100uM_ABA_Mutants_cDNA_P Parameter: Tissue Value: Aerial
  misc_feature: MA Experiment 20000087 PARAMETER Experiment Name: At_100uM_ABA_Mutants_cDNA_P Parameter: Treatment Value: 100uM ABA vs. No Treatment
  misc_feature: MA Experiment ID: 20000090 Result: Down-regulated in Transcription
  misc_feature: MA Experiment ID: 20000117 Result: Up-regulated in Transcription
  misc_feature: MA Experiment 20000117 PARAMETER Experiment Name: At_100uM_ABA_Mutants_cDNA_P Parameter: Plant Line Value: Columbia
  misc_feature: MA Experiment 20000117 PARAMETER Experiment Name: At_100uM_ABA_Mutants_cDNA_P Parameter: Timepoint (hr) Value: 6
  misc_feature: MA Experiment 20000117 PARAMETER Experiment Name: At_100uM_ABA_Mutants_cDNA_P Parameter: Tissue Value: Aerial
  misc_feature: MA Experiment 20000117 PARAMETER Experiment Name: At_100uM_ABA_Mutants_cDNA_P Parameter: Treatment Value: 100uM ABA vs. No Treatment
  misc_feature: MA Experiment ID: 20000182 Result: Down-regulated in Transcription
  misc_feature: MA Experiment 20000182 PARAMETER Experiment Name: At_2mM_SA_P Parameter: Age (day) Value: 14
  misc_feature: MA Experiment 20000182 PARAMETER Experiment Name: At_2mM_SA_P Parameter: Organism Value: A. thaliana
  misc_feature: MA Experiment 20000182 PARAMETER Experiment Name: At_2mM_SA_P Parameter: Plant Line Value: WS
  misc_feature: MA Experiment 20000182 PARAMETER Experiment Name: At_2mM_SA_P Parameter: Timepoint (hr) Value: 6
  misc_feature: MA Experiment 20000182 PARAMETER Experiment Name: At_2mM_SA_P Parameter: Tissue Value: Aerial
  misc_feature: MA Experiment 20000182 PARAMETER Experiment Name: At_2mM_SA_P Parameter: Treatment Value: 2mM SA vs. No Treatment
  misc_feature: MA Experiment ID: 20000184 Result: Down-regulated in Transcription
  misc_feature: MA Experiment 20000184 PARAMETER Experiment Name: At_Shoots__P Parameter: Age (day) Value: 7
  misc_feature: MA Experiment 20000184 PARAMETER Experiment Name: At_Shoots__P Parameter: Tissue Value: Shoots vs. Whole Plant
  misc_feature: MA Experiment ID: 20000224 Result: Up-regulated in Transcription
  misc_feature: MA Experiment ID: 20000234 Result: Up-regulated in Transcription
  misc_feature: MA Experiment 20000234 PARAMETER Experiment Name: At_Siliques_P Parameter: Age (day) Value: 21
  misc_feature: MA Experiment 20000234 PARAMETER Experiment Name: At_Siliques_P Parameter: Organism Value: A. thaliana
  misc_feature: MA Experiment 20000234 PARAMETER Experiment Name: At_Siliques_P Parameter: Plant Line Value: WS
  misc_feature: MA Experiment 20000234 PARAMETER Experiment Name: At_Siliques_P Parameter: Tissue Value: Less Than 5mm Siliques vs. Whole Plant
  misc_feature: MA Experiment ID: 20000235 Result: Up-regulated in Transcription
  misc_feature: MA Experiment 20000235 PARAMETER Experiment Name: At_Siliques_P Parameter: Age (day) Value: 21
  misc_feature: MA Experiment 20000235 PARAMETER Experiment Name: At_Siliques_P Parameter: Organism Value: A. thaliana
  misc_feature: MA Experiment 20000235 PARAMETER Experiment Name: At_Siliques_P Parameter: Plant Line Value: WS
  misc_feature: MA Experiment 20000235 PARAMETER Experiment Name: At_Siliques_P Parameter: Tissue Value: 5-10mm Siliques vs. Whole Plant
  misc_feature: MA Experiment ID: 20000264 Result: Up-regulated in Transcription
  misc_feature: MA Experiment 20000264 PARAMETER Experiment Name: At_Open_Flower_P Parameter: Age (day) Value: 21
  misc_feature: MA Experiment 20000264 PARAMETER Experiment Name: At_Open_Flower_P Parameter: Plant Line Value: WS
  misc_feature: MA Experiment 20000264 PARAMETER Experiment Name: At_Open_Flower_P Parameter: Tissue Value: Open Flower vs. Whole Plant
  misc_feature: MA Experiment ID: 20000267 Result: Up-regulated in Transcription
  misc_feature: MA Experiment 20000267 PARAMETER Experiment Name: At_Drought_P Parameter: Age (day) Value: 7
  misc_feature: MA Experiment 20000267 PARAMETER Experiment Name: At_Drought_P Parameter: Organism Value: A. thaliana
  misc_feature: MA Experiment 20000267 PARAMETER Experiment Name: At_Drought_P Parameter: Plant Line Value: WS
  misc_feature: MA Experiment 20000267 PARAMETER Experiment Name: At_Drought_P Parameter: Timepoint (hr) Value: 6
  misc_feature: MA Experiment 20000267 PARAMETER Experiment Name: At_Drought_P Parameter: Tissue Value: Whole Plant
  misc_feature: MA Experiment 20000267 PARAMETER Experiment Name: At_Drought_P Parameter: Treatment Value: Drought vs. No Drought
  misc_feature: MA Experiment ID: 20000268 Result: Up-regulated in Transcription
  misc_feature: MA Experiment 20000268 PARAMETER Experiment Name: At_100mM_NaCl__P Parameter: Age (day) Value: 14
  misc_feature: MA Experiment 20000268 PARAMETER Experiment Name: At_100mM_NaCl__P Parameter: Organism Value: A. thaliana
  misc_feature: MA Experiment 20000268 PARAMETER Experiment Name: At_100mM_NaCl__P Parameter: Plant Line Value: WS
  misc_feature: MA Experiment 20000268 PARAMETER Experiment Name: At_100mM_NaCl__P Parameter: Timepoint (hr) Value: 6
  misc_feature: MA Experiment 20000268 PARAMETER Experiment Name: At_100mM_NaCl__P Parameter: Tissue Value: Whole Plant
  misc_feature: MA Experiment 20000268 PARAMETER Experiment Name: At_100mM_NaCl__P Parameter: Treatment Value: 100mM NaCl vs. No Treatment
  misc_feature: MA Experiment ID: 20000308 Result: Up-regulated in Transcription
  misc_feature: MA Experiment 20000308 PARAMETER Experiment Name: At_100mM_NaCl__P Parameter: Age (day) Value: 17
  misc_feature: MA Experiment 20000308 PARAMETER Experiment Name: At_100mM_NaCl__P Parameter: Organism Value: A. thaliana
  misc_feature: MA Experiment 20000308 PARAMETER Experiment Name: At_100mM_NaCl__P Parameter: Plant Line Value: WS
  misc_feature: MA Experiment 20000308 PARAMETER Experiment Name: At_100mM_NaCl__P Parameter: Timepoint (hr) Value: 72
  misc_feature: MA Experiment 20000308 PARAMETER Experiment Name: At_100mM_NaCl__P Parameter: Tissue Value: Whole Plant
  misc_feature: MA Experiment 20000308 PARAMETER Experiment Name: At_100mM_NaCl__P Parameter: Treatment Value: 100mM NaCl vs. No Treatment
  misc_feature: MA Experiment ID: 20000436 Result: Up-regulated in Transcription
  misc_feature: MA Experiment 20000436 PARAMETER Experiment Name: At_Drought_P Parameter: Age (day) Value: 7
  misc_feature: MA Experiment 20000436 PARAMETER Experiment Name: At_Drought_P Parameter: Organism Value: A. thaliana
  misc_feature: MA Experiment 20000436 PARAMETER Experiment Name: At_Drought_P Parameter: Plant Line Value: WS
  misc_feature: MA Experiment 20000436 PARAMETER Experiment Name: At_Drought_P Parameter: Timepoint (hr) Value: 12
  misc_feature: MA Experiment 20000436 PARAMETER Experiment Name: At_Drought_P Parameter: Tissue Value: Whole Plant
  misc_feature: MA Experiment 20000436 PARAMETER Experiment Name: At_Drought_P Parameter: Treatment Value: Drought vs. No Drought
  misc_feature: MA Experiment ID: 20000437 Result: Up-regulated in Transcription
  misc_feature: MA Experiment 20000437 PARAMETER Experiment Name: At_Drought_P Parameter: Age (day) Value: 8
  misc_feature: MA Experiment 20000437 PARAMETER Experiment Name: At_Drought_P Parameter: Organism Value: A. thaliana
  misc_feature: MA Experiment 20000437 PARAMETER Experiment Name: At_Drought_P Parameter: Plant Line Value: WS
  misc_feature: MA Experiment 20000437 PARAMETER Experiment Name: At_Drought_P Parameter: Timepoint (hr) Value: 24
  misc_feature: MA Experiment 20000437 PARAMETER Experiment Name: At_Drought_P Parameter: Tissue Value: Whole Plant
  misc_feature: MA Experiment 20000437 PARAMETER Experiment Name: At_Drought_P Parameter: Treatment Value: Drought vs. No Drought
  misc_feature: MA Experiment ID: 20000438 Result: Down-regulated in Transcription
  misc_feature: MA Experiment 20000438 PARAMETER Experiment Name: At_Shoots__P Parameter: Age (day) Value: 14
  misc_feature: MA Experiment 20000438 PARAMETER Experiment Name: At_Shoots__P Parameter: Tissue Value: Shoots vs. Whole Plant
  misc_feature: MA Experiment ID: 20000441 Result: Up-regulated in Transcription
  misc_feature: MA Experiment 20000441 PARAMETER Experiment Name: At_1uM_BR-BRZ__P Parameter: Tissue Value: Shoot Apices
  misc_feature: MA Experiment 20000441 PARAMETER Experiment Name: At_1uM_BR-BRZ__P Parameter: Treatment Value: 1uM BR vs. No Treatment
  misc_feature: MA Experiment ID: 20000443 Result: Up-regulated in Transcription
  misc_feature: MA Experiment 20000443 PARAMETER Experiment Name: At_1uM_BR-BRZ__P Parameter: Tissue Value: Shoot Apices
  misc_feature: MA Experiment 20000443 PARAMETER Experiment Name: At_1uM_BR-BRZ__P Parameter: Treatment Value: 1uM BRZ vs. No Treatment
  misc_feature: MA Experiment ID: 20000453 Result: Up-regulated in Transcription
  misc_feature: MA Experiment 20000453 PARAMETER Experiment Name: At_100uM_ABA_P Parameter: Age (day) Value: 15
  misc_feature: MA Experiment 20000453 PARAMETER Experiment Name: At_100uM_ABA_P Parameter: Organism Value: A. thaliana
  misc_feature: MA Experiment 20000453 PARAMETER Experiment Name: At_100uM_ABA_P Parameter: Plant Line Value: WS
  misc_feature: MA Experiment 20000453 PARAMETER Experiment Name: At_100uM_ABA_P Parameter: Timepoint (hr) Value: 24
  misc_feature: MA Experiment 20000453 PARAMETER Experiment Name: At_100uM_ABA_P Parameter: Tissue Value: Aerial
  misc_feature: MA Experiment 20000453 PARAMETER Experiment Name: At_100uM_ABA_P Parameter: Treatment Value: 100uM ABA vs. No Treatment
  misc_feature: MA Experiment ID: 20000495 Result: Up-regulated in Transcription
  misc_feature: MA Experiment 20000495 PARAMETER Experiment Name: At_Guard_Cells_P Parameter: Harvest Date Value: 8/2/2002
  misc_feature: MA Experiment 20000495 PARAMETER Experiment Name: At_Guard_Cells_P Parameter: Organism Value: A. thaliana
  misc_feature: MA Experiment 20000495 PARAMETER Experiment Name: At_Guard_Cells_P Parameter: Tissue Value: Guard Cells vs. Leaves
  misc_feature: MA Experiment ID: 20000794 Result: Up-regulated in Transcription
  misc_feature: MA Experiment 20000794 PARAMETER Experiment Name: At_Petals_P Parameter: Age (day) Value: 23-25 days
  misc_feature: MA Experiment 20000794 PARAMETER Experiment Name: At_Petals_P Parameter: Plant Line Value: WS
  misc_feature: MA Experiment 20000794 PARAMETER Experiment Name: At_Petals_P Parameter: Tissue Value: Petals vs. Whole plant
  misc_feature: MA Experiment ID: 20001504 Result: Up-regulated in Transcription
  misc_feature: MA Experiment 20001504 PARAMETER Experiment Name: At_Far-red-enriched_P Parameter: Age (day) Value: 10
  misc_feature: MA Experiment 20001504 PARAMETER Experiment Name: At_Far-red-enriched_P Parameter: Light Value: Far-red enriched vs. White
  misc_feature: MA Experiment 20001504 PARAMETER Experiment Name: At_Far-red-enriched_P Parameter: Organism Value: A. thaliana
  misc_feature: MA Experiment 20001504 PARAMETER Experiment Name: At_Far-red-enriched_P Parameter: Plant Line Value: Columbia
  misc_feature: MA Experiment 20001504 PARAMETER Experiment Name: At_Far-red-enriched_P Parameter: Timepoint (day) Value: 6
  misc_feature: MA Experiment 20001504 PARAMETER Experiment Name: At_Far-red-enriched_P Parameter: Tissue Value: Whole Plant
  misc_feature: MA Experiment ID: 20001554 Result: Up-regulated in Transcription
  misc_feature: MA Experiment 20001554 PARAMETER Experiment Name: At_Drought_Soil_Dry_P Parameter: Age (day) Value: 21
  misc_feature: MA Experiment 20001554 PARAMETER Experiment Name: At_Drought_Soil_Dry_P Parameter: Organism Value: A. thaliana
  misc_feature: MA Experiment 20001554 PARAMETER Experiment Name: At_Drought_Soil_Dry_P Parameter: Plant Line Value: WS
  misc_feature: MA Experiment 20001554 PARAMETER Experiment Name: At_Drought_Soil_Dry_P Parameter: Post Timepoint (hr) Value: None
  misc_feature: MA Experiment 20001554 PARAMETER Experiment Name: At_Drought_Soil_Dry_P Parameter: Post-Treatment Value: None
  misc_feature: MA Experiment 20001554 PARAMETER Experiment Name: At_Drought_Soil_Dry_P Parameter: Timepoint (day) Value: 7
  misc_feature: MA Experiment 20001554 PARAMETER Experiment Name: At_Drought_Soil_Dry_P Parameter: Treatment Value: Drought vs. No Drought
  misc_feature: MA Experiment ID: 20001555 Result: Up-regulated in Transcription
  misc_feature: MA Experiment 20001555 PARAMETER Experiment Name: At_Drought_Soil_Dry_P Parameter: Age (day) Value: 24
  misc_feature: MA Experiment 20001555 PARAMETER Experiment Name: At_Drought_Soil_Dry_P Parameter: Organism Value: A. thaliana
  misc_feature: MA Experiment 20001555 PARAMETER Experiment Name: At_Drought_Soil_Dry_P Parameter: Plant Line Value: WS
  misc_feature: MA Experiment 20001555 PARAMETER Experiment Name: At_Drought_Soil_Dry_P Parameter: Post Timepoint (hr) Value: None
  misc_feature: MA Experiment 20001555 PARAMETER Experiment Name: At_Drought_Soil_Dry_P Parameter: Post-Treatment Value: None
  misc_feature: MA Experiment 20001555 PARAMETER Experiment Name: At_Drought_Soil_Dry_P Parameter: Timepoint (day) Value: 10
  misc_feature: MA Experiment 20001555 PARAMETER Experiment Name: At_Drought_Soil_Dry_P Parameter: Treatment Value: Drought vs. No Drought
  misc_feature: MA Experiment ID: 20001556 Result: Up-regulated in Transcription
  misc_feature: MA Experiment 20001556 PARAMETER Experiment Name: At_Drought_Soil_Dry_P Parameter: Age (day) Value: 26
  misc_feature: MA Experiment 20001556 PARAMETER Experiment Name: At_Drought_Soil_Dry_P Parameter: Organism Value: A. thaliana
  misc_feature: MA Experiment 20001556 PARAMETER Experiment Name: At_Drought_Soil_Dry_P Parameter: Plant Line Value: WS
  misc_feature: MA Experiment 20001556 PARAMETER Experiment Name: At_Drought_Soil_Dry_P Parameter: Post Timepoint (hr) Value: None
  misc_feature: MA Experiment 20001556 PARAMETER Experiment Name: At_Drought_Soil_Dry_P Parameter: Post-Treatment Value: None
  misc_feature: MA Experiment 20001556 PARAMETER Experiment Name: At_Drought_Soil_Dry_P Parameter: Timepoint (day) Value: 12
  misc_feature: MA Experiment 20001556 PARAMETER Experiment Name: At_Drought_Soil_Dry_P Parameter: Treatment Value: Drought vs. No Drought
  misc_feature: MA Experiment ID: 20001560 Result: Up-regulated in Transcription
  misc_feature: MA Experiment 20001560 PARAMETER Experiment Name: At_Drought_Soil_Dry_P Parameter: Age (day) Value: 28
  misc_feature: MA Experiment 20001560 PARAMETER Experiment Name: At_Drought_Soil_Dry_P Parameter: Organism Value: A. thaliana
  misc_feature: MA Experiment 20001560 PARAMETER Experiment Name: At_Drought_Soil_Dry_P Parameter: Plant Line Value: WS
  misc_feature: MA Experiment 20001560 PARAMETER Experiment Name: At_Drought_Soil_Dry_P Parameter: Post Timepoint (hr) Value: None
  misc_feature: MA Experiment 20001560 PARAMETER Experiment Name: At_Drought_Soil_Dry_P Parameter: Post-Treatment Value: None
  misc_feature: MA Experiment 20001560 PARAMETER Experiment Name: At_Drought_Soil_Dry_P Parameter: Timepoint (day) Value: 14
  misc_feature: MA Experiment 20001560 PARAMETER Experiment Name: At_Drought_Soil_Dry_P Parameter: Treatment Value: Drought vs. No Drought
  misc_feature: MA Experiment ID: 20001757 Result: Down-regulated in Transcription
  misc_feature: MA Experiment 20001757 PARAMETER Experiment Name: At_50mM_NH4NO3_L-to-H_P Parameter: Timepoint (hr) Value: 6
  misc_feature: MA Experiment 20001757 PARAMETER Experiment Name: At_50mM_NH4NO3_L-to-H_P Parameter: Tissue Value: Leaf
  misc_feature: MA Experiment 20001757 PARAMETER Experiment Name: At_50mM_NH4NO3_L-to-H_P Parameter: Treatment Value: 50mM NH4NO3 vs 100mM Mannitol
  misc_feature: MA Experiment ID: 20001770 Result: Up-regulated in Transcription
  misc_feature: MA Experiment 20001770 PARAMETER Experiment Name: At_Far-red-enriched-adult_P Parameter: Age (day) Value: 28
  misc_feature: MA Experiment 20001770 PARAMETER Experiment Name: At_Far-red-enriched-adult_P Parameter: Light Value: Far-red enriched vs. White
  misc_feature: MA Experiment 20001770 PARAMETER Experiment Name: At_Far-red-enriched-adult_P Parameter: Organism Value: A. thaliana
  misc_feature: MA Experiment 20001770 PARAMETER Experiment Name: At_Far-red-enriched-adult_P Parameter: Plant Line Value: Columbia
  misc_feature: MA Experiment 20001770 PARAMETER Experiment Name: At_Far-red-enriched-adult_P Parameter: Timepoint (hr) Value: 8
  misc_feature: MA Experiment 20001770 PARAMETER Experiment Name: At_Far-red-enriched-adult_P Parameter: Tissue Value: Aerial
  misc_feature: MA Experiment ID: 20001904 Result: Up-regulated in Transcription
  misc_feature: MA Experiment 20001904 PARAMETER Experiment Name: At_Drought_Reproduction_P Parameter: Age (day) Value: 37
  misc_feature: MA Experiment 20001904 PARAMETER Experiment Name: At_Drought_Reproduction_P Parameter: Organism Value: A. thaliana
  misc_feature: MA Experiment 20001904 PARAMETER Experiment Name: At_Drought_Reproduction_P Parameter: Plant Line Value: WS
  misc_feature: MA Experiment 20001904 PARAMETER Experiment Name: At_Drought_Reproduction_P Parameter: Timepoint (day) Value: 7
  misc_feature: MA Experiment 20001904 PARAMETER Experiment Name: At_Drought_Reproduction_P Parameter: Tissue Value: Rosettes
  misc_feature: MA Experiment 20001904 PARAMETER Experiment Name: At_Drought_Reproduction_P Parameter: Treatment Value: Drought vs. No Drought
  misc_feature: MA Experiment ID: 20001906 Result: Up-regulated in Transcription
  misc_feature: MA Experiment 20001906 PARAMETER Experiment Name: At_Drought_Reproduction_P Parameter: Age (day) Value: 35
  misc_feature: MA Experiment 20001906 PARAMETER Experiment Name: At_Drought_Reproduction_P Parameter: Organism Value: A. thaliana
  misc_feature: MA Experiment 20001906 PARAMETER Experiment Name: At_Drought_Reproduction_P Parameter: Plant Line Value: WS
  misc_feature: MA Experiment 20001906 PARAMETER Experiment Name: At_Drought_Reproduction_P Parameter: Timepoint (day) Value: 5
  misc_feature: MA Experiment 20001906 PARAMETER Experiment Name: At_Drought_Reproduction_P Parameter: Tissue Value: Siliques
  misc_feature: MA Experiment 20001906 PARAMETER Experiment Name: At_Drought_Reproduction_P Parameter: Treatment Value: Drought vs. No Drought
  misc_feature: MA Experiment ID: 20001908 Result: Up-regulated in Transcription
  misc_feature: MA Experiment 20001908 PARAMETER Experiment Name: At_Drought_Reproduction_P Parameter: Age (day) Value: 40
  misc_feature: MA Experiment 20001908 PARAMETER Experiment Name: At_Drought_Reproduction_P Parameter: Organism Value: A. thaliana
  misc_feature: MA Experiment 20001908 PARAMETER Experiment Name: At_Drought_Reproduction_P Parameter: Plant Line Value: WS
  misc_feature: MA Experiment 20001908 PARAMETER Experiment Name: At_Drought_Reproduction_P Parameter: Timepoint (day) Value: 10
  misc_feature: MA Experiment 20001908 PARAMETER Experiment Name: At_Drought_Reproduction_P Parameter: Tissue Value: Siliques
  misc_feature: MA Experiment 20001908 PARAMETER Experiment Name: At_Drought_Reproduction_P Parameter: Treatment Value: Drought vs. No Drought
  misc_feature: MA Experiment ID: 20001910 Result: Up-regulated in Transcription
  misc_feature: MA Experiment 20001910 PARAMETER Experiment Name: At_Drought_Reproduction_P Parameter: Age (day) Value: 37
  misc_feature: MA Experiment 20001910 PARAMETER Experiment Name: At_Drought_Reproduction_P Parameter: Organism Value: A. thaliana
  misc_feature: MA Experiment 20001910 PARAMETER Experiment Name: At_Drought_Reproduction_P Parameter: Plant Line Value: WS
  misc_feature: MA Experiment 20001910 PARAMETER Experiment Name: At_Drought_Reproduction_P Parameter: Timepoint (day) Value: 7
  misc_feature: MA Experiment 20001910 PARAMETER Experiment Name: At_Drought_Reproduction_P Parameter: Tissue Value: Flowers
  misc_feature: MA Experiment 20001910 PARAMETER Experiment Name: At_Drought_Reproduction_P Parameter: Treatment Value: Drought vs. No Drought
  misc_feature: MA Experiment ID: 20001911 Result: Up-regulated in Transcription
  misc_feature: MA Experiment 20001911 PARAMETER Experiment Name: At_Drought_Reproduction_P Parameter: Age (day) Value: 40
  misc_feature: MA Experiment 20001911 PARAMETER Experiment Name: At_Drought_Reproduction_P Parameter: Organism Value: A. thaliana
  misc_feature: MA Experiment 20001911 PARAMETER Experiment Name: At_Drought_Reproduction_P Parameter: Plant Line Value: WS
  misc_feature: MA Experiment 20001911 PARAMETER Experiment Name: At_Drought_Reproduction_P Parameter: Timepoint (day) Value: 10
  misc_feature: MA Experiment 20001911 PARAMETER Experiment Name: At_Drought_Reproduction_P Parameter: Tissue Value: Flowers
  misc_feature: MA Experiment 20001911 PARAMETER Experiment Name: At_Drought_Reproduction_P Parameter: Treatment Value: Drought vs. No Drought
aagcatctctccctcatattcacctaaaaatcaggttaataaaaaagaataatgatgttttcggtgacggttgcgatccttgtttgtcttattggctacatttaccgatcatttaagcctccaccaccgcgaatctgcggccatcctaacggtcctccggttacttctccgagaatcaagctcagtgatggaagatatcttgcttatagagaatctggggttgatagagacaatgctaactacaagatcattgtcgttcatggcttcaacagctccaaagacactgaattttccatccctaaggatgtaattgaggagcttgggatatactttgtgttctacgatagagcaggatatggagaaagtgatccacacccatcacgcactgttaagagtgaagcacacgacattcaagaactcgccgataaactcaagatcggaccaaagttctacgttcttggtatatcactcggtgcttactcggtttatagttgcctcaaatacattccccacagactagctggagcagtcttaatggttccatttgtgaactattggtggactaaagtgcctcaagaaaaattgagtaaagcgttggagctaatgccaaagaaagaccaatggacgtttaaagtggctcattatgttccgtggttgttatattggtggttgacccaaaaactatttccgtcttcgagtatgatcacggggaacaatgcgttatgcagcgacaaagatttggtcgtcataaagaagaaaatggagaatccacgccctggcttggaaaaagttagacaacaaggtgaccatgaatgtcttcaccgggacatgatagccggattcgcgacatgggaattcgacccgactgaattagaaaatccgtttgcggaaggcgaaggatcggtccacgtttggcaagggatggaagacagaatcattccatacgaaattaatcgatatatatcagagaagcttccatggattaagtaccatgaggtcttaggttatggacatcttctaaacgccgaggaggagaaatgcaaagacattatcaaggcacttcttgtcaactgatgatcatctctacacaagatgccacaaaaaatatagcatatttaatagattttattttttatttatggattataatattatagcatattataagtttgtaagtaagatgaaaaccacttgaaagtcattaatttact

SEQ ID NO: 43715 - protein, 340 aa, Arabidopsis thaliana
  peptide (1)..(340): Ceres Seq. ID no. 12336315
  misc_feature (92)..(335): Pfam Name: alpha/beta hydrolase fold Pfam Description: alpha/beta hydrolase fold
  misc_feature (9)..(339): Homolog of NCBI NO: 15228377 NR Description: putative protein
  misc_feature (1)..(338): Homolog of NCBI NO: 15221193 NR Description: unknown protein; protein id: At1g74290.1
  misc_feature (1)..(336): Homolog of NCBI NO: 30678800 NR Description: esterase/lipase/thioesterase family [Arabidopsis
  misc_feature (11)..(340): Homolog of NCBI NO: 28416665 NR Description: At2g36290 [Arabidopsis thaliana]
  misc_feature (11)..(340): Homolog of NCBI NO: 18404095 NR Description: expressed protein
  misc_feature (4)..(338): Homolog of NCBI NO: 18410582 NR Description: expressed protein
  misc_feature (4)..(338): Homolog of NCBI NO: 21592662 NR Description: unknown [Arabidopsis thaliana]
  misc_feature (1)..(340): Homolog of NCBI NO: 18410575 NR Description: expressed protein
  misc_feature (1)..(340): Homolog of NCBI NO: 21537089 NR Description: unknown [Arabidopsis thaliana]
  misc_feature (1)..(340): Homolog of NCBI NO: 15242253 NR Description: putative protein
MMFSVTVAILVCLIGYIYRSFKPPPPRICGHPNGPPVTSPRIKLSDGRYLAYRESGVDRDNANYKIIVVHGFNSSKDTEFSIPKDVIEELGIYFVFYDRAGYGESDPHPSRTVKSEAHDIQELADKLKIGPKFYVLGISLGAYSVYSCLKYIPHRLAGAVLMVPFVNYWWTKVPQEKLSKALELMPKKDQWTFKVAHYVPWLLYWWLTQKLFPSSSMITGNNALCSDKDLVVIKKKMENPRPGLEKVRQQGDHECLHRDMIAGFATWEFDPTELENPFAEGEGSVHVWQGMEDRIIPYEINRYISEKLPWIKYHEVLGYGHLLNAEEEKCKDIIKALLVN

SEQ ID NO: 43716 - protein, 339 aa, Arabidopsis thaliana
  peptide (1)..(339): Ceres Seq. ID no. 12336316
  misc_feature (91)..(334): Pfam Name: alpha/beta hydrolase fold Pfam Description: alpha/beta hydrolase fold
  misc_feature (8)..(338): Homolog of NCBI NO: 15228377 NR Description: putative protein
  misc_feature (1)..(337): Homolog of NCBI NO: 15221193 NR Description: unknown protein; protein id: At1g74290.1
  misc_feature (1)..(335): Homolog of NCBI NO: 30678800 NR Description: esterase/lipase/thioesterase family [Arabidopsis
  misc_feature (10)..(339): Homolog of NCBI NO: 28416665 NR Description: At2g36290 [Arabidopsis thaliana]
  misc_feature (10)..(339): Homolog of NCBI NO: 18404095 NR Description: expressed protein
  misc_feature (3)..(337): Homolog of NCBI NO: 18410582 NR Description: expressed protein
  misc_feature (3)..(337): Homolog of NCBI NO: 21592662 NR Description: unknown [Arabidopsis thaliana]
  misc_feature (1)..(339): Homolog of NCBI NO: 18410575 NR Description: expressed protein
  misc_feature (1)..(339): Homolog of NCBI NO: 21537089 NR Description: unknown [Arabidopsis thaliana]
  misc_feature (1)..(339): Homolog of NCBI NO: 15242253 NR Description: putative protein
MFSVTVAILVCLIGYIYRSFKPPPPRICGHPNGPPVTSPRIKLSDGRYLAYRESGVDRDNANYKIIVVHGFNSSKDTEFSIPKDVIEELGIYFVFYDRAGYGESDPHPSRTVKSEAHDIQELADKLKIGPKFYVLGISLGAYSVYSCLKYIPHRLAGAVLMVPFVNYWWTKVPQEKLSKALELMPKKDQWTFKVAHYVPWLLYWWLTQKLFPSSSMITGNNALCSDKDLVVIKKKMENPRPGLEKVRQQGDHECLHRDMIAGFATWEFDPTELENPFAEGEGSVHVWQGMEDRIIPYEINRYISEKLPWIKYHEVLGYGHLLNAEEEKCKDIIKALLVN

SEQ ID NO: 43717 - protein, 179 aa, Arabidopsis thaliana
  peptide (1)..(179): Ceres Seq. ID no. 12336317
  misc_feature (1)..(174): Pfam Name: alpha/beta hydrolase fold Pfam Description: alpha/beta hydrolase fold
  misc_feature (1)..(178): Homolog of NCBI NO: 15228377 NR Description: putative protein
  misc_feature (1)..(177): Homolog of NCBI NO: 15221193 NR Description: unknown protein; protein id: At1g74290.1
  misc_feature (1)..(175): Homolog of NCBI NO: 30678800 NR Description: esterase/lipase/thioesterase family [Arabidopsis
  misc_feature (1)..(179): Homolog of NCBI NO: 28416665 NR Description: At2g36290 [Arabidopsis thaliana]
  misc_feature (1)..(179): Homolog of NCBI NO: 18404095 NR Description: expressed protein
  misc_feature (1)..(177): Homolog of NCBI NO: 18410582 NR Description: expressed protein
  misc_feature (1)..(177): Homolog of NCBI NO: 21592662 NR Description: unknown [Arabidopsis thaliana]
  misc_feature (1)..(179): Homolog of NCBI NO: 18410575 NR Description: expressed protein
  misc_feature (1)..(179): Homolog of NCBI NO: 21537089 NR Description: unknown [Arabidopsis thaliana]
  misc_feature (1)..(179): Homolog of NCBI NO: 15242253 NR Description: putative protein
MVPFVNYWWTKVPQEKLSKALELMPKKDQWTFKVAHYVPWLLYWWLTQKLFPSSSMITGNNALCSDKDLVVIKKKMENPRPGLEKVRQQGDHECLHRDMIAGFATWEFDPTELENPFAEGEGSVHVWQGMEDRIIPYEINRYISEKLPWIKYHEVLGYGHLLNAEEEKCKDIIKALLVN

SEQ ID NO: 43718 - DNA, 1333 bp, Arabidopsis thaliana
  misc_feature (1)..(1333): Ceres Seq. ID no. 12336318
  misc_feature: MA Experiment ID: 20000234 Result: Down-regulated in Transcription
  misc_feature: MA Experiment 20000234 PARAMETER Experiment Name: At_Siliques_P Parameter: Age (day) Value: 21
  misc_feature: MA Experiment 20000234 PARAMETER Experiment Name: At_Siliques_P Parameter: Organism Value: A. thaliana
  misc_feature: MA Experiment 20000234 PARAMETER Experiment Name: At_Siliques_P Parameter: Plant Line Value: WS
  misc_feature: MA Experiment 20000234 PARAMETER Experiment Name: At_Siliques_P Parameter: Tissue Value: Less Than 5mm Siliques vs. Whole Plant
atctacgcatgaaaatatgattctgtcttttttttgtttgtctatctttcaatactttaaaaagtgtatttctagaggcgatttgtcatttcccgaataggaatttgagtaaaaaaaacactctgttttttatttccactaatatcaaatcggcgaatatagttcccaccattcttatctccttgtcgtcactcggaattttttaaataataggatcgctttaataatataatctctataatttatagttccttttccaatattggcgtctccgttgaagctttccacaaatctcaaatttgtttggagactctcaaatgtatccttctctcgacgatgatttcgtctctgatttgttttgcttcgatcaaagcaatggagcagaacttgatgattacacacagtttggtgtaaatttgcagactgatcaagaggatacctttccagattttgtgtcatatggtgtgaatttgcagcaggagccagatgaagtctttagtattggagcttctcaattggatttgtcctcgtataatggagttttgtcgctagagccagaacaggtggggcaacaagattgtgaagttgtgcaggaagaagaagtagagatcaattctggttcatctggtggagctgttaaggaagaacaggaacatttagatgacgattgctccagaaagcgggcaaggactggatcgtgtagcagaggaggaggaactaaagcgtgtcgtgaaaggttgaggagggagaagctaaatgagaggtttatggatttgagctcggttttggagcctgggaggactcctaagactgataaaccggctatactcgatgatgcaatccgtatattgaatcaacttagagatgaagctcttaagcttgaagaaactaaccagaagcttttagaggagatcaagagtctcaaggcggagaagaacgagctgagggaggaaaagctggtgttgaaggcggataaagagaagacagaacaacagttaaagtctatgacggctccatcttcagggttcatacctcatattccagctgcatttaaccacaacaaaatggctgtttatccaagttacggttacatgccaatgtggcattatatgcctcaatccgttcgtgacacatctcgtgatcaagaactcaggcctcctgctgcttaaactctcaattgtttttttttggtacccatagggaactcatagagatttctgaatcacttggtttaggattcttccgtttggcaagtgtaaaagctttactcttgatcttgggttgtatttttcttataaaataaatataactccagaaacttgtgattcttctc

SEQ ID NO: 43719 - protein, 283 aa, Arabidopsis thaliana; identical to SEQ ID NO: 25496
  peptide (1)..(283): Ceres Seq. ID no. 12336319
  misc_feature (131)..(182): Pfam Name: Helix-loop-helix DNA-binding domain Pfam Description: Helix-loop-helix DNA-binding domain
  misc_feature (135)..(266): Homolog of NCBI NO: 15230975 NR Description: bHLH protein
  misc_feature (114)..(268): Homolog of NCBI NO: 38636768 NR Description: helix-loop-helix-like protein
  misc_feature (114)..(268): Homolog of NCBI NO: 29367409 NR Description: helix-loop-helix-like protein
  misc_feature (93)..(283): Homolog of NCBI NO: 21592325 NR Description: bHLH transcription factor, putative [Arabidopsis
  misc_feature (93)..(283): Homolog of NCBI NO: 15239706 NR Description: bHLH protein
  misc_feature (114)..(283): Homolog of NCBI NO: 15223710 NR Description: bHLH protein
  misc_feature (61)..(283): Homolog of NCBI NO: 22331274 NR Description: bHLH protein
  misc_feature (61)..(283): Homolog of NCBI NO: 20127030 NR Description: putative bHLH transcription factor [Arabidopsis
  misc_feature (12)..(283): Homolog of NCBI NO: 30682847 NR Description: bHLH protein [Arabidopsis thaliana]
  misc_feature (1)..(283): Homolog of NCBI NO: 18414212 NR Description: bHLH protein

SEQ ID NO: 43720 - DNA, 973 bp, Arabidopsis thaliana
  misc_feature (1)..(973): Ceres Seq. ID no. 12560047
  misc_feature: MA Experiment ID: 20000182 Result: Down-regulated in Transcription
  misc_feature: MA Experiment 20000182 PARAMETER Experiment Name: At_2mM_SA_P Parameter: Age (day) Value: 14
  misc_feature: MA Experiment 20000182 PARAMETER Experiment Name: At_2mM_SA_P Parameter: Organism Value: A. thaliana
  misc_feature: MA Experiment 20000182 PARAMETER Experiment Name: At_2mM_SA_P Parameter: Plant Line Value: WS
  misc_feature: MA Experiment 20000182 PARAMETER Experiment Name: At_2mM_SA_P Parameter: Timepoint (hr) Value: 6
  misc_feature: MA Experiment 20000182 PARAMETER Experiment Name: At_2mM_SA_P Parameter: Tissue Value: Aerial
  misc_feature: MA Experiment 20000182 PARAMETER Experiment Name: At_2mM_SA_P Parameter: Treatment Value: 2mM SA vs. No Treatment
  misc_feature: MA Experiment ID: 20000185 Result: Down-regulated in Transcription
  misc_feature: MA Experiment 20000185 PARAMETER Experiment Name: At_Roots__P Parameter: Age (day) Value: 7 vs. 21
  misc_feature: MA Experiment 20000185 PARAMETER Experiment Name: At_Roots__P Parameter: Organism Value: A. thaliana
  misc_feature: MA Experiment 20000185 PARAMETER Experiment Name: At_Roots__P Parameter: Tissue Value: Roots vs. Whole Plant
  misc_feature: MA Experiment ID: 20000265 Result: Down-regulated in Transcription
  misc_feature: MA Experiment 20000265 PARAMETER Experiment Name: At_Open_Flower_P Parameter: Age (day) Value: 21
  misc_feature: MA Experiment 20000265 PARAMETER Experiment Name: At_Open_Flower_P Parameter: Plant Line Value: WS
  misc_feature: MA Experiment 20000265 PARAMETER Experiment Name: At_Open_Flower_P Parameter: Tissue Value: Closed Flower vs. Whole Plant
  misc_feature: MA Experiment ID: 20000268 Result: Down-regulated in Transcription
  misc_feature: MA Experiment 20000268 PARAMETER Experiment Name: At_100mM_NaCl__P Parameter: Age (day) Value: 14
  misc_feature: MA Experiment 20000268 PARAMETER Experiment Name: At_100mM_NaCl__P Parameter: Organism Value: A. thaliana
  misc_feature: MA Experiment 20000268 PARAMETER Experiment Name: At_100mM_NaCl__P Parameter: Plant Line Value: WS
  misc_feature: MA Experiment 20000268 PARAMETER Experiment Name: At_100mM_NaCl__P Parameter: Timepoint (hr) Value: 6
  misc_feature: MA Experiment 20000268 PARAMETER Experiment Name: At_100mM_NaCl__P Parameter: Tissue Value: Whole Plant
  misc_feature: MA Experiment 20000268 PARAMETER Experiment Name: At_100mM_NaCl__P Parameter: Treatment Value: 100mM NaCl vs. No Treatment
  misc_feature: MA Experiment ID: 20000288 Result: Down-regulated in Transcription
  misc_feature: MA Experiment 20000288 PARAMETER Experiment Name: At_Drought_P Parameter: Age (day) Value: 7
  misc_feature: MA Experiment 20000288 PARAMETER Experiment Name: At_Drought_P Parameter: Organism Value: A. thaliana
  misc_feature: MA Experiment 20000288 PARAMETER Experiment Name: At_Drought_P Parameter: Plant Line Value: WS
  misc_feature: MA Experiment 20000288 PARAMETER Experiment Name: At_Drought_P Parameter: Timepoint (hr) Value: 1
  misc_feature: MA Experiment 20000288 PARAMETER Experiment Name: At_Drought_P Parameter: Tissue Value: Whole Plant
  misc_feature: MA Experiment 20000288 PARAMETER Experiment Name: At_Drought_P Parameter: Treatment Value: Drought vs. No Drought
  misc_feature: MA Experiment ID: 20000437 Result: Down-regulated in Transcription
  misc_feature: MA Experiment 20000437 PARAMETER Experiment Name: At_Drought_P Parameter: Age (day) Value: 8
  misc_feature: MA Experiment 20000437 PARAMETER Experiment Name: At_Drought_P Parameter: Organism Value: A. thaliana
  misc_feature: MA Experiment 20000437 PARAMETER Experiment Name: At_Drought_P Parameter: Plant Line Value: WS
  misc_feature: MA Experiment 20000437 PARAMETER Experiment Name: At_Drought_P Parameter: Timepoint (hr) Value: 24
  misc_feature: MA Experiment 20000437 PARAMETER Experiment Name: At_Drought_P Parameter: Tissue Value: Whole Plant
  misc_feature: MA Experiment 20000437 PARAMETER Experiment Name: At_Drought_P Parameter: Treatment Value: Drought vs. No Drought
  misc_feature: MA Experiment ID: 20000453 Result: Up-regulated in Transcription
  misc_feature: MA Experiment 20000453 PARAMETER Experiment Name: At_100uM_ABA_P Parameter: Age (day) Value: 15
  misc_feature: MA Experiment 20000453 PARAMETER Experiment Name: At_100uM_ABA_P Parameter: Organism Value: A. thaliana
  misc_feature: MA Experiment 20000453 PARAMETER Experiment Name: At_100uM_ABA_P Parameter: Plant Line Value: WS
  misc_feature: MA Experiment 20000453 PARAMETER Experiment Name: At_100uM_ABA_P Parameter: Timepoint (hr) Value: 24
  misc_feature: MA Experiment 20000453 PARAMETER Experiment Name: At_100uM_ABA_P Parameter: Tissue Value: Aerial
  misc_feature: MA Experiment 20000453 PARAMETER Experiment Name: At_100uM_ABA_P Parameter: Treatment Value: 100uM ABA vs. No Treatment
  misc_feature: MA Experiment ID: 20000460 Result: Up-regulated in Transcription
  misc_feature: MA Experiment 20000460 PARAMETER Experiment Name: At_10percent_PEG_P Parameter: Age (day) Value: 12
  misc_feature: MA Experiment 20000460 PARAMETER Experiment Name: At_10percent_PEG_P Parameter: Organism Value: A. thaliana
  misc_feature: MA Experiment 20000460 PARAMETER Experiment Name: At_10percent_PEG_P Parameter: Plant Line Value: WS
  misc_feature: MA Experiment 20000460 PARAMETER Experiment Name: At_10percent_PEG_P Parameter: Timepoint (day) Value: 12
  misc_feature: MA Experiment 20000460 PARAMETER Experiment Name: At_10percent_PEG_P Parameter: Tissue Value: Whole Plant
  misc_feature: MA Experiment 20000460 PARAMETER Experiment Name: At_10percent_PEG_P Parameter: Treatment Value: 10percent PEG vs. No Treatment
  misc_feature: MA Experiment ID: 20000495 Result: Down-regulated in Transcription
  misc_feature: MA Experiment 20000495 PARAMETER Experiment Name: At_Guard_Cells_P Parameter: Harvest Date Value: 8/2/2002
  misc_feature: MA Experiment 20000495 PARAMETER Experiment Name: At_Guard_Cells_P Parameter: Organism Value: A. thaliana
  misc_feature: MA Experiment 20000495 PARAMETER Experiment Name: At_Guard_Cells_P Parameter: Tissue Value: Guard Cells vs. Leaves
  misc_feature: MA Experiment ID: 20000496 Result: Down-regulated in Transcription
  misc_feature: MA Experiment 20000496 PARAMETER Experiment Name: At_Guard_Cells_P Parameter: Harvest Date Value: 7/19/2002
  misc_feature: MA Experiment 20000496 PARAMETER Experiment Name: At_Guard_Cells_P Parameter: Organism Value: Canola
  misc_feature: MA Experiment 20000496 PARAMETER Experiment Name: At_Guard_Cells_P Parameter: Tissue Value: Guard Cells vs. Leaves
  misc_feature: MA Experiment ID: 20000527 Result: Up-regulated in Transcription
  misc_feature: MA Experiment 20000527 PARAMETER Experiment Name: At_10percent_PEG_P Parameter: Age (day) Value: 20
  misc_feature: MA Experiment 20000527 PARAMETER Experiment Name: At_10percent_PEG_P Parameter: Organism Value: A. thaliana
  misc_feature: MA Experiment 20000527 PARAMETER Experiment Name: At_10percent_PEG_P Parameter: Plant Line Value: WS
  misc_feature: MA Experiment 20000527 PARAMETER Experiment Name: At_10percent_PEG_P Parameter: Timepoint (day) Value: 20
  misc_feature: MA Experiment 20000527 PARAMETER Experiment Name: At_10percent_PEG_P Parameter: Tissue Value: Whole Plant
  misc_feature: MA Experiment 20000527 PARAMETER Experiment Name: At_10percent_PEG_P Parameter: Treatment Value: 10percent PEG vs. No Treatment
  misc_feature: MA Experiment ID: 20000794 Result: Down-regulated in Transcription
  misc_feature: MA Experiment 20000794 PARAMETER Experiment Name: At_Petals_P Parameter: Age (day) Value: 23-25 days
  misc_feature: MA Experiment 20000794 PARAMETER Experiment Name: At_Petals_P Parameter: Plant Line Value: WS
  misc_feature: MA Experiment 20000794 PARAMETER Experiment Name: At_Petals_P Parameter: Tissue Value: Petals vs. Whole plant
  misc_feature: MA Experiment ID: 20001450 Result: Up-regulated in Transcription
  misc_feature: MA Experiment 20001450 PARAMETER Experiment Name: At_Far-red-induction_P Parameter: Age (day) Value: 7
  misc_feature: MA Experiment 20001450 PARAMETER Experiment Name: At_Far-red-induction_P Parameter: Light Value: Far-red vs. White
  misc_feature: MA Experiment 20001450 PARAMETER Experiment Name: At_Far-red-induction_P Parameter: Organism Value: A. thaliana
  misc_feature: MA Experiment 20001450 PARAMETER Experiment Name: At_Far-red-induction_P Parameter: Plant Line Value: Columbia
  misc_feature: MA Experiment 20001450 PARAMETER Experiment Name: At_Far-red-induction_P Parameter: Timepoint (hr) Value: 8
  misc_feature: MA Experiment 20001450 PARAMETER Experiment Name: At_Far-red-induction_P Parameter: Tissue Value: Whole Plant
  misc_feature: MA Experiment ID: 20001557 Result: Up-regulated in Transcription
  misc_feature: MA Experiment 20001557 PARAMETER Experiment Name: At_Drought_Soil_Dry_P Parameter: Age (day) Value: 27
  misc_feature: MA Experiment 20001557 PARAMETER Experiment Name: At_Drought_Soil_Dry_P Parameter: Organism Value: A. thaliana
  misc_feature: MA Experiment 20001557 PARAMETER Experiment Name: At_Drought_Soil_Dry_P Parameter: Plant Line Value: WS
  misc_feature: MA Experiment 20001557 PARAMETER Experiment Name: At_Drought_Soil_Dry_P Parameter: Post Timepoint (hr) Value: 3
  misc_feature: MA Experiment 20001557 PARAMETER Experiment Name: At_Drought_Soil_Dry_P Parameter: Post-Treatment Value: Re-Water vs. No Drought
  misc_feature: MA Experiment 20001557 PARAMETER Experiment Name: At_Drought_Soil_Dry_P Parameter: Timepoint (day) Value: 13
  misc_feature: MA Experiment 20001557 PARAMETER Experiment Name: At_Drought_Soil_Dry_P Parameter: Treatment Value: Drought vs. No Drought
  misc_feature: MA Experiment ID: 20001558 Result: Up-regulated in Transcription
  misc_feature: MA Experiment 20001558 PARAMETER Experiment Name: At_Drought_Soil_Dry_P Parameter: Age (day) Value: 27
  misc_feature: MA Experiment 20001558 PARAMETER Experiment Name: At_Drought_Soil_Dry_P Parameter: Organism Value: A. thaliana
  misc_feature: MA Experiment 20001558 PARAMETER Experiment Name: At_Drought_Soil_Dry_P Parameter: Plant Line Value: WS
  misc_feature: MA Experiment 20001558 PARAMETER Experiment Name: At_Drought_Soil_Dry_P Parameter: Post Timepoint (hr) Value: 6
  misc_feature: MA Experiment 20001558 PARAMETER Experiment Name: At_Drought_Soil_Dry_P Parameter: Post-Treatment Value: Re-Water vs. No Drought
  misc_feature: MA Experiment 20001558 PARAMETER Experiment Name: At_Drought_Soil_Dry_P Parameter: Timepoint (day) Value: 13
  misc_feature: MA Experiment 20001558 PARAMETER Experiment Name: At_Drought_Soil_Dry_P Parameter: Treatment Value: Drought vs. No Drought
  misc_feature: MA Experiment ID: 20001774 Result: Down-regulated in Transcription
  misc_feature: MA Experiment 20001774 PARAMETER Experiment Name: At_Far-red-enriched-adult_P Parameter: Age (day) Value: 31
  misc_feature: MA Experiment 20001774 PARAMETER Experiment Name: At_Far-red-enriched-adult_P Parameter: Light Value: Far-red enriched vs. White
  misc_feature: MA Experiment 20001774 PARAMETER Experiment Name: At_Far-red-enriched-adult_P Parameter: Organism Value: A. thaliana
  misc_feature: MA Experiment 20001774 PARAMETER Experiment Name: At_Far-red-enriched-adult_P Parameter: Plant Line Value: Columbia
  misc_feature: MA Experiment 20001774 PARAMETER Experiment Name: At_Far-red-enriched-adult_P Parameter: Timepoint (hr) Value: 72
  misc_feature: MA Experiment 20001774 PARAMETER Experiment Name: At_Far-red-enriched-adult_P Parameter: Tissue Value: Aerial
  misc_feature: MA Experiment ID: 20001904 Result: Down-regulated in Transcription
  misc_feature: MA Experiment 20001904 PARAMETER Experiment Name: At_Drought_Reproduction_P Parameter: Age (day) Value: 37
  misc_feature: MA Experiment 20001904 PARAMETER Experiment Name: At_Drought_Reproduction_P Parameter: Organism Value: A. thaliana
  misc_feature: MA Experiment 20001904 PARAMETER Experiment Name: At_Drought_Reproduction_P Parameter: Plant Line Value: WS
  misc_feature: MA Experiment 20001904 PARAMETER Experiment Name: At_Drought_Reproduction_P Parameter: Timepoint (day) Value: 7
  misc_feature: MA Experiment 20001904 PARAMETER Experiment Name: At_Drought_Reproduction_P Parameter: Tissue Value: Rosettes
  misc_feature: MA Experiment 20001904 PARAMETER Experiment Name: At_Drought_Reproduction_P Parameter: Treatment Value: Drought vs. No Drought
agaatacttttatctcatattcccaacacttgttcaagcatatctaagtcaataacaacattacaacataacatggtgaaacaagaactcaagatccaagttactacttcctcatcatcactctctcattcttcatcttcttcttcttcttcaacgtcggcactacgtcatcaatcttgtaagaacaagataaagaagtataaaggtgtgaggatgcgaagttggggatcatgggttactgaaattagggcaccaaatcaaaagacaagaatctggttaggttcttactccaccgcagaagcagctgctagggcttacgacgctgctctcttgtgtcttaagggacctaaagctaatctcaacttccctaacatcaccactacttctccttttcttatgaacatcgacgaaaagacccttttgtccccaaaatcaatccaaaaggtcgccgctcaagccgctaactcctcttctgaccattttacccctccgtccgatgaaaatgatcatgatcatgaagacggactcgatcaccatccatctgcttcttcttcagctgcatcttcaccaccagatgatgatcatcataatggatgacgatgggtgatttggtatcgttgatggaatctttcgggggataccaacgaacaccgtggctttggatgggatccatcgctgtatgaatttggacataatgagatcttcttcaccaacggagatccgtttgattattctccacagttacatagctcaaaggcaacgatggatgacttctacgacgatgttgatattccgctgtggagtttcagttaatccaacggtccatattattatactacgaaacacttttaattcacattatttcatttaatttattctttcaattcatattattcgtccttgttgtttcgttatgtattaaatatacacacactaatttaagaagatcacatggactagaggtttttttgtc

SEQ ID NO: 43721 - protein, 198 aa, Arabidopsis thaliana
  peptide (1)..(198): Ceres Seq. ID no. 12560048
  misc_feature (64)..(128): Pfam Name: AP2 domain Pfam Description: AP2 domain
  misc_feature (13)..(189): Homolog of NCBI NO: 15232340 NR Description: transcription factor - like protein; protein id:
  misc_feature (44)..(194): Homolog of NCBI NO: 37536842 NR Description: putative DNA binding protein
  misc_feature (66)..(194): Homolog of NCBI NO: 15222040 NR Description: AP2 domain containing protein, putative; protein
  misc_feature (35)..(194): Homolog of NCBI NO: 14140163 NR Description: putative AP2 domain containing protein [Oryza
  misc_feature (35)..(193): Homolog of NCBI NO: 38605848 NR Description: OSJNBb0034G17.6 [Oryza sativa (japonica
  misc_feature (64)..(154): Homolog of NCBI NO: 34902130 NR Description: hypothetical protein [Oryza sativa (japonica
  misc_feature (32)..(159): Homolog of NCBI NO: 15219452 NR Description: transcription factor, putative; protein id:
  misc_feature (25)..(198): Homolog of NCBI NO: 21554056 NR Description: TINY-like protein [Arabidopsis thaliana]
  misc_feature (25)..(198): Homolog of NCBI NO: 15219139 NR Description: TINY-like protein
  misc_feature (25)..(198): Homolog of NCBI NO: 15224024 NR Description: hypothetical protein; protein id: At1g77640.1
RILLSHIPNTCSSISKSITTLQHNMVKQELKIQVTTSSSSLSHSSSSSSSSTSALRHQSCKNKIKKYKGVRMRSWGSWVTEIRAPNQKTRIWLGSYSTAEAAARAYDAALLCLKGPKANLNFPNITTTSPFLMNIDEKTLLSPKSIQKVAAQAANSSSDHFTPPSDENDHDHEDGLDHHPSASSSAASSPPDDDHHNG

SEQ ID NO: 43722 - protein, 174 aa, Arabidopsis thaliana
  peptide (1)..(174): Ceres Seq. ID no. 12560049
  misc_feature (40)..(104): Pfam Name: AP2 domain Pfam Description: AP2 domain
  misc_feature (1)..(165): Homolog of NCBI NO: 15232340 NR Description: transcription factor - like protein; protein id:
  misc_feature (20)..(170): Homolog of NCBI NO: 37536842 NR Description: putative DNA binding protein
  misc_feature (42)..(170): Homolog of NCBI NO: 15222040 NR Description: AP2 domain containing protein, putative; protein
  misc_feature (11)..(170): Homolog of NCBI NO: 14140163 NR Description: putative AP2 domain containing protein [Oryza
  misc_feature (11)..(169): Homolog of NCBI NO: 38605848 NR Description: OSJNBb0034G17.6 [Oryza sativa (japonica
  misc_feature (40)..(130): Homolog of NCBI NO: 34902130 NR Description: hypothetical protein [Oryza sativa (japonica
  misc_feature (8)..(135): Homolog of NCBI NO: 15219452 NR Description: transcription factor, putative; protein id:
  misc_feature (1)..(174): Homolog of NCBI NO: 21554056 NR Description: TINY-like protein [Arabidopsis thaliana]
  misc_feature (1)..(174): Homolog of NCBI NO: 15219139 NR Description: TINY-like protein
  misc_feature (1)..(174): Homolog of NCBI NO: 15224024 NR Description: hypothetical protein; protein id: At1g77640.1
MVKQELKIQVTTSSSSLSHSSSSSSSSTSALRHQSCKNKIKKYKGVRMRSWGSWVTEIRAPNQKTRIWLGSYSTAEAAARAYDAALLCLKGPKANLNFPNITTTSPFLMNIDEKTLLSPKSIQKVAAQAANSSSDHFTPPSDENDHDHEDGLDHHPSASSSAASSPPDDDHHNG

SEQ ID NO: 43723 - protein, 127 aa, Arabidopsis thaliana
  peptide (1)..(127): Ceres Seq. ID no. 12560050
  misc_feature (1)..(57): Pfam Name: AP2 domain Pfam Description: AP2 domain
  misc_feature (1)..(118): Homolog of NCBI NO: 15232340 NR Description: transcription factor - like protein; protein id:
  misc_feature (1)..(123): Homolog of NCBI NO: 37536842 NR Description: putative DNA binding protein
  misc_feature (1)..(123): Homolog of NCBI NO: 15222040 NR Description: AP2 domain containing protein, putative; protein
  misc_feature (1)..(123): Homolog of NCBI NO: 14140163 NR Description: putative AP2 domain containing protein [Oryza
  misc_feature (1)..(122): Homolog of NCBI NO: 38605848 NR Description: OSJNBb0034G17.6 [Oryza sativa (japonica
  misc_feature (1)..(83): Homolog of NCBI NO: 34902130 NR Description: hypothetical protein [Oryza sativa (japonica
  misc_feature (1)..(88): Homolog of NCBI NO: 15219452 NR Description: transcription factor, putative; protein id:
  misc_feature (1)..(127): Homolog of NCBI NO: 21554056 NR Description: TINY-like protein [Arabidopsis thaliana]
  misc_feature (1)..(127): Homolog of NCBI NO: 15219139 NR Description: TINY-like protein
  misc_feature (1)..(127): Homolog of NCBI NO: 15224024 NR Description: hypothetical protein; protein id: At1g77640.1
MRSWGSWVTEIRAPNQKTRIWLGSYSTAEAAARAYDAALLCLKGPKANLNFPNITTTSPFLMNIDEKTLLSPKSIQKVAAQAANSSSDHFTPPSDENDHDHEDGLDHHPSASSSAASSPPDDDHHNG

SEQ ID NO: 43724 - DNA, 1043 bp, Arabidopsis thaliana
  misc_feature (1)..(1043): Ceres Seq. ID no. 12330493
  misc_feature: MA Experiment ID: 108434 Result: Down-regulated in Transcription
  misc_feature: MA Experiment 108434 PARAMETER Experiment Name: At_Root_Tips_cDNA_P Parameter: Tissue Value: Root Tips
  misc_feature: MA Experiment ID: 108595 Result: Down-regulated in Transcription
  misc_feature: MA Experiment 108595 PARAMETER Experiment Name: At_Ler-pi_Ovule_cDNA_P Parameter: Plant Line Value: null
gaaatttcctctcttcttcttttgcttgagctttaggttttgagagcaaagaaaaacgaagacgcgtcaaagagcttttgtggagaggttctgcttgcttgctacaatgggttacgcccagctagttattggtccagcaggcagtggaaagtcaacttattgctcgtctttgtatgaacattgtgaaactatcggtcgaacaatgcatgttgttaaccttgatcctgctgcggagatcttcaactatcctgtggctatggatatcagagaacttatttctttggaagatgtgatggaggatctaaagcttggtcctaatggtgcccttatgtattgcatggagtatcttgaggatagcttacatgattgggtggatgaagaattggagaactacagggatgacgattaccttatctttgattgtccaggccagatagagctgtttacacatgttcctgtgctcaagaactttgtggagcatttgaagcagaagaacttcaacgtctgtgttgtttatctgcttgattcacagttcatcacagatgtaaccaagtttatcagtggttgcatgtcatctctcgctgcaatgatccagcttgaattaccacatgtcaacatcctctcaaaaatggacctcttgcaggacaaaagcaacattgatgattacttgaatccggagcctcgcacattgctagcagagttaaacaaaaggatgggtcctcaatatgcaaaactaaacaaagccttgattgagatggtgggagagtatgggatggtgaatttcatacccattaacttgaggaaagaaaagagcattcaatatgttctgtcacaaatcgacgtctgtattcagtttggagaagatgctgatgtgaacatcaaagatgatgacgattttagtgacgatggtcctgacctataattgttatattcggtttctacaacttttgttaaaagtctaaacaagcttggtctcattgttcttgtcagttaccaatggcgtttgtgagaacttttgttgaatatcaaaagccttcaatgtg

SEQ ID NO: 43725 - protein, 271 aa, Arabidopsis thaliana; identical to SEQ ID NO: 28955
  peptide (1)..(271): Ceres Seq. ID no. 12330494
  misc_feature (7)..(250): Pfam Name: Conserved hypothetical ATP binding protein Pfam Description: Conserved hypothetical ATP binding protein
  misc_feature (1)..(256): Homolog of NCBI NO: 39587465 NR Description: Hypothetical protein CBG23047 [Caenorhabditis
  misc_feature (3)..(271): Homolog of NCBI NO: 21410245 NR Description: protein x 0004 [Homo sapiens]
  misc_feature (6)..(261): Homolog of NCBI NO: 6323272 NR Description: Protein required for cell viability; Ylr243wp
  misc_feature (3)..(255): Homolog of NCBI NO: 21312642 NR Description: RIKEN cDNA A930018B01 [Mus musculus]
  misc_feature (1)..(256): Homolog of NCBI NO: 17556506 NR Description: ATP-binding protein like (31.0 kD)
  misc_feature (3)..(255): Homolog of NCBI NO: 34872358 NR Description: similar to RIKEN cDNA A930018B01 [Rattus
  misc_feature (3)..(256): Homolog of NCBI NO: 37606123 NR Description: SI:zK83D9.3 (novel protein similar to human x
  misc_feature (59)..(271): Homolog of NCBI NO: 7487264 NR Description: hypothetical protein T20K18.140 - Arabidopsis
  misc_feature (1)..(266): Homolog of NCBI NO: 18071342 NR Description: putative ATP(GTP)-binding protein
  misc_feature (1)..(271): Homolog of NCBI NO: 18413871 NR Description: putative protein

SEQ ID NO: 43726 - protein, 239 aa, Arabidopsis thaliana; identical to SEQ ID NO: 28956
  peptide (1)..(239): Ceres Seq. ID no. 12330495
  misc_feature (1)..(218): Pfam Name: Conserved hypothetical ATP binding protein Pfam Description: Conserved hypothetical ATP binding protein
  misc_feature (1)..(224): Homolog of NCBI NO: 39587465 NR Description: Hypothetical protein CBG23047 [Caenorhabditis
  misc_feature (1)..(239): Homolog of NCBI NO: 21410245 NR Description: protein x 0004 [Homo sapiens]
  misc_feature (1)..(229): Homolog of NCBI NO: 6323272 NR Description: Protein required for cell viability; Ylr243wp
  misc_feature (1)..(223): Homolog of NCBI NO: 21312642 NR Description: RIKEN cDNA A930018B01 [Mus musculus]
  misc_feature (1)..(224): Homolog of NCBI NO: 17556506 NR Description: ATP-binding protein like (31.0 kD)
  misc_feature (1)..(223): Homolog of NCBI NO: 34872358 NR Description: similar to RIKEN cDNA A930018B01 [Rattus
  misc_feature (1)..(224): Homolog of NCBI NO: 37606123 NR Description: SI:zK83D9.3 (novel protein similar to human x
  misc_feature (27)..(239): Homolog of NCBI NO: 7487264 NR Description: hypothetical protein T20K18.140 - Arabidopsis
  misc_feature (1)..(234): Homolog of NCBI NO: 18071342 NR Description: putative ATP(GTP)-binding protein
  misc_feature (1)..(239): Homolog of NCBI NO: 18413871 NR Description: putative protein

SEQ ID NO: 43727 - protein, 221 aa, Arabidopsis thaliana; identical to SEQ ID NO: 28957
  peptide (1)..(221): Ceres Seq. ID no. 12330496
  misc_feature (1)..(200): Pfam Name: Conserved hypothetical ATP binding protein Pfam Description: Conserved hypothetical ATP binding protein
  misc_feature (1)..(206): Homolog of NCBI NO: 39587465 NR Description: Hypothetical protein CBG23047 [Caenorhabditis
  misc_feature (1)..(221): Homolog of NCBI NO: 21410245 NR Description: protein x 0004 [Homo sapiens]
  misc_feature (1)..(211): Homolog of NCBI NO: 6323272 NR Description: Protein required for cell viability; Ylr243wp
  misc_feature (1)..(205): Homolog of NCBI NO: 21312642 NR Description: RIKEN cDNA A930018B01 [Mus musculus]
  misc_feature (1)..(206): Homolog of NCBI NO: 17556506 NR Description: ATP-binding protein like (31.0 kD)
  misc_feature (1)..(205): Homolog of NCBI NO: 34872358 NR Description: similar to RIKEN cDNA A930018B01 [Rattus
  misc_feature (1)..(206): Homolog of NCBI NO: 37606123 NR Description: SI:zK83D9.3 (novel protein similar to human x
  misc_feature (9)..(221): Homolog of NCBI NO: 7487264 NR Description: hypothetical protein T20K18.140 - Arabidopsis
  misc_feature (1)..(216): Homolog of NCBI NO: 18071342 NR Description: putative ATP(GTP)-binding protein
  misc_feature (1)..(221): Homolog of NCBI NO: 18413871 NR Description: putative protein

SEQ ID NO: 43728 - DNA, 1342 bp, Arabidopsis thaliana
  misc_feature (1)..(1342): Ceres Seq. ID no. 13575162
  misc_feature: MA Experiment ID: 20000328 Result: Down-regulated in Transcription
  misc_feature: MA Experiment 20000328 PARAMETER Experiment Name: At_42deg_Heat_Sub_P Parameter: Age (day) Value: 14
  misc_feature: MA Experiment 20000328 PARAMETER Experiment Name: At_42deg_Heat_Sub_P Parameter: Organism Value: A. thaliana
  misc_feature: MA Experiment 20000328 PARAMETER Experiment Name: At_42deg_Heat_Sub_P Parameter: Plant Line Value: WS
  misc_feature: MA Experiment 20000328 PARAMETER Experiment Name: At_42deg_Heat_Sub_P Parameter: Temperature (deg C) Value: 42 vs. 22
  misc_feature: MA Experiment 20000328 PARAMETER Experiment Name: At_42deg_Heat_Sub_P Parameter: Timepoint (hr) Value: 6
  misc_feature: MA Experiment 20000328 PARAMETER Experiment Name: At_42deg_Heat_Sub_P Parameter: Tissue Value: Aerial
attgattgtcatttgttcttcttcactctctctaataattctccagaacattttgcacattccgtttcactccgtgttgttggatcccccaaagaaaatgagttgctttgggtgttgtggggaggatgatgatatgcataaaactgctgattatggaggtcgtcataaccaagccaaacactttcctccaggaaatgatgcaaggcaccaccaagcctctgaaactgcacagaagggtcctccagttgtgaagttgcagcctattgaagtacctattatcccttttagtgaactcaaagaagcaactgatgattttggatcgaattctctcatcggtgaaggctcttatggaagagtatactacggggtattaaacaatgatctgccttcagcgattaaaaagttggattctaacaaacagcctgacaatgaattccttgctcaggtttccatggtttctaggcttaaacatgataactttgttcaacttcttggctactgtgttgatgggaattcacggatactttcttatgaatttgccaataatggatctcttcatgatattcttcatgggagaaaaggtgtgaaaggagcacagccaggtcctgtcttgtcgtggtatcaacgagtcaaaattgcagttggagctgcaagaggccttgagtacttgcatgaaaaagctaatcctcacatcattcaccgtgacattaaatccagcaatgtcctcctctttgaagatgatgttgccaaaattgctgactttgatctctctaatcaagctcctgatatggcagctcgccttcattccacccgagttcttgggacttttggttaccatgcccctgaatatgcaatgaccgggcagttaaatgccaagagtgatgtctacagctttggagttgtcttactcgaacttcttacaggtcgaaagcctgttgatcatagactacccagaggccagcaaagtttagtcacatgggctacacctaaactgagtgaagacaaggttaaacaatgcgttgatgcaagactcggtggcgattaccctccaaaagctgttgctaagttagccgcggttgctgcgttgtgtgtgcaatatgaagcagattttaggccgaatatgagtatcgttgtcaaagctcttcaacctttgttgaatgctcgagccgtagctccaggggaaggagtacattagccacctctgtctcggcgtttctcttcttaccagaaaatttgatttttacatatacacgatataccagtcaaaacttaatttatgtgcatagaaatctctgtaatgttttttaaaaaactatatttttacattaaatccgttaccctt

SEQ ID NO: 43729 - protein, 397 aa, Arabidopsis thaliana
  peptide (1)..(397): Ceres Seq. ID no. 13575163
  misc_feature (33)..(378): Homolog of NCBI NO: 25405922 NR Description: protein F21D18.6 [imported] - Arabidopsis
  misc_feature (33)..(379): Homolog of NCBI NO: 1586940 NR Description: Ser/Thr kinase
  misc_feature (33)..(392): Homolog of NCBI NO: 15451196 NR Description: similar to Pto kinase interactor 1 gb|AAC61805.1
  misc_feature (33)..(392): Homolog of NCBI NO: 15221111 NR Description: serine/threonine protein kinase, putative
  misc_feature (33)..(385): Homolog of NCBI NO: 3668069 NR Description: Pto kinase interactor 1 [Lycopersicon esculentum]
  misc_feature (33)..(392): Homolog of NCBI NO: 22331138 NR Description: serine/threonine protein kinase, putative
  misc_feature (33)..(395): Homolog of NCBI NO: 15228711 NR Description: serine/threonine protein kinase, putative
  misc_feature (354)..(397): Homolog of NCBI NO: 30690586 NR Description: serine/threonine protein kinase, putative
  misc_feature (33)..(356): Homolog of NCBI NO: 30690586 NR Description: serine/threonine protein kinase, putative
  misc_feature (33)..(397): Homolog of NCBI NO: 15226492 NR Description: serine/threonine protein kinase, putative
LIVICSSSLSLIILQNILHIPFHSVLLDPPKKMSCFGCCGEDDDMHKTADYGGRHNQAKHFPPGNDARHHQASETAQKGPPVVKLQPIEVPIIPFSELKEATDDFGSNSLIGEGSYGRVYYGVLNNDLPSAIKKLDSNKQPDNEFLAQVSMVSRLKHDNFVQLLGYCVDGNSRILSYEFANNGSLHDILHGRKGVKGAQPGPVLSWYQRVKIAVGAARGLEYLHEKANPHIIHRDIKSSNVLLFEDDVAKIADFDLSNQAPDMAARLHSTRVLGTFGYHAPEYAMTGQLNAKSDVYSFGVVLLELLTGRKPVDHRLPRGQQSLVTWATPKLSEDKVKQCVDARLGGDYPPKAVAKLAAVAALCVQYEADFRPNMSIVVKALQPLLNARAVAPGEGVH

SEQ ID NO: 43730 - protein, 365 aa, Arabidopsis thaliana
  peptide (1)..(365): Ceres Seq. ID no. 13575164
  misc_feature (1)..(346): Homolog of NCBI NO: 25405922 NR Description: protein F21D18.6 [imported] - Arabidopsis
  misc_feature (1)..(347): Homolog of NCBI NO: 1586940 NR Description: Ser/Thr kinase
  misc_feature (1)..(360): Homolog of NCBI NO: 15451196 NR Description: similar to Pto kinase interactor 1 gb|AAC61805.1
  misc_feature (1)..(360): Homolog of NCBI NO: 15221111 NR Description: serine/threonine protein kinase, putative
  misc_feature (1)..(353): Homolog of NCBI NO: 3668069 NR Description: Pto kinase interactor 1 [Lycopersicon esculentum]
  misc_feature (1)..(360): Homolog of NCBI NO: 22331138 NR Description: serine/threonine protein kinase, putative
  misc_feature (1)..(363): Homolog of NCBI NO: 15228711 NR Description: serine/threonine protein kinase, putative
  misc_feature (322)..(365): Homolog of NCBI NO: 30690586 NR Description: serine/threonine protein kinase, putative
  misc_feature (1)..(324): Homolog of NCBI NO: 30690586 NR Description: serine/threonine protein kinase, putative
  misc_feature (1)..(365): Homolog of NCBI NO: 15226492 NR Description: serine/threonine protein kinase, putative
MSCFGCCGEDDDMHKTADYGGRHNQAKHFPPGNDARHHQASETAQKGPPVVKLQPIEVPIIPFSELKEATDDFGSNSLIGEGSYGRVYYGVLNNDLPSAIKKLDSNKQPDNEFLAQVSMVSRLKHDNFVQLLGYCVDGNSRILSYEFANNGSLHDILHGRKGVKGAQPGPVLSWYQRVKIAVGAARGLEYLHEKANPHIIHRDIKSSNVLLFEDDVAKIADFDLSNQAPDMAARLHSTRVLGTFGYHAPEYAMTGQLNAKSDVYSFGVVLLELLTGRKPVDHRLPRGQQSLVTWATPKLSEDKVKQCVDARLGGDYPPKAVAKLAAVAALCVQYEADFRPNMSIVVKALQPLLNARAVAPGEGVH

SEQ ID NO: 43731 - protein, 353 aa, Arabidopsis thaliana
  peptide (1)..(353): Ceres Seq. ID no. 13575165
  misc_feature (1)..(334): Homolog of NCBI NO: 25405922 NR Description: protein F21D18.6 [imported] - Arabidopsis
  misc_feature (1)..(335): Homolog of NCBI NO: 1586940 NR Description: Ser/Thr kinase
  misc_feature (1)..(348): Homolog of NCBI NO: 15451196 NR Description: similar to Pto kinase interactor 1 gb|AAC61805.1
  misc_feature (1)..(348): Homolog of NCBI NO: 15221111 NR Description: serine/threonine protein kinase, putative
  misc_feature (1)..(341): Homolog of NCBI NO: 3668069 NR Description: Pto kinase interactor 1 [Lycopersicon esculentum]
  misc_feature (1)..(348): Homolog of NCBI NO: 22331138 NR Description: serine/threonine protein kinase, putative
  misc_feature (1)..(351): Homolog of NCBI NO: 15228711 NR Description: serine/threonine protein kinase, putative
  misc_feature (310)..(353): Homolog of NCBI NO: 30690586 NR Description: serine/threonine protein kinase, putative
  misc_feature (1)..(312): Homolog of NCBI NO: 30690586 NR Description: serine/threonine protein kinase, putative
  misc_feature (1)..(353): Homolog of NCBI NO: 15226492 NR Description: serine/threonine protein kinase, putative
MHKTADYGGRHNQAKHFPPGNDARHHQASETAQKGPPVVKLQPIEVPIIPFSELKEATDDFGSNSLIGEGSYGRVYYGVLNNDLPSAIKKLDSNKQPDNEFLAQVSMVSRLKHDNFVQLLGYCVDGNSRILSYEFANNGSLHDILHGRKGVKGAQPGPVLSWYQRVKIAVGAARGLEYLHEKANPHIIHRDIKSSNVLLFEDDVAKIADFDLSNQAPDMAARLHSTRVLGTFGYHAPEYAMTGQLNAKSDVYSFGVVLLELLTGRKPVDHRLPRGQQSLVTWATPKLSEDKVKQCVDARLGGDYPPKAVAKLAAVAALCVQYEADFRPNMSIVVKALQPLLNARAVAPGEGVH

SEQ ID NO: 43732 - DNA, 1190 bp, Arabidopsis thaliana
  misc_feature (1)..(1190): Ceres Seq. ID no. 12336324
  misc_feature: MA Experiment ID: 108434 Result: Up-regulated in Transcription
  misc_feature: MA Experiment 108434 PARAMETER Experiment Name: At_Root_Tips_cDNA_P Parameter: Tissue Value: Root Tips
  misc_feature: MA Experiment ID: 108579 Result: Down-regulated in Transcription
  misc_feature: MA Experiment 108579 PARAMETER Experiment Name: At_4deg_Cold_cDNA_P Parameter: Temperature (deg C) Value: 4 vs. 22
  misc_feature: MA Experiment 108579 PARAMETER Experiment Name: At_4deg_Cold_cDNA_P Parameter: Timepoint (hr) Value: 6
  misc_feature: MA Experiment 108579 PARAMETER Experiment Name: At_4deg_Cold_cDNA_P Parameter: Tissue Value: Aerial
  misc_feature: MA Experiment ID: 20000088 Result: Down-regulated in Transcription
  misc_feature: MA Experiment 20000088 PARAMETER Experiment Name: At_100uM_ABA_Mutants_cDNA_P Parameter: Plant Line Value: Landsberg
  misc_feature: MA Experiment 20000088 PARAMETER Experiment Name: At_100uM_ABA_Mutants_cDNA_P Parameter: Timepoint (hr) Value: 6
  misc_feature: MA Experiment 20000088 PARAMETER Experiment Name: At_100uM_ABA_Mutants_cDNA_P Parameter: Tissue Value: Aerial
  misc_feature: MA Experiment 20000088 PARAMETER Experiment Name: At_100uM_ABA_Mutants_cDNA_P Parameter: Treatment Value: 100uM ABA vs. No Treatment
  misc_feature: MA Experiment ID: 20000111 Result: Up-regulated in Transcription
  misc_feature: MA Experiment 20000111 PARAMETER Experiment Name: At_42deg_Heat_cDNA_P Parameter: Temperature (deg C) Value: 42 vs. 22
  misc_feature: MA Experiment 20000111 PARAMETER Experiment Name: At_42deg_Heat_cDNA_P Parameter: Timepoint (hr) Value: 6
  misc_feature: MA Experiment 20000111 PARAMETER Experiment Name: At_42deg_Heat_cDNA_P Parameter: Tissue Value: Aerial
  misc_feature: MA Experiment ID: 20000113 Result: Up-regulated in Transcription
  misc_feature: MA Experiment 20000113 PARAMETER Experiment Name: At_42deg_Heat_cDNA_P Parameter: Temperature (deg C) Value: 42 vs. 22
  misc_feature: MA Experiment 20000113 PARAMETER Experiment Name: At_42deg_Heat_cDNA_P Parameter: Timepoint (hr) Value: 8
  misc_feature: MA Experiment 20000113 PARAMETER Experiment Name: At_42deg_Heat_cDNA_P Parameter: Tissue Value: Aerial
  misc_feature: MA Experiment ID: 20000144 Result: Up-regulated in Transcription
  misc_feature: MA Experiment 20000144 PARAMETER Experiment Name: At_42deg_Heat_cDNA_P Parameter: Temperature (deg C) Value: 42 vs. 22
  misc_feature: MA Experiment 20000144 PARAMETER Experiment Name: At_42deg_Heat_cDNA_P Parameter: Timepoint (hr) Value: 1
  misc_feature: MA Experiment 20000144 PARAMETER Experiment Name: At_42deg_Heat_cDNA_P Parameter: Tissue Value: Aerial
  misc_feature: MA Experiment ID: 20000171 Result: Up-regulated in Transcription
  misc_feature: MA Experiment 20000171 PARAMETER Experiment Name: At_42deg_Heat_P Parameter: Age (day) Value: 14
  misc_feature: MA Experiment 20000171 PARAMETER Experiment Name: At_42deg_Heat_P Parameter: Organism Value: A. thaliana
  misc_feature: MA Experiment 20000171 PARAMETER Experiment Name: At_42deg_Heat_P Parameter: Plant Line Value: WS
  misc_feature: MA Experiment 20000171 PARAMETER Experiment Name: At_42deg_Heat_P Parameter: Temperature (deg C) Value: 42 vs. 22
  misc_feature: MA Experiment 20000171 PARAMETER Experiment Name: At_42deg_Heat_P Parameter: Timepoint (hr) Value: 1
  misc_feature: MA Experiment 20000171 PARAMETER Experiment Name: At_42deg_Heat_P Parameter: Tissue Value: Aerial
  misc_feature: MA Experiment ID: 20000173 Result: Up-regulated in Transcription
  misc_feature: MA Experiment 20000173 PARAMETER Experiment Name: At_42deg_Heat_P Parameter: Age (day) Value: 14
  misc_feature: MA Experiment 20000173 PARAMETER Experiment Name: At_42deg_Heat_P Parameter: Organism Value: A. thaliana
  misc_feature: MA Experiment 20000173 PARAMETER Experiment Name: At_42deg_Heat_P Parameter: Plant Line Value: WS
  misc_feature: MA Experiment 20000173 PARAMETER Experiment Name: At_42deg_Heat_P Parameter: Temperature (deg C) Value: 42 vs. 22
  misc_feature: MA Experiment 20000173 PARAMETER Experiment Name: At_42deg_Heat_P Parameter: Timepoint (hr) Value: 6
  misc_feature: MA Experiment 20000173 PARAMETER Experiment Name: At_42deg_Heat_P Parameter: Tissue Value: Aerial
  misc_feature: MA Experiment ID: 20001247 Result: Up-regulated in Transcription
  misc_feature: MA Experiment 20001247 PARAMETER Experiment Name: At_Far-red-induction_P Parameter: Age (day) Value: 7
  misc_feature: MA Experiment 20001247 PARAMETER Experiment Name: At_Far-red-induction_P Parameter: Light Value: Far-red vs. White
  misc_feature: MA Experiment 20001247 PARAMETER Experiment Name: At_Far-red-induction_P Parameter: Organism Value: A. thaliana
  misc_feature: MA Experiment 20001247 PARAMETER Experiment Name: At_Far-red-induction_P Parameter: Plant Line Value: Columbia
  misc_feature: MA Experiment 20001247 PARAMETER Experiment Name: At_Far-red-induction_P Parameter: Timepoint (hr) Value: 1
  misc_feature: MA Experiment 20001247 PARAMETER Experiment Name: At_Far-red-induction_P Parameter: Tissue Value: Whole Plant
  misc_feature: MA Experiment ID: 20001248 Result: Up-regulated in Transcription
  misc_feature: MA Experiment 20001248 PARAMETER Experiment Name: At_Far-red-induction_P Parameter: Age (day) Value: 7
  misc_feature: MA Experiment 20001248 PARAMETER Experiment Name: At_Far-red-induction_P Parameter: Light Value: Far-red vs. White
  misc_feature: MA Experiment 20001248 PARAMETER Experiment Name: At_Far-red-induction_P Parameter: Organism Value: A. thaliana
  misc_feature: MA Experiment 20001248 PARAMETER Experiment Name: At_Far-red-induction_P Parameter: Plant Line Value: Columbia
  misc_feature: MA Experiment 20001248 PARAMETER Experiment Name: At_Far-red-induction_P Parameter: Timepoint (hr) Value: 4
  misc_feature: MA Experiment 20001248 PARAMETER Experiment Name: At_Far-red-induction_P Parameter: Tissue Value: Whole Plant
  misc_feature: MA Experiment ID: 20001450 Result: Up-regulated in Transcription
  misc_feature: MA Experiment 20001450 PARAMETER Experiment Name: At_Far-red-induction_P Parameter: Age (day) Value: 7
  misc_feature: MA Experiment 20001450 PARAMETER Experiment Name: At_Far-red-induction_P Parameter: Light Value: Far-red vs. White
  misc_feature: MA Experiment 20001450 PARAMETER Experiment Name: At_Far-red-induction_P Parameter: Organism Value: A. thaliana
  misc_feature: MA Experiment 20001450 PARAMETER Experiment Name: At_Far-red-induction_P Parameter: Plant Line Value: Columbia
  misc_feature: MA Experiment 20001450 PARAMETER Experiment Name: At_Far-red-induction_P Parameter: Timepoint (hr) Value: 8
  misc_feature: MA Experiment 20001450 PARAMETER Experiment Name: At_Far-red-induction_P Parameter: Tissue Value: Whole Plant
atcagattctatctctctctctctgtaagattccttgctctcgcgcttttctctctctctctcgcgttcgttcttatccacgagctctgcaccgtcgcaatctccgtcttctccatttagatccaacacagagccttttctacatgaaattcggcaaagagtttcgtactcacctcgaagaaactttaccagagtggagagacaagttcctttgctataaacctttaaaaaagcttctcaaatattatccttattactccgccgattttggacccgccaattccgatcacaacgattcgcgtccagtatttgctgatactactaacatctcttccgccgccgacgacggcggtgtggttcccggcgtcaggccatcggaagatctccagggagctcaaggaaagaatcgagcaagttaaagaaaagaatggggaatttgcatcagaaagtgagttcagcgaagaaatgatggatattcggagagaccttgttaccattcatggcgagatggtgctcctgaaaaactacagctcccttaattttgcaggacttgtcaagattttgaagaagtacgataaaagaacaggtggacttttacgtttgcctttcacacagcttgttctccatcaacccttctttactacagagccacttactaggttagtccgtgaatgtgaggccaatcttgagcttctttttccttcagaagcggaagttgtagagtcttctagcgcagtgcaagcacactcaagctcacatcagcacaactccccaagaatctcagctgagacttcctcaactctcggcaatgaaaatcttgatatatataagagtacactcgctgcaatgagagctataagagggttacaaaaggctagctcgacgtacaaccctttatcattctcatcgcttcttcagaacgaggatgatgagacggtaacagctgaaaactctccaaactctgggaacaaagatgattcagagaaggaagatactggaccttcccactgatcagaagagaatgatgctctttttgatcaagattttgagaatttgcttcttgatttcaccctaacttttcataaaattaacacattttactttacttcttcaccttttgcaggacacaacttctgtatgcatttgaattgtagtacagtcgtttatagattttcaatgaaattttcctc

SEQ ID NO: 43733 - protein, 181 aa, Arabidopsis thaliana; identical to SEQ ID NO: 42980
  peptide (1)..(181): Ceres Seq. ID no. 12336325
  misc_feature (1)..(53): Pfam Name: SPX domain Pfam Description: SPX domain
  misc_feature (1)..(152): Homolog of NCBI NO: 16506648 NR Description: IDS-4-like protein [Castanea sativa]
  misc_feature (1)..(91): Homolog of NCBI NO: 15225414 NR Description: hypothetical protein; protein id: At2g45130.1
  misc_feature (1)..(99): Homolog of NCBI NO: 21592813 NR Description: ids4-like protein [Arabidopsis thaliana]
  misc_feature (1)..(99): Homolog of NCBI NO: 15241275 NR Description: ids4-like protein
  misc_feature (1)..(145): Homolog of NCBI NO: 37533962 NR Description: hypothetical protein [Oryza sativa (japonica
  misc_feature (15)..(181): Homolog of NCBI NO: 7489382 NR Description: ids-4 protein - barley
  misc_feature (1)..(155): Homolog of NCBI NO: 15225770 NR Description: unknown protein; protein id: At2g26660.1
  misc_feature (1)..(176): Homolog of NCBI NO: 34897330 NR Description: putative signal transduction protein [Oryza
  misc_feature (1)..(181): Homolog of NCBI NO: 18417630 NR Description: ids-4 protein - like
  misc_feature (1)..(181): Homolog of NCBI NO: 11358467 NR Description: ids-4 protein-like - Arabidopsis thaliana

SEQ ID NO: 43734 - protein, 180 aa, Arabidopsis thaliana
  peptide (1)..(180): Ceres Seq. ID no. 12336326
  misc_feature (1)..(52): Pfam Name: SPX domain Pfam Description: SPX domain
  misc_feature (1)..(151): Homolog of NCBI NO: 16506648 NR Description: IDS-4-like protein [Castanea sativa]
  misc_feature (1)..(90): Homolog of NCBI NO: 15225414 NR Description: hypothetical protein; protein id: At2g45130.1
  misc_feature (1)..(98): Homolog of NCBI NO: 21592813 NR Description: ids4-like protein [Arabidopsis thaliana]
  misc_feature (1)..(98): Homolog of NCBI NO: 15241275 NR Description: ids4-like protein
  misc_feature (1)..(144): Homolog of NCBI NO: 37533962 NR Description: hypothetical protein [Oryza sativa (japonica
  misc_feature (14)..(180): Homolog of NCBI NO: 7489382 NR Description: ids-4 protein - barley
  misc_feature (1)..(154): Homolog of NCBI NO: 15225770 NR Description: unknown protein; protein id: At2g26660.1
  misc_feature (1)..(175): Homolog of NCBI NO: 34897330 NR Description: putative signal transduction protein [Oryza
  misc_feature (1)..(180): Homolog of NCBI NO: 18417630 NR Description: ids-4 protein - like
  misc_feature (1)..(180): Homolog of NCBI NO: 11358467 NR Description: ids-4 protein-like - Arabidopsis thaliana
MDIRRDLVTIHGEMVLLKNYSSLNFAGLVKILKKYDKRTGGLLRLPFTQLVLHQPFFTTEPLTRLVRECEANLELLFPSEAEVVESSSAVQAHSSSHQHNSPRISAETSSTLGNENLDIYKSTLAAMRAIRGLQKASSTYNPLSFSSLLQNEDDETVTAENSPNSGNKDDSEKEDTGPSH

SEQ ID NO: 43735 - protein, 167 aa, Arabidopsis thaliana
  peptide (1)..(167): Ceres Seq. ID no. 12336327
  misc_feature (1)..(138): Homolog of NCBI NO: 16506648 NR Description: IDS-4-like protein [Castanea sativa]
  misc_feature (1)..(77): Homolog of NCBI NO: 15225414 NR Description: hypothetical protein; protein id: At2g45130.1
  misc_feature (1)..(85): Homolog of NCBI NO: 21592813 NR Description: ids4-like protein [Arabidopsis thaliana]
  misc_feature (1)..(85): Homolog of NCBI NO: 15241275 NR Description: ids4-like protein
  misc_feature (1)..(131): Homolog of NCBI NO: 37533962 NR Description: hypothetical protein [Oryza sativa (japonica
  misc_feature (1)..(167): Homolog of NCBI NO: 7489382 NR Description: ids-4 protein - barley
  misc_feature (1)..(141): Homolog of NCBI NO: 15225770 NR Description: unknown protein; protein id: At2g26660.1
  misc_feature (1)..(162): Homolog of NCBI NO: 34897330 NR Description: putative signal transduction protein [Oryza
  misc_feature (1)..(167): Homolog of NCBI NO: 18417630 NR Description: ids-4 protein - like
  misc_feature (1)..(167): Homolog of NCBI NO: 11358467 NR Description: ids-4 protein-like - Arabidopsis thaliana
MVLLKNYSSLNFAGLVKILKKYDKRTGGLLRLPFTQLVLHQPFFTTEPLTRLVRECEANLELLFPSEAEVVESSSAVQAHSSSHQHNSPRISAETSSTLGNENLDIYKSTLAAMRAIRGLQKASSTYNPLSFSSLLQNEDDETVTAENSPNSGNKDDSEKEDTGPSH

SEQ ID NO: 43736 - DNA, 1851 bp, Arabidopsis thaliana
  misc_feature (1)..(1851): Ceres Seq. ID no. 13491315
  misc_feature: MA Experiment ID: 108434 Result: Down-regulated in Transcription
  misc_feature: MA Experiment 108434 PARAMETER Experiment Name: At_Root_Tips_cDNA_P Parameter: Tissue Value: Root Tips
  misc_feature: MA Experiment ID: 108488 Result: Down-regulated in Transcription
  misc_feature: MA Experiment ID: 108489 Result: Up-regulated in Transcription
  misc_feature: MA Experiment ID: 108573 Result: Up-regulated in Transcription
  misc_feature: MA Experiment 108573 PARAMETER Experiment Name: At_Drought_cDNA_P Parameter: Timepoint (hr) Value: 6
  misc_feature: MA Experiment 108573 PARAMETER Experiment Name: At_Drought_cDNA_P Parameter: Tissue Value: Aerial
  misc_feature: MA Experiment 108573 PARAMETER Experiment Name: At_Drought_cDNA_P Parameter: Treatment Value: Drought vs. No Drought
  misc_feature: MA Experiment ID: 108574 Result: Up-regulated in Transcription
  misc_feature: MA Experiment 108574 PARAMETER Experiment Name: At_Wounding__cDNA_P Parameter: Timepoint (hr) Value: 1
  misc_feature: MA Experiment 108574 PARAMETER Experiment Name: At_Wounding__cDNA_P Parameter: Tissue Value: Aerial
  misc_feature: MA Experiment 108574 PARAMETER Experiment Name: At_Wounding__cDNA_P Parameter: Treatment Value: Wounding vs. No Wounding
  misc_feature: MA Experiment ID: 108585 Result: Up-regulated in Transcription
  misc_feature: MA Experiment 108585 PARAMETER Experiment Name: At_5mM_NaNP_cDNA_P Parameter: Timepoint (hr) Value: 6
  misc_feature: MA Experiment 108585 PARAMETER Experiment Name: At_5mM_NaNP_cDNA_P Parameter: Tissue Value: Aerial
  misc_feature: MA Experiment 108585 PARAMETER Experiment Name: At_5mM_NaNP_cDNA_P Parameter: Treatment Value: null
  misc_feature: MA Experiment ID: 108595 Result: Up-regulated in Transcription
  misc_feature: MA Experiment 108595 PARAMETER Experiment Name: At_Ler-pi_Ovule_cDNA_P Parameter: Plant Line Value: null
  misc_feature: MA Experiment ID: 108668 Result: Up-regulated in Transcription
  misc_feature: MA Experiment 108668 PARAMETER Experiment Name: At_2mM_SA_cDNA_P Parameter: Plant Line Value: WS
  misc_feature: MA Experiment 108668 PARAMETER Experiment Name: At_2mM_SA_cDNA_P Parameter: Timepoint (hr) Value: 6
  misc_feature: MA Experiment 108668 PARAMETER Experiment Name: At_2mM_SA_cDNA_P Parameter: Treatment Value: 2mM SA vs. No Treatment
  misc_feature: MA Experiment ID: 20000090 Result: Down-regulated in Transcription
  misc_feature: MA Experiment ID: 20000495 Result: Down-regulated in Transcription
  misc_feature: MA Experiment 20000495 PARAMETER Experiment Name: At_Guard_Cells_P Parameter: Harvest Date Value: 8/2/2002
  misc_feature: MA Experiment 20000495 PARAMETER Experiment Name: At_Guard_Cells_P Parameter: Organism Value: A. thaliana
  misc_feature: MA Experiment 20000495 PARAMETER Experiment Name: At_Guard_Cells_P Parameter: Tissue Value: Guard Cells vs. Leaves
  misc_feature: MA Experiment ID: 20001905 Result: Up-regulated in Transcription
  misc_feature: MA Experiment 20001905 PARAMETER Experiment Name: At_Drought_Reproduction_P Parameter: Age (day) Value: 40
  misc_feature: MA Experiment 20001905 PARAMETER Experiment Name: At_Drought_Reproduction_P Parameter: Organism Value: A. thaliana
  misc_feature: MA Experiment 20001905 PARAMETER Experiment Name: At_Drought_Reproduction_P Parameter: Plant Line Value: WS
  misc_feature: MA Experiment 20001905 PARAMETER Experiment Name: At_Drought_Reproduction_P Parameter: Timepoint (day) Value: 10
  misc_feature: MA Experiment 20001905 PARAMETER Experiment Name: At_Drought_Reproduction_P Parameter: Tissue Value: Rosettes
  misc_feature: MA Experiment 20001905 PARAMETER Experiment Name: At_Drought_Reproduction_P Parameter: Treatment Value: Drought vs. No Drought
  misc_feature: MA Experiment ID: 20001910 Result: Up-regulated in Transcription
  misc_feature: MA Experiment 20001910 PARAMETER Experiment Name: At_Drought_Reproduction_P Parameter: Age (day) Value: 37
  misc_feature: MA Experiment 20001910 PARAMETER Experiment Name: At_Drought_Reproduction_P Parameter: Organism Value: A. thaliana
  misc_feature: MA Experiment 20001910 PARAMETER Experiment Name: At_Drought_Reproduction_P Parameter: Plant Line Value: WS
  misc_feature: MA Experiment 20001910 PARAMETER Experiment Name: At_Drought_Reproduction_P Parameter: Timepoint (day) Value: 7
  misc_feature: MA Experiment 20001910 PARAMETER Experiment Name: At_Drought_Reproduction_P Parameter: Tissue Value: Flowers
  misc_feature: MA Experiment 20001910 PARAMETER Experiment Name: At_Drought_Reproduction_P Parameter: Treatment Value: Drought vs. No Drought
ggggtcatacaataaaaattgtgtttcttttttgccctaaaccaaaaatttcatctctcttttccctcttcccgtctctatctctctgagaagcgttttttcggtggagagaaagagagatttgactctgtcaagttattagtacattgaggtcgggctgtcaaaacttgacagcccgagtttgaagcttccaggactctttttctattaatgagattggtatgctagatttggagtgtattggattagattgtggcgatcatgggttctttgtctgggatcattcaacggccacttgttgctgctgctgctgtgattacagcttctgtgtctgcagatgtctctgagaggttctcatctcttagatcactagttcgaggttctgaatcagagcagattgctccttcagtgtctggtttagttcaggaagaaaggtccttgtgggtttctcaagtctcggcctccaagcttgcagatttatcttttgtgtcgaggatttgtgttcctgtaccaaatgttgatctcctagcttctaatcctagctgtagtctcgctacttctgttacttctctgtccgctcttcgtagtgtttatcagtctgcagagttggctaaagcatcgaaaccggttgcattcacaatcggtgcctcacttgtggttcctgatatttcctacagatggcatttacctgagcctagtgcagtcgatatgtctggttcttcgagttgtgtgtctgaaaagaatagaactgttgtggttttgcttggatggcttggatcaaagcagaagcatctgaagaaatatgctgattggtacacttcaaagggttaccatgtcattacatttactcttccgatgaatgagattatgagttatcaagttggagggaaagcagagaagaacatcgagtcgctggttaatcacttggctgattggttggatgaagagcaaaagaaaaatctcgtctttcacaccttcagcaacaccgggtggttaacatatggagccattttggaaaagtttcagaagcaagattcatcattgatgggaagagttaaaggttgcatagtggactcagctcctgttgctgctgcagatcctacggtatgggcatcaggtttctcagctgcgttcttgaagaaaagcagtgtagccactaaaggatctgcgagctcatcatatgagtcaaacggtataaacatctcccagcctaaacccgctgcaacagaaacagctttgcttttggttcttgaaaagttctttgcggtgattctaaatcttcccaaagtaaacaggagacttgccgatgttcttgacacattatcaacagcacaaccaagttgtccacagttatacatttacagctctgcagacagagttataccggtggaacaagttgaatcattcattgtagagcagaggaaagcaggacatgaggtccgtgcttgcaacttcatatcttcacctcatgtagaccatttccggagtaacccagaactgtatacagctgagctcaaccatttcatgaacaactttgtcctttcttgctgccaccattcttcatagcgacttccacaagtgttgttgttgctaaccatttttggggtccttttaactcttatacaagaaagagaaaaatagttactgattgatgattctttttggtttggattggtttatagattcaaattcattattcctttgtaaattgttggatattgtacatttaggagaatgaagattcaagaaagtgacgtccttgtcctttgtagtggagatttggatcttatggttgtcttttgttatttgttcaaagagggttgttaagaacccaatcataaagtttttgcc

SEQ ID NO: 43737 - protein, 434 aa, Arabidopsis thaliana
  peptide (1)..(434): Ceres Seq. ID no. 13491316
  misc_feature (161)..(425): Pfam Name: Eukaryotic protein of unknown function (DUF829) Pfam Description: Eukaryotic protein of unknown function (DUF829)
  misc_feature (360)..(426): Homolog of NCBI NO: 34870283 NR Description: similar to RIKEN cDNA 1110038M16 [Rattus
  misc_feature (135)..(274): Homolog of NCBI NO: 34870283 NR Description: similar to RIKEN cDNA 1110038M16 [Rattus
  misc_feature (352)..(426): Homolog of NCBI NO: 40555886 NR Description: Hypothetical protein FLJ22353 [Homo sapiens]
  misc_feature (135)..(274): Homolog of NCBI NO: 40555886 NR Description: Hypothetical protein FLJ22353 [Homo sapiens]
  misc_feature (325)..(426): Homolog of NCBI NO: 13375774 NR Description: hypothetical protein FLJ22353 [Homo sapiens]
  misc_feature (135)..(274): Homolog of NCBI NO: 13375774 NR Description: hypothetical protein FLJ22353 [Homo sapiens]
  misc_feature (145)..(280): Homolog of NCBI NO: 25411844 NR Description: probable integral membrane protein
  misc_feature (145)..(422): Homolog of NCBI NO: 21536700 NR Description: unknown [Arabidopsis thaliana]
  misc_feature (145)..(422): Homolog of NCBI NO: 18398681 NR Description: expressed protein [Arabidopsis thaliana]
  misc_feature (1)..(434): Homolog of NCBI NO: 18402437 NR Description: expressed protein [Arabidopsis thaliana]
MGSLSGIIQRPLVAAAAVITASVSADVSERFSSLRSLVRGSESEQIAPSVSGLVQEERSLWVSQVSASKLADLSFVSRICVPVPNVDLLASNPSCSLATSVTSLSALRSVYQSAELAKASKPVAFTIGASLVVPDISYRWHLPEPSAVDMSGSSSCVSEKNRTVVVLLGWLGSKQKHLKKYADWYTSKGYHVITFTLPMNEIMSYQVGGKAEKNIESLVNHLADWLDEEQKKNLVFHTFSNTGWLTYGAILEKFQKQDSSLMGRVKGCIVDSAPVAAADPTVWASGFSAAFLKKSSVATKGSASSSYESNGINISQPKPAATETALLLVLEKFFAVILNLPKVNRRLADVLDTLSTAQPSCPQLYIYSSADRVIPVEQVESFIVEQRKAGHEVRACNFISSPHVDHFRSNPELYTAELNHFMNNFVLSCCHHSS

SEQ ID NO: 43738 - protein, 285 aa, Arabidopsis thaliana
  peptide (1)..(285): Ceres Seq. ID no. 13491317
  misc_feature (12)..(276): Pfam Name: Eukaryotic protein of unknown function (DUF829) Pfam Description: Eukaryotic protein of unknown function (DUF829)
  misc_feature (211)..(277): Homolog of NCBI NO: 34870283 NR Description: similar to RIKEN cDNA 1110038M16 [Rattus
  misc_feature (1)..(125): Homolog of NCBI NO: 34870283 NR Description: similar to RIKEN cDNA 1110038M16 [Rattus
  misc_feature (203)..(277): Homolog of NCBI NO: 40555886 NR Description: Hypothetical protein FLJ22353 [Homo sapiens]
  misc_feature (1)..(125): Homolog of NCBI NO: 40555886 NR Description: Hypothetical protein FLJ22353 [Homo sapiens]
  misc_feature (176)..(277): Homolog of NCBI NO: 13375774 NR Description: hypothetical protein FLJ22353 [Homo sapiens]
  misc_feature (1)..(125): Homolog of NCBI NO: 13375774 NR Description: hypothetical protein FLJ22353 [Homo sapiens]
  misc_feature (1)..(131): Homolog of NCBI NO: 25411844 NR Description: probable integral membrane protein
  misc_feature (1)..(273): Homolog of NCBI NO: 21536700 NR Description: unknown [Arabidopsis thaliana]
  misc_feature (1)..(273): Homolog of NCBI NO: 18398681 NR Description: expressed protein [Arabidopsis thaliana]
  misc_feature (1)..(285): Homolog of NCBI NO: 18402437 NR Description: expressed protein [Arabidopsis thaliana]
MSGSSSCVSEKNRTVVVLLGWLGSKQKHLKKYADWYTSKGYHVITFTLPMNEIMSYQVGGKAEKNIESLVNHLADWLDEEQKKNLVFHTFSNTGWLTYGAILEKFQKQDSSLMGRVKGCIVDSAPVAAADPTVWASGFSAAFLKKSSVATKGSASSSYESNGINISQPKPAATETALLLVLEKFFAVILNLPKVNRRLADVLDTLSTAQPSCPQLYIYSSADRVIPVEQVESFIVEQRKAGHEVRACNFISSPHVDHFRSNPELYTAELNHFMNNFVLSCCHHSS

SEQ ID NO: 43739 - protein, 236 aa, Arabidopsis thaliana
  peptide (1)..(236): Ceres Seq. ID no. 13491318
  misc_feature (1)..(227): Pfam Name: Eukaryotic protein of unknown function (DUF829) Pfam Description: Eukaryotic protein of unknown function (DUF829)
  misc_feature (162)..(228): Homolog of NCBI NO: 34870283 NR Description: similar to RIKEN cDNA 1110038M16 [Rattus
  misc_feature (1)..(76): Homolog of NCBI NO: 34870283 NR Description: similar to RIKEN cDNA 1110038M16 [Rattus
  misc_feature (154)..(228): Homolog of NCBI NO: 40555886 NR Description: Hypothetical protein FLJ22353 [Homo sapiens]
  misc_feature (1)..(76): Homolog of NCBI NO: 40555886 NR Description: Hypothetical protein FLJ22353 [Homo sapiens]
  misc_feature (127)..(228): Homolog of NCBI NO: 13375774 NR Description: hypothetical protein FLJ22353 [Homo sapiens]
  misc_feature (1)..(76): Homolog of NCBI NO: 13375774 NR Description: hypothetical protein FLJ22353 [Homo sapiens]
  misc_feature (1)..(82): Homolog of NCBI NO: 25411844 NR Description: probable integral membrane protein
  misc_feature (1)..(224): Homolog of NCBI NO: 21536700 NR Description: unknown [Arabidopsis thaliana]
  misc_feature (1)..(224): Homolog of NCBI NO: 18398681 NR Description: expressed protein [Arabidopsis thaliana]
  misc_feature (1)..(236): Homolog of NCBI NO: 18402437 NR Description: expressed protein [Arabidopsis thaliana]
MNEIMSYQVGGKAEKNIESLVNHLADWLDEEQKKNLVFHTFSNTGWLTYGAILEKFQKQDSSLMGRVKGCIVDSAPVAAADPTVWASGFSAAFLKKSSVATKGSASSSYESNGINISQPKPAATETALLLVLEKFFAVILNLPKVNRRLADVLDTLSTAQPSCPQLYIYSSADRVIPVEQVESFIVEQRKAGHEVRACNFISSPHVDHFRSNPELYTAELNHFMNNFVLSCCHHSS

SEQ ID NO: 43740 - DNA, 1161 bp, Arabidopsis thaliana
  misc_feature (1)..(1161): Ceres Seq. ID no. 12331115
  misc_feature: MA Experiment ID: 108463 Result: Down-regulated in Transcription
  misc_feature: MA Experiment 108463 PARAMETER Experiment Name: At_Germinating_Seeds_cDNA_P Parameter: Age (day) Value: 3 vs. 0
  misc_feature: MA Experiment 108463 PARAMETER Experiment Name: At_Germinating_Seeds_cDNA_P Parameter: Tissue Value: Germinating Seeds
ccagcttgacgatgtcgttgacggagctagacgacggactggttcgcaggatggccatgggccagtcttctctgattttggagggaagatacattcggtgggtttccataggactgatgatctattggtcacatccagcgaagatgattcacttcgcctcttcgatatcgccaacgctaaacagctgaagattacataccataagaaacatggcaccgatcgtgtatgctttacccatcatcctagctctctaatttgctcttctcgatacaatttggagtccactggtgaatccttgagatatctctcaatgtatgataatcggatcctacgctactttaaagggcataaagacagggttgtatcactttgtatgtctcctataaatgatagcttcatgtctggttctctcgaccgaagtgttagactctgggatcttcgtgtaaatgcctgccagggaattctacatctacgtggtagacctgcagttgcgtatgaccaacaaggccttgtgtttgcaattgcaatggaaggaggtgctgttaaattatttgattccaggtgttatgacaagggtccctttgacacatttctggtgggtggggatactgctgaggttaacgatataaaattcagcaacgatgggaaatccatgctcctaacgactacaaataacaatatctacgttcttgatgcatatcgtggagagaagaaatgtggttttagtttggagccttcacagggtacacccatagaggccaccttcacaccagatggcaagtatgttctgtcaggttcaggtgatggaaccttacatgcgtggaacatcgagaacccatctgaggtggcgaggtgggagaacaacataggagtagtgtcgtgtctgaaatgggcaccacgtagagccatgttcgttgctgcttctacggttctcacattctggatcccaaacgacggtgaatcaccagcccccgccgatcctcctaccgatcaacaacagtgacgacatatatgtttccattatgcacttgtgtatcgttttttaatgttgacaattagaaaaatttggaagcagtagtatgttaatcaaatttagagtttatgaatttgagtctagatggttacaatatgttttctttaatgactatttactcttatttt

SEQ ID NO: 43741 - protein, 333 aa, Arabidopsis thaliana
  peptide (1)..(333): Ceres Seq. ID no. 12331116
  misc_feature (6)..(316): Homolog of NCBI NO: 34877546 NR Description: similar to CG17293-PA [Rattus norvegicus]
  misc_feature (22)..(322): Homolog of NCBI NO: 29727992 NR Description: similar to CG17293-PA [Homo sapiens]
  misc_feature (22)..(316): Homolog of NCBI NO: 21618713 NR Description: RIKEN cDNA 9430077D24 gene [Mus musculus]
  misc_feature (22)..(320): Homolog of NCBI NO: 19920938 NR Description: CG17293-PA [Drosophila melanogaster]
  misc_feature (22)..(316): Homolog of NCBI NO: 28277563 NR Description: Similar to RIKEN cDNA 9430077D24 gene [Danio
  misc_feature (20)..(317): Homolog of NCBI NO: 28564824 NR Description: OSJNBb0005G07.13 [Oryza sativa (japonica
  misc_feature (20)..(325): Homolog of NCBI NO: 21536827 NR Description: WD repeat protein-like [Arabidopsis thaliana]
  misc_feature (20)..(325): Homolog of NCBI NO: 30698206 NR Description: transducin / WD-40 repeat protein family
  misc_feature (20)..(325): Homolog of NCBI NO: 18425050 NR Description: WD repeat protein-like
  misc_feature (2)..(333): Homolog of NCBI NO: 15241434 NR Description: putative protein
QLDDVVDGARRRTGSQDGHGPVFSDFGGKIHSVGFHRTDDLLVTSSEDDSLRLFDIANAKQLKITYHKKHGTDRVCFTHHPSSLICSSRYNLESTGESLRYLSMYDNRILRYFKGHKDRVVSLCMSPINDSFMSGSLDRSVRLWDLRVNACQGILHLRGRPAVAYDQQGLVFAIAMEGGAVKLFDSRCYDKGPFDTFLVGGDTAEVNDIKFSNDGKSMLLTTTNNNIYVLDAYRGEKKCGFSLEPSQGTPIEATFTPDGKYVLSGSGDGTLHAWNIENPSEVARWENNIGVVSCLKWAPRRAMFVAASTVLTFWIPNDGESPAPADPPTDQQQ

SEQ ID NO: 43742 - protein, 230 aa, Arabidopsis thaliana
  peptide (1)..(230): Ceres Seq. ID no. 12331117
  misc_feature (1)..(213): Homolog of NCBI NO: 34877546 NR Description: similar to CG17293-PA [Rattus norvegicus]
  misc_feature (1)..(219): Homolog of NCBI NO: 29727992 NR Description: similar to CG17293-PA [Homo sapiens]
  misc_feature (1)..(213): Homolog of NCBI NO: 21618713 NR Description: RIKEN cDNA 9430077D24 gene [Mus musculus]
  misc_feature (1)..(217): Homolog of NCBI NO: 19920938 NR Description: CG17293-PA [Drosophila melanogaster]
  misc_feature (1)..(213): Homolog of NCBI NO: 28277563 NR Description: Similar to RIKEN cDNA 9430077D24 gene [Danio
  misc_feature (1)..(214): Homolog of NCBI NO: 28564824 NR Description: OSJNBb0005G07.13 [Oryza sativa (japonica
  misc_feature (1)..(222): Homolog of NCBI NO: 21536827 NR Description: WD repeat protein-like [Arabidopsis thaliana]
  misc_feature (1)..(222): Homolog of NCBI NO: 30698206 NR Description: transducin / WD-40 repeat protein family
  misc_feature (1)..(222): Homolog of NCBI NO: 18425050 NR Description: WD repeat protein-like
  misc_feature (1)..(230): Homolog of NCBI NO: 15241434 NR Description: putative protein
MYDNRILRYFKGHKDRVVSLCMSPINDSFMSGSLDRSVRLWDLRVNACQGILHLRGRPAVAYDQQGLVFAIAMEGGAVKLFDSRCYDKGPFDTFLVGGDTAEVNDIKFSNDGKSMLLTTTNNNIYVLDAYRGEKKCGFSLEPSQGTPIEATFTPDGKYVLSGSGDGTLHAWNIENPSEVARWENNIGVVSCLKWAPRRAMFVAASTVLTFWIPNDGESPAPADPPTDQQQ

SEQ ID NO: 43743 - protein, 209 aa, Arabidopsis thaliana
  peptide (1)..(209): Ceres Seq. ID no. 12331118
  misc_feature (1)..(192): Homolog of NCBI NO: 34877546 NR Description: similar to CG17293-PA [Rattus norvegicus]
  misc_feature (1)..(198): Homolog of NCBI NO: 29727992 NR Description: similar to CG17293-PA [Homo sapiens]
  misc_feature (1)..(192): Homolog of NCBI NO: 21618713 NR Description: RIKEN cDNA 9430077D24 gene [Mus musculus]
  misc_feature (1)..(196): Homolog of NCBI NO: 19920938 NR Description: CG17293-PA [Drosophila melanogaster]
  misc_feature (1)..(192): Homolog of NCBI NO: 28277563 NR Description: Similar to RIKEN cDNA 9430077D24 gene [Danio
  misc_feature (1)..(193): Homolog of NCBI NO: 28564824 NR Description: OSJNBb0005G07.13 [Oryza sativa (japonica
  misc_feature (1)..(201): Homolog of NCBI NO: 21536827 NR Description: WD repeat protein-like [Arabidopsis thaliana]
  misc_feature (1)..(201): Homolog of NCBI NO: 30698206 NR Description: transducin / WD-40 repeat protein family
  misc_feature (1)..(201): Homolog of NCBI NO: 18425050 NR Description: WD repeat protein-like
  misc_feature (1)..(209): Homolog of NCBI NO: 15241434 NR Description: putative protein
MSPINDSFMSGSLDRSVRLWDLRVNACQGILHLRGRPAVAYDQQGLVFAIAMEGGAVKLFDSRCYDKGPFDTFLVGGDTAEVNDIKFSNDGKSMLLTTTNNNIYVLDAYRGEKKCGFSLEPSQGTPIEATFTPDGKYVLSGSGDGTLHAWNIENPSEVARWENNIGVVSCLKWAPRRAMFVAASTVLTFWIPNDGESPAPADPPTDQQQ

SEQ ID NO: 43744 - DNA, 2389 bp, Arabidopsis thaliana
  misc_feature (1)..(2389): Ceres Seq. ID no. 13591580
  misc_feature: MA Experiment ID: 108434 Result: Up-regulated in Transcription
  misc_feature: MA Experiment 108434 PARAMETER Experiment Name: At_Root_Tips_cDNA_P Parameter: Tissue Value: Root Tips
  misc_feature: MA Experiment ID: 108463 Result: Down-regulated in Transcription
  misc_feature: MA Experiment 108463 PARAMETER Experiment Name: At_Germinating_Seeds_cDNA_P Parameter: Age (day) Value: 3 vs. 0
  misc_feature: MA Experiment 108463 PARAMETER Experiment Name: At_Germinating_Seeds_cDNA_P Parameter: Tissue Value: Germinating Seeds
  misc_feature: MA Experiment ID: 108469 Result: Up-regulated in Transcription
  misc_feature: MA Experiment ID: 108573 Result: Down-regulated in Transcription
  misc_feature: MA Experiment 108573 PARAMETER Experiment Name: At_Drought_cDNA_P Parameter: Timepoint (hr) Value: 6
  misc_feature: MA Experiment 108573 PARAMETER Experiment Name: At_Drought_cDNA_P Parameter: Tissue Value: Aerial
  misc_feature: MA Experiment 108573 PARAMETER Experiment Name: At_Drought_cDNA_P Parameter: Treatment Value: Drought vs. No Drought
  misc_feature: MA Experiment ID: 108576 Result: Up-regulated in Transcription
  misc_feature: MA Experiment 108576 PARAMETER Experiment Name: At_42deg_Heat_cDNA_P Parameter: Temperature (deg C) Value: 42 vs. 22
  misc_feature: MA Experiment 108576 PARAMETER Experiment Name: At_42deg_Heat_cDNA_P Parameter: Timepoint (hr) Value: 1
  misc_feature: MA Experiment 108576 PARAMETER Experiment Name: At_42deg_Heat_cDNA_P Parameter: Tissue Value: Aerial
  misc_feature: MA Experiment ID: 108577 Result: Up-regulated in Transcription
  misc_feature: MA Experiment 108577 PARAMETER Experiment Name: At_42deg_Heat_cDNA_P Parameter: Temperature (deg C) Value: 42 vs. 22
  misc_feature: MA Experiment 108577 PARAMETER Experiment Name: At_42deg_Heat_cDNA_P Parameter: Timepoint (hr) Value: 6
  misc_feature: MA Experiment 108577 PARAMETER Experiment Name: At_42deg_Heat_cDNA_P Parameter: Tissue Value: Aerial
  misc_feature: MA Experiment ID: 108595 Result: Up-regulated in Transcription
  misc_feature: MA Experiment 108595 PARAMETER Experiment Name: At_Ler-pi_Ovule_cDNA_P Parameter: Plant Line Value: null
  misc_feature: MA Experiment ID: 108668 Result: Up-regulated in Transcription
  misc_feature: MA Experiment 108668 PARAMETER Experiment Name: At_2mM_SA_cDNA_P Parameter: Plant Line Value: WS
  misc_feature: MA Experiment 108668 PARAMETER Experiment Name: At_2mM_SA_cDNA_P Parameter: Timepoint (hr) Value: 6
  misc_feature: MA Experiment 108668 PARAMETER Experiment Name: At_2mM_SA_cDNA_P Parameter: Treatment Value: 2mM SA vs. No Treatment
  misc_feature: MA Experiment ID: 20000086 Result: Up-regulated in Transcription
  misc_feature: MA Experiment 20000086 PARAMETER Experiment Name: At_100uM_ABA_Mutants_cDNA_P Parameter: Plant Line Value: CS22
  misc_feature: MA Experiment 20000086 PARAMETER Experiment Name: At_100uM_ABA_Mutants_cDNA_P Parameter: Timepoint (hr) Value: 6
  misc_feature: MA Experiment 20000086 PARAMETER Experiment Name: At_100uM_ABA_Mutants_cDNA_P Parameter: Tissue Value: Aerial
  misc_feature: MA Experiment 20000086 PARAMETER Experiment Name: At_100uM_ABA_Mutants_cDNA_P Parameter: Treatment Value: 100uM ABA vs. No Treatment
  misc_feature: MA Experiment ID: 20000089 Result: Up-regulated in Transcription
  misc_feature: MA Experiment ID: 20000090 Result: Up-regulated in Transcription
  misc_feature: MA Experiment ID: 20000093 Result: Up-regulated in Transcription
  misc_feature: MA Experiment 20000093 PARAMETER Experiment Name: At_42deg_Heat_cDNA_P Parameter: Temperature (deg C) Value: 42 vs. 22
  misc_feature: MA Experiment 20000093 PARAMETER Experiment Name: At_42deg_Heat_cDNA_P Parameter: Timepoint (hr) Value: 0.5
  misc_feature: MA Experiment 20000093 PARAMETER Experiment Name: At_42deg_Heat_cDNA_P Parameter: Tissue Value: Aerial
  misc_feature: MA Experiment ID: 20000111 Result: Up-regulated in Transcription
  misc_feature: MA Experiment 20000111 PARAMETER Experiment Name: At_42deg_Heat_cDNA_P Parameter: Temperature (deg C) Value: 42 vs. 22
  misc_feature: MA Experiment 20000111 PARAMETER Experiment Name: At_42deg_Heat_cDNA_P Parameter: Timepoint (hr) Value: 6
  misc_feature: MA Experiment 20000111 PARAMETER Experiment Name: At_42deg_Heat_cDNA_P Parameter: Tissue Value: Aerial
  misc_feature: MA Experiment ID: 20000112 Result: Up-regulated in Transcription
  misc_feature: MA Experiment 20000112 PARAMETER Experiment Name: At_42deg_Heat_cDNA_P Parameter: Temperature (deg C) Value: 42 vs. 22
  misc_feature: MA Experiment 20000112 PARAMETER Experiment Name: At_42deg_Heat_cDNA_P Parameter: Timepoint (hr) Value: 2
  misc_feature: MA Experiment 20000112 PARAMETER Experiment Name: At_42deg_Heat_cDNA_P Parameter: Tissue Value: Aerial
  misc_feature: MA Experiment ID: 20000171 Result: Up-regulated in Transcription
  misc_feature: MA Experiment 20000171 PARAMETER Experiment Name: At_42deg_Heat_P Parameter: Age (day) Value: 14
  misc_feature: MA Experiment 20000171 PARAMETER Experiment Name: At_42deg_Heat_P Parameter: Organism Value: A. thaliana
  misc_feature: MA Experiment 20000171 PARAMETER Experiment Name: At_42deg_Heat_P Parameter: Plant Line Value: WS
  misc_feature: MA Experiment 20000171 PARAMETER Experiment Name: At_42deg_Heat_P Parameter: Temperature (deg C) Value: 42 vs. 22
  misc_feature: MA Experiment 20000171 PARAMETER Experiment Name: At_42deg_Heat_P Parameter: Timepoint (hr) Value: 1
  misc_feature: MA Experiment 20000171 PARAMETER Experiment Name: At_42deg_Heat_P Parameter: Tissue Value: Aerial
  misc_feature: MA Experiment ID: 20000173 Result: Up-regulated in Transcription
  misc_feature: MA Experiment 20000173 PARAMETER Experiment Name: At_42deg_Heat_P Parameter: Age (day) Value: 14
  misc_feature: MA Experiment 20000173 PARAMETER Experiment Name: At_42deg_Heat_P Parameter: Organism Value: A. thaliana
  misc_feature: MA Experiment 20000173 PARAMETER Experiment Name: At_42deg_Heat_P Parameter: Plant Line Value: WS
  misc_feature: MA Experiment 20000173 PARAMETER Experiment Name: At_42deg_Heat_P Parameter: Temperature (deg C) Value: 42 vs. 22
  misc_feature: MA Experiment 20000173 PARAMETER Experiment Name: At_42deg_Heat_P Parameter: Timepoint (hr) Value: 6
  misc_feature: MA Experiment 20000173 PARAMETER Experiment Name: At_42deg_Heat_P Parameter: Tissue Value: Aerial
  misc_feature: MA Experiment ID: 20000179 Result: Up-regulated in Transcription
  misc_feature: MA Experiment 20000179 PARAMETER Experiment Name: At_Germinating_Seeds_P Parameter: Age (hr) Value: 6 vs. 0
  misc_feature: MA Experiment 20000179 PARAMETER Experiment Name: At_Germinating_Seeds_P Parameter: Tissue Value: Germinating Seeds
  misc_feature: MA Experiment ID: 20000182 Result: Up-regulated in Transcription
  misc_feature: MA Experiment 20000182 PARAMETER Experiment Name: At_2mM_SA_P Parameter: Age (day) Value: 14
  misc_feature: MA Experiment 20000182 PARAMETER Experiment Name: At_2mM_SA_P Parameter: Organism Value: A. thaliana
  misc_feature: MA Experiment 20000182 PARAMETER Experiment Name: At_2mM_SA_P Parameter: Plant Line Value: WS
  misc_feature: MA Experiment 20000182 PARAMETER Experiment Name: At_2mM_SA_P Parameter: Timepoint (hr) Value: 6
  misc_feature: MA Experiment 20000182 PARAMETER Experiment Name: At_2mM_SA_P Parameter: Tissue Value: Aerial
  misc_feature: MA Experiment 20000182 PARAMETER Experiment Name: At_2mM_SA_P Parameter: Treatment Value: 2mM SA vs. No Treatment
  misc_feature: MA Experiment ID: 20000224 Result: Up-regulated in Transcription
  misc_feature: MA Experiment ID: 20000227 Result: Up-regulated in Transcription
  misc_feature: MA Experiment 20000227 PARAMETER Experiment Name: At_Root-Tips-vs-Tops_P Parameter: Tissue Value: Root Tips vs. Root Tops
  misc_feature: MA Experiment ID: 20000234 Result: Up-regulated in Transcription
  misc_feature: MA Experiment 20000234 PARAMETER Experiment Name: At_Siliques_P Parameter: Age (day) Value: 21
  misc_feature: MA Experiment 20000234 PARAMETER Experiment Name: At_Siliques_P Parameter: Organism Value: A. thaliana
  misc_feature: MA Experiment 20000234 PARAMETER Experiment Name: At_Siliques_P Parameter: Plant Line Value: WS
  misc_feature: MA Experiment 20000234 PARAMETER Experiment Name: At_Siliques_P Parameter: Tissue Value: Less Than 5mm Siliques vs. Whole Plant
  misc_feature: MA Experiment ID: 20000235 Result: Up-regulated in Transcription
  misc_feature: MA Experiment 20000235 PARAMETER Experiment Name: At_Siliques_P Parameter: Age (day) Value: 21
  misc_feature: MA Experiment 20000235 PARAMETER Experiment Name: At_Siliques_P Parameter: Organism Value: A. thaliana
  misc_feature: MA Experiment 20000235 PARAMETER Experiment Name: At_Siliques_P Parameter: Plant Line Value: WS
  misc_feature: MA Experiment 20000235 PARAMETER Experiment Name: At_Siliques_P Parameter: Tissue Value: 5-10mm Siliques vs. Whole Plant
  misc_feature: MA Experiment ID: 20000495 Result: Up-regulated in Transcription
  misc_feature: MA Experiment 20000495 PARAMETER Experiment Name: At_Guard_Cells_P Parameter: Harvest Date Value: 8/2/2002
  misc_feature: MA Experiment 20000495 PARAMETER Experiment Name: At_Guard_Cells_P Parameter: Organism Value: A. thaliana
  misc_feature: MA Experiment 20000495 PARAMETER Experiment Name: At_Guard_Cells_P Parameter: Tissue Value: Guard Cells vs. Leaves
  misc_feature: MA Experiment ID: 20000794 Result: Down-regulated in Transcription
  misc_feature: MA Experiment 20000794 PARAMETER Experiment Name: At_Petals_P Parameter: Age (day) Value: 23-25 days
  misc_feature: MA Experiment 20000794 PARAMETER Experiment Name: At_Petals_P Parameter: Plant Line Value: WS
  misc_feature: MA Experiment 20000794 PARAMETER Experiment Name: At_Petals_P Parameter: Tissue Value: Petals vs. Whole plant
  misc_feature: MA Experiment ID: 20001450 Result: Down-regulated in Transcription
  misc_feature: MA Experiment 20001450 PARAMETER Experiment Name: At_Far-red-induction_P Parameter: Age (day) Value: 7
  misc_feature: MA Experiment 20001450 PARAMETER Experiment Name: At_Far-red-induction_P Parameter: Light Value: Far-red vs. White
  misc_feature: MA Experiment 20001450 PARAMETER Experiment Name: At_Far-red-induction_P Parameter: Organism Value: A. thaliana
  misc_feature: MA Experiment 20001450 PARAMETER Experiment Name: At_Far-red-induction_P Parameter: Plant Line Value: Columbia
  misc_feature: MA Experiment 20001450 PARAMETER Experiment Name: At_Far-red-induction_P Parameter: Timepoint (hr) Value: 8
  misc_feature: MA Experiment 20001450 PARAMETER Experiment Name: At_Far-red-induction_P Parameter: Tissue Value: Whole Plant
  misc_feature: MA Experiment ID: 20001556 Result: Up-regulated in Transcription
  misc_feature: MA Experiment 20001556 PARAMETER Experiment Name: At_Drought_Soil_Dry_P Parameter: Age (day) Value: 26
  misc_feature: MA Experiment 20001556 PARAMETER Experiment Name: At_Drought_Soil_Dry_P Parameter: Organism Value: A. thaliana
  misc_feature: MA Experiment 20001556 PARAMETER Experiment Name: At_Drought_Soil_Dry_P Parameter: Plant Line Value: WS
  misc_feature: MA Experiment 20001556 PARAMETER Experiment Name: At_Drought_Soil_Dry_P Parameter: Post Timepoint (hr) Value: None
  misc_feature: MA Experiment 20001556 PARAMETER Experiment Name: At_Drought_Soil_Dry_P Parameter: Post-Treatment Value: None
  misc_feature: MA Experiment 20001556 PARAMETER Experiment Name: At_Drought_Soil_Dry_P Parameter: Timepoint (day) Value: 12
  misc_feature: MA Experiment 20001556 PARAMETER Experiment Name: At_Drought_Soil_Dry_P Parameter: Treatment Value: Drought vs. No Drought
  misc_feature: MA Experiment ID: 20001558 Result: Up-regulated in Transcription
  misc_feature: MA Experiment 20001558 PARAMETER Experiment Name: At_Drought_Soil_Dry_P Parameter: Age (day) Value: 27
  misc_feature: MA Experiment 20001558 PARAMETER Experiment Name: At_Drought_Soil_Dry_P Parameter: Organism Value: A. thaliana
  misc_feature: MA Experiment 20001558 PARAMETER Experiment Name: At_Drought_Soil_Dry_P Parameter: Plant Line Value: WS
  misc_feature: MA Experiment 20001558 PARAMETER Experiment Name: At_Drought_Soil_Dry_P Parameter: Post Timepoint (hr) Value: 6
  misc_feature: MA Experiment 20001558 PARAMETER Experiment Name: At_Drought_Soil_Dry_P Parameter: Post-Treatment Value: Re-Water vs. No Drought
  misc_feature: MA Experiment 20001558 PARAMETER Experiment Name: At_Drought_Soil_Dry_P Parameter: Timepoint (day) Value: 13
  misc_feature: MA Experiment 20001558 PARAMETER Experiment Name: At_Drought_Soil_Dry_P Parameter: Treatment Value: Drought vs. No Drought
  misc_feature: MA Experiment ID: 20001560 Result: Up-regulated in Transcription
  misc_feature: MA Experiment 20001560 PARAMETER Experiment Name: At_Drought_Soil_Dry_P Parameter: Age (day) Value: 28
  misc_feature: MA Experiment 20001560 PARAMETER Experiment Name: At_Drought_Soil_Dry_P Parameter: Organism Value: A. thaliana
  misc_feature: MA Experiment 20001560 PARAMETER Experiment Name: At_Drought_Soil_Dry_P Parameter: Plant Line Value: WS
  misc_feature: MA Experiment 20001560 PARAMETER Experiment Name: At_Drought_Soil_Dry_P Parameter: Post Timepoint (hr) Value: None
  misc_feature: MA Experiment 20001560 PARAMETER Experiment Name: At_Drought_Soil_Dry_P Parameter: Post-Treatment Value: None
  misc_feature: MA Experiment 20001560 PARAMETER Experiment Name: At_Drought_Soil_Dry_P Parameter: Timepoint (day) Value: 14
  misc_feature: MA Experiment 20001560 PARAMETER Experiment Name: At_Drought_Soil_Dry_P Parameter: Treatment Value: Drought vs. No Drought
gagttaaatttcttcgtcttccatacaaagcgactacttcaccatcaccttcgggcactggacctatttaagcatcctaacttcttcttcaaagcttraaaaccagaaaacaaaaggaagctctntgttcaaatcaaaaagagagatcgtacgcaaaagtttccgatatggctcgctcgtttggagctaacagtaccgttgtgttggcgatcatcttcttcggatgtttatttgcgttgtcctctgcaatagaagaggctacgaagttaggatcagtgatagggatagatcttggtactacttactcttgtgttggtgtttacaagaatggtcatgtcgaaattattgccaatgaccaaggaaaccgtattacaccttcatgggttggttttactgactctgaaagactcattggtgaggctgctaagaatcaagcagctgttaatccagagaggactgtcttcgacgttaagagattgatcgggcgaaaatttgaggataaggaggttcaaaaggataggaaacttgtaccttaccagattgtgaacaaggatggtaagccatacattcaagtcaagatcaaggatggtgagactaaggttttcagtcctgaggagattagtgctatgattctgactaagatgaaggagacagctgaagcctaccttggaaagaaaatcaaggacgctgttgtcactgttccagcttacttcaatgatgctcaaaggcaagctactaaggatgctggtgttattgctgggctcaatgttgctagaatcattaatgaacctactgctgctgctattgcctatggtcttgataagaagggtggcgagaagaatatccttgtgtttgatcttggtggtggtacttttgatgtcagtgtcttgaccattgataacggagtgtttgaggttctctccacaaatggtgacactcacttgggaggtgaggactttgaccacagggtgatggagtacttcatcaagttgattaagaagaagcaccagaaggacatcagcaaggacaacaaggctcttggtaagctccgaagggaatgtgagagggcaaagagagctctaagtagtcagcaccaagtccgtgtagagattgagtcactctttgatggtgttgatttttctgagccactcaccagagctcgtttcgaggagcttaacaatgatttgttcaggaagaccatgggacctgtgaagaaggccatggatgatgccggtctacagaagagccagatcgatgagattgtccttgttggtggaagcaccaggatcccaaaggttcagcaactgttgaaggacttctttgaaggtaaagagccaaacaagggtgtgaaccccgacgaggctgttgcctatggtgctgctgttcagggtggtattttgagcggagaaggcggtgatgagaccaaagatatccttcttcttgatgttgcgccactcactttgggtatcgagactgtaggaggagtgatgacaaagttgatcccgagaaacacggttattccaaccaagaaatctcaggttttcacaacgtaccaagaccagcagactaccgtctccattcaggtctttgaaggtgaacgaagtctcaccaaggactgcaggctactcgggaaattcgacctcaatggaatcccaccggccccaagaggaacccctcaaatcgaggtcacattcgaagtggacgccaacggtattcttaatgtgaaagcagaggacaaggcgagtggtaaatcagagaagattactatcacaaacgagaagggtcgtctgagccaagaagagattgaccggatggtgaaggaggcagaggagtttgcagaggaagacaagaaggtaaaggagaagatcgacgccaggaatgccctggagacatacgtgtacaacatgaagaaccaagtgaacgacaaggacaagcttgccgacaaattggaaggagatgaaaaggagaagatcgaagcagcgacgaaagaggctttggagtggctcgacgaaaaccaaaactcagagaaagaagagtacgacgagaagctcaaggaggtagaggcagtgtgtaacccaatcatcacagcagtttaccagagatctggcggagcaccaggtggtgcaggaggagaatcatcgactgaggaggaagatgagtctcacgatgagctctagatgtcttytgttattgttaatttrttaaaccatagagacragttttgaggatgaaacgtcgtttttgttttttgtatttggtttcctttttcwtatggatttttaggaaaaggggagagattaagtarcgtcccttctttagtctccctggacgttctctttatgttcatctgataactttacttcttcataacaaataccttttttctatt

SEQ ID NO: 43745 - protein, 669 aa, Arabidopsis thaliana; identical to SEQ ID NO: 25857
  peptide (1)..(669): Ceres Seq. ID no. 15221053
  misc_feature (34)..(655): Homolog of NCBI NO: 14423732 NR Description: Heat shock 70 kDa protein
  misc_feature (35)..(656): Homolog of NCBI NO: 21263753 NR Description: Heat shock cognate 71 kDa protein (Hsc70.1)
  misc_feature (199)..(669): Homolog of NCBI NO: 168424 NR Description: polypeptide chain-binding protein
  misc_feature (15)..(669): Homolog of NCBI NO: 23480384 NR Description: heat shock protein [Plasmodium yoelii yoelii]
  misc_feature (35)..(669): Homolog of NCBI NO: 29539338 NR Description: Heat shock 70 kDa protein [Cyanidioschyzon
  misc_feature (37)..(669): Homolog of NCBI NO: 1037176 NR Description: immunoglobulin heavy chain binding protein
  misc_feature (1)..(664): Homolog of NCBI NO: 13897312 NR Description: luminal binding protein, BiP [Scherffelia dubia]
  misc_feature (34)..(655): Homolog of NCBI NO: 14423732 NR Description: Heat shock 70 kDa protein
  misc_feature (35)..(656): Homolog of NCBI NO: 21263753 NR Description: Heat shock cognate 71 kDa protein (Hsc70.1)
  misc_feature (199)..(669): Homolog of NCBI NO: 168424 NR Description: polypeptide chain-binding protein
  misc_feature (15)..(669): Homolog of NCBI NO: 23480384 NR Description: heat shock protein [Plasmodium yoelii yoelii]
  misc_feature (35)..(669): Homolog of NCBI NO: 29539338 NR Description: Heat shock 70 kDa protein [Cyanidioschyzon
  misc_feature (37)..(669): Homolog of NCBI NO: 1037176 NR Description: immunoglobulin heavy chain binding protein
  misc_feature (1)..(664): Homolog of NCBI NO: 13897312 NR Description: luminal binding protein, BiP [Scherffelia dubia]
  misc_feature (34)..(655): Homolog of NCBI NO: 14423732 NR Description: Heat shock 70 kDa protein
  misc_feature (35)..(656): Homolog of NCBI NO: 21263753 NR Description: Heat shock cognate 71 kDa protein (Hsc70.1)
  misc_feature (199)..(669): Homolog of NCBI NO: 168424 NR Description: polypeptide chain-binding protein
  misc_feature (15)..(669): Homolog of NCBI NO: 23480384 NR Description: heat shock protein [Plasmodium yoelii yoelii]
  misc_feature (35)..(669): Homolog of NCBI NO: 29539338 NR Description: Heat shock 70 kDa protein [Cyanidioschyzon
  misc_feature (37)..(669): Homolog of NCBI NO: 1037176 NR Description: immunoglobulin heavy chain binding protein
  misc_feature (1)..(664): Homolog of NCBI NO: 13897312 NR Description: luminal binding protein, BiP [Scherffelia dubia]
  misc_feature (34)..(655): Homolog of NCBI NO: 14423732 NR Description: Heat shock 70 kDa protein
  misc_feature (35)..(656): Homolog of NCBI NO: 21263753 NR Description: Heat shock cognate 71 kDa protein (Hsc70.1)
  misc_feature (199)..(669): Homolog of NCBI NO: 168424 NR Description: polypeptide chain-binding protein
  misc_feature (15)..(669): Homolog of NCBI NO: 23480384 NR Description: heat shock protein [Plasmodium yoelii yoelii]
  misc_feature (35)..(669): Homolog of NCBI NO: 29539338 NR Description: Heat shock 70 kDa protein [Cyanidioschyzon
  misc_feature (37)..(669): Homolog of NCBI NO: 1037176 NR Description: immunoglobulin heavy chain binding protein
  misc_feature (1)..(664): Homolog of NCBI NO: 13897312 NR Description: luminal binding protein, BiP [Scherffelia dubia]
  misc_feature (34)..(655): Homolog of NCBI NO: 14423732 NR Description: Heat shock 70 kDa protein
  misc_feature (35)..(656): Homolog of NCBI NO: 21263753 NR Description: Heat shock cognate 71 kDa protein (Hsc70.1)
  misc_feature (199)..(669): Homolog of NCBI NO: 168424 NR Description: polypeptide chain-binding protein
  misc_feature (15)..(669): Homolog of NCBI NO: 23480384 NR Description: heat shock protein [Plasmodium yoelii yoelii]
  misc_feature (35)..(669): Homolog of NCBI NO: 29539338 NR Description: Heat shock 70 kDa protein [Cyanidioschyzon
  misc_feature (37)..(669): Homolog of NCBI NO: 1037176 NR Description: immunoglobulin heavy chain binding protein
  misc_feature (1)..(664): Homolog of NCBI NO: 13897312 NR Description: luminal binding protein, BiP [Scherffelia dubia]

SEQ ID NO: 43746 - protein, 516 aa, Arabidopsis thaliana; identical to SEQ ID NO: 25858
  peptide (1)..(516): Ceres Seq. ID no. 15221054
  misc_feature (1)..(502): Homolog of NCBI NO: 14423732 NR Description: Heat shock 70 kDa protein
  misc_feature (1)..(503): Homolog of NCBI NO: 21263753 NR Description: Heat shock cognate 71 kDa protein (Hsc70.1)
  misc_feature (46)..(516): Homolog of NCBI NO: 168424 NR Description: polypeptide chain-binding protein
  misc_feature (1)..(516): Homolog of NCBI NO: 23480384 NR Description: heat shock protein [Plasmodium yoelii yoelii]
  misc_feature (1)..(516): Homolog of NCBI NO: 29539338 NR Description: Heat shock 70 kDa protein [Cyanidioschyzon
  misc_feature (1)..(516): Homolog of NCBI NO: 1037176 NR Description: immunoglobulin heavy chain binding protein
  misc_feature (1)..(511): Homolog of NCBI NO: 13897312 NR Description: luminal binding protein, BiP [Scherffelia dubia]
  misc_feature (1)..(502): Homolog of NCBI NO: 14423732 NR Description: Heat shock 70 kDa protein
  misc_feature (1)..(503): Homolog of NCBI NO: 21263753 NR Description: Heat shock cognate 71 kDa protein (Hsc70.1)
  misc_feature (46)..(516): Homolog of NCBI NO: 168424 NR Description: polypeptide chain-binding protein
  misc_feature (1)..(516): Homolog of NCBI NO: 23480384 NR Description: heat shock protein [Plasmodium yoelii yoelii]
  misc_feature (1)..(516): Homolog of NCBI NO: 29539338 NR Description: Heat shock 70 kDa protein [Cyanidioschyzon
  misc_feature (1)..(516): Homolog of NCBI NO: 1037176 NR Description: immunoglobulin heavy chain binding protein
  misc_feature (1)..(511): Homolog of NCBI NO: 13897312 NR Description: luminal binding protein, BiP [Scherffelia dubia]
  misc_feature (1)..(502): Homolog of NCBI NO: 14423732 NR Description: Heat shock 70 kDa protein
  misc_feature (1)..(503): Homolog of NCBI NO: 21263753 NR Description: Heat shock cognate 71 kDa protein (Hsc70.1)
  misc_feature (46)..(516): Homolog of NCBI NO: 168424 NR Description: polypeptide chain-binding protein
  misc_feature (1)..(516): Homolog of NCBI NO: 23480384 NR Description: heat shock protein [Plasmodium yoelii yoelii]
  misc_feature (1)..(516): Homolog of NCBI NO: 29539338 NR Description: Heat shock 70 kDa protein [Cyanidioschyzon
  misc_feature (1)..(516): Homolog of NCBI NO: 1037176 NR Description: immunoglobulin heavy chain binding protein
  misc_feature (1)..(511): Homolog of NCBI NO: 13897312 NR Description: luminal binding protein, BiP [Scherffelia dubia]
  misc_feature (1)..(502): Homolog of NCBI NO: 14423732 NR Description: Heat shock 70 kDa protein
  misc_feature (1)..(503): Homolog of NCBI NO: 21263753 NR Description: Heat shock cognate 71 kDa protein (Hsc70.1)
  misc_feature (46)..(516): Homolog of NCBI NO: 168424 NR Description: polypeptide chain-binding protein
  misc_feature (1)..(516): Homolog of NCBI NO: 23480384 NR Description: heat shock protein [Plasmodium yoelii yoelii]
  misc_feature (1)..(516): Homolog of NCBI NO: 29539338 NR Description: Heat shock 70 kDa protein [Cyanidioschyzon
  misc_feature (1)..(516): Homolog of NCBI NO: 1037176 NR Description: immunoglobulin heavy chain binding protein
  misc_feature (1)..(511): Homolog of NCBI NO: 13897312 NR Description: luminal binding protein, BiP [Scherffelia dubia]
  misc_feature (1)..(502): Homolog of NCBI NO: 14423732 NR Description: Heat shock 70 kDa protein
  misc_feature (1)..(503): Homolog of NCBI NO: 21263753 NR Description: Heat shock cognate 71 kDa protein (Hsc70.1)
  misc_feature (46)..(516): Homolog of NCBI NO: 168424 NR Description: polypeptide chain-binding protein
  misc_feature (1)..(516): Homolog of NCBI NO: 23480384 NR Description: heat shock protein [Plasmodium yoelii yoelii]
  misc_feature (1)..(516): Homolog of NCBI NO: 29539338 NR Description: Heat shock 70 kDa protein [Cyanidioschyzon
  misc_feature (1)..(516): Homolog of NCBI NO: 1037176 NR Description: immunoglobulin heavy chain binding protein
  misc_feature (1)..(511): Homolog of NCBI NO: 13897312 NR Description: luminal binding protein, BiP [Scherffelia dubia]

SEQ ID NO: 43747 - protein, 511 aa, Arabidopsis thaliana
  peptide (1)..(511): Ceres Seq. ID no. 15221055
  misc_feature (1)..(497): Homolog of NCBI NO: 14423732 NR Description: Heat shock 70 kDa protein
  misc_feature (1)..(498): Homolog of NCBI NO: 21263753 NR Description: Heat shock cognate 71 kDa protein (Hsc70.1)
  misc_feature (41)..(511): Homolog of NCBI NO: 168424 NR Description: polypeptide chain-binding protein
  misc_feature (1)..(511): Homolog of NCBI NO: 23480384 NR Description: heat shock protein [Plasmodium yoelii yoelii]
  misc_feature (1)..(511): Homolog of NCBI NO: 29539338 NR Description: Heat shock 70 kDa protein [Cyanidioschyzon
  misc_feature (1)..(511): Homolog of NCBI NO: 1037176 NR Description: immunoglobulin heavy chain binding protein
  misc_feature (1)..(506): Homolog of NCBI NO: 13897312 NR Description: luminal binding protein, BiP [Scherffelia dubia]
  misc_feature (1)..(497): Homolog of NCBI NO: 14423732 NR Description: Heat shock 70 kDa protein
  misc_feature (1)..(498): Homolog of NCBI NO: 21263753 NR Description: Heat shock cognate 71 kDa protein (Hsc70.1)
  misc_feature (41)..(511): Homolog of NCBI NO: 168424 NR Description: polypeptide chain-binding protein
  misc_feature (1)..(511): Homolog of NCBI NO: 23480384 NR Description: heat shock protein [Plasmodium yoelii yoelii]
  misc_feature (1)..(511): Homolog of NCBI NO: 29539338 NR Description: Heat shock 70 kDa protein [Cyanidioschyzon
  misc_feature (1)..(511): Homolog of NCBI NO: 1037176 NR Description: immunoglobulin heavy chain binding protein
  misc_feature (1)..(506): Homolog of NCBI NO: 13897312 NR Description: luminal binding protein, BiP [Scherffelia dubia]
  misc_feature (1)..(497): Homolog of NCBI NO: 14423732 NR Description: Heat shock 70 kDa protein
  misc_feature (1)..(498): Homolog of NCBI NO: 21263753 NR Description: Heat shock cognate 71 kDa protein (Hsc70.1)
  misc_feature (41)..(511): Homolog of NCBI NO: 168424 NR Description: polypeptide chain-binding protein
  misc_feature (1)..(511): Homolog of NCBI NO: 23480384 NR Description: heat shock protein [Plasmodium yoelii yoelii]
  misc_feature (1)..(511): Homolog of NCBI NO: 29539338 NR Description: Heat shock 70 kDa protein [Cyanidioschyzon
  misc_feature (1)..(511): Homolog of NCBI NO: 1037176 NR Description: immunoglobulin heavy chain binding protein
  misc_feature (1)..(506): Homolog of NCBI NO: 13897312 NR Description: luminal binding protein, BiP [Scherffelia dubia]
  misc_feature (1)..(497): Homolog of NCBI NO: 14423732 NR Description: Heat shock 70 kDa protein
  misc_feature (1)..(498): Homolog of NCBI NO: 21263753 NR Description: Heat shock cognate 71 kDa protein (Hsc70.1)
  misc_feature (41)..(511): Homolog of NCBI NO: 168424 NR Description: polypeptide chain-binding protein
  misc_feature (1)..(511): Homolog of NCBI NO: 23480384 NR Description: heat shock protein [Plasmodium yoelii yoelii]
  misc_feature (1)..(511): Homolog of NCBI NO: 29539338 NR Description: Heat shock 70 kDa protein [Cyanidioschyzon
  misc_feature (1)..(511): Homolog of NCBI NO: 1037176 NR Description: immunoglobulin heavy chain binding protein
  misc_feature (1)..(506): Homolog of NCBI NO: 13897312 NR Description: luminal binding protein, BiP [Scherffelia dubia]
  misc_feature (1)..(497): Homolog of NCBI NO: 14423732 NR Description: Heat shock 70 kDa protein
  misc_feature (1)..(498): Homolog of NCBI NO: 21263753 NR Description: Heat shock cognate 71 kDa protein (Hsc70.1)
  misc_feature (41)..(511): Homolog of NCBI NO: 168424 NR Description: polypeptide chain-binding protein
  misc_feature (1)..(511): Homolog of NCBI NO: 23480384 NR Description: heat shock protein [Plasmodium yoelii yoelii]
  misc_feature (1)..(511): Homolog of NCBI NO: 29539338 NR Description: Heat shock 70 kDa protein [Cyanidioschyzon
  misc_feature (1)..(511): Homolog of NCBI NO: 1037176 NR Description: immunoglobulin heavy chain binding protein
  misc_feature (1)..(506): Homolog of NCBI NO: 13897312 NR Description: luminal binding protein, BiP [Scherffelia dubia]
MKETAEAYLGKKIKDAVVTVPAYFNDAQRQATKDAGVIAGLNVARIINEPTAAAIAYGLDKKGGEKNILVFDLGGGTFDVSVLTIDNGVFEVLSTNGDTHLGGEDFDHRVMEYFIKLIKKKHQKDISKDNKALGKLRRECERAKRALSSQHQVRVEIESLFDGVDFSEPLTRARFEELNNDLFRKTMGPVKKAMDDAGLQKSQIDEIVLVGGSTRIPKVQQLLKDFFEGKEPNKGVNPDEAVAYGAAVQGGILSGEGGDETKDILLLDVAPLTLGIETVGGVMTKLIPRNTVIPTKKSQVFTTYQDQQTTVSIQVFEGERSLTKDCRLLGKFDLNGIPPAPRGTPQIEVTFEVDANGILNVKAEDKASGKSEKITITNEKGRLSQEEIDRMVKEAEEFAEEDKKVKEKIDARNALETYVYNMKNQVNDKDKLADKLEGDEKEKIEAATKEALEWLDENQNSEKEEYDEKLKEVEAVCNPIITAVYQRSGGAPGGAGGESSTEEEDESHDEL

SEQ ID NO: 43748 - DNA, 1662 bp, Arabidopsis thaliana
  misc_feature (1)..(1662): Ceres Seq. ID no. 12421352
  misc_feature: MA Experiment ID: 108434 Result: Up-regulated in Transcription
  misc_feature: MA Experiment 108434 PARAMETER Experiment Name: At_Root_Tips_cDNA_P Parameter: Tissue Value: Root Tips
  misc_feature: MA Experiment ID: 108461 Result: Down-regulated in Transcription
  misc_feature: MA Experiment 108461 PARAMETER Experiment Name: At_Germinating_Seeds_cDNA_P Parameter: Age (day) Value: 1 vs. 0
  misc_feature: MA Experiment 108461 PARAMETER Experiment Name: At_Germinating_Seeds_cDNA_P Parameter: Tissue Value: Germinating Seeds
  misc_feature: MA Experiment ID: 108462 Result: Down-regulated in Transcription
  misc_feature: MA Experiment 108462 PARAMETER Experiment Name: At_Germinating_Seeds_cDNA_P Parameter: Age (day) Value: 2 vs. 0
  misc_feature: MA Experiment 108462 PARAMETER Experiment Name: At_Germinating_Seeds_cDNA_P Parameter: Tissue Value: Germinating Seeds
  misc_feature: MA Experiment ID: 108463 Result: Down-regulated in Transcription
  misc_feature: MA Experiment 108463 PARAMETER Experiment Name: At_Germinating_Seeds_cDNA_P Parameter: Age (day) Value: 3 vs. 0
  misc_feature: MA Experiment 108463 PARAMETER Experiment Name: At_Germinating_Seeds_cDNA_P Parameter: Tissue Value: Germinating Seeds
  misc_feature: MA Experiment ID: 108464 Result: Down-regulated in Transcription
  misc_feature: MA Experiment 108464 PARAMETER Experiment Name: At_Germinating_Seeds_cDNA_P Parameter: Age (day) Value: 4 vs. 0
  misc_feature: MA Experiment 108464 PARAMETER Experiment Name: At_Germinating_Seeds_cDNA_P Parameter: Tissue Value: Germinating Seeds
  misc_feature: MA Experiment ID: 108473 Result: Down-regulated in Transcription
  misc_feature: MA Experiment 108473 PARAMETER Experiment Name: At_Drought_Flowers_cDNA_P Parameter: Timepoint (hr) Value: 7 d
  misc_feature: MA Experiment 108473 PARAMETER Experiment Name: At_Drought_Flowers_cDNA_P Parameter: Tissue Value: Flower
  misc_feature: MA Experiment 108473 PARAMETER Experiment Name: At_Drought_Flowers_cDNA_P Parameter: Treatment Value: Drought vs. No Drought
  misc_feature: MA Experiment ID: 108501 Result: Down-regulated in Transcription
  misc_feature: MA Experiment 108501 PARAMETER Experiment Name: At_ap2_floral_buds_cDNA_P Parameter: Plant Line Value: ap2 (Ler.)
  misc_feature: MA Experiment 108501 PARAMETER Experiment Name: At_ap2_floral_buds_cDNA_P Parameter: Tissue Value: Closed Flower
  misc_feature: MA Experiment ID: 108573 Result: Down-regulated in Transcription
  misc_feature: MA Experiment 108573 PARAMETER Experiment Name: At_Drought_cDNA_P Parameter: Timepoint (hr) Value: 6
  misc_feature: MA Experiment 108573 PARAMETER Experiment Name: At_Drought_cDNA_P Parameter: Tissue Value: Aerial
  misc_feature: MA Experiment 108573 PARAMETER Experiment Name: At_Drought_cDNA_P Parameter: Treatment Value: Drought vs. No Drought
  misc_feature: MA Experiment ID: 20000068 Result: Up-regulated in Transcription
  misc_feature: MA Experiment ID: 20000087 Result: Up-regulated in Transcription
  misc_feature: MA Experiment 20000087 PARAMETER Experiment Name: At_100uM_ABA_Mutants_cDNA_P Parameter: Plant Line Value: WS
  misc_feature: MA Experiment 20000087 PARAMETER Experiment Name: At_100uM_ABA_Mutants_cDNA_P Parameter: Timepoint (hr) Value: 6
  misc_feature: MA Experiment 20000087 PARAMETER Experiment Name: At_100uM_ABA_Mutants_cDNA_P Parameter: Tissue Value: Aerial
  misc_feature: MA Experiment 20000087 PARAMETER Experiment Name: At_100uM_ABA_Mutants_cDNA_P Parameter: Treatment Value: 100uM ABA vs. No Treatment
  misc_feature: MA Experiment ID: 20000265 Result: Up-regulated in Transcription
  misc_feature: MA Experiment 20000265 PARAMETER Experiment Name: At_Open_Flower_P Parameter: Age (day) Value: 21
  misc_feature: MA Experiment 20000265 PARAMETER Experiment Name: At_Open_Flower_P Parameter: Plant Line Value: WS
  misc_feature: MA Experiment 20000265 PARAMETER Experiment Name: At_Open_Flower_P Parameter: Tissue Value: Closed Flower vs. Whole Plant
  misc_feature: MA Experiment ID: 20000286 Result: Up-regulated in Transcription
  misc_feature: MA Experiment 20000286 PARAMETER Experiment Name: At_Open_Flower_P Parameter: Age (day) Value: 21
  misc_feature: MA Experiment 20000286 PARAMETER Experiment Name: At_Open_Flower_P Parameter: Plant Line Value: WS
  misc_feature: MA Experiment 20000286 PARAMETER Experiment Name: At_Open_Flower_P Parameter: Tissue Value: Half Open vs. Whole Plant
  misc_feature: MA Experiment ID: 20001910 Result: Down-regulated in Transcription
  misc_feature: MA Experiment 20001910 PARAMETER Experiment Name: At_Drought_Reproduction_P Parameter: Age (day) Value: 37
  misc_feature: MA Experiment 20001910 PARAMETER Experiment Name: At_Drought_Reproduction_P Parameter: Organism Value: A. thaliana
  misc_feature: MA Experiment 20001910 PARAMETER Experiment Name: At_Drought_Reproduction_P Parameter: Plant Line Value: WS
  misc_feature: MA Experiment 20001910 PARAMETER Experiment Name: At_Drought_Reproduction_P Parameter: Timepoint (day) Value: 7
  misc_feature: MA Experiment 20001910 PARAMETER Experiment Name: At_Drought_Reproduction_P Parameter: Tissue Value: Flowers
  misc_feature: MA Experiment 20001910 PARAMETER Experiment Name: At_Drought_Reproduction_P Parameter: Treatment Value: Drought vs. No Drought
aaacctgtattttatcaattaccacactttgtctaagcaaaatggatttattactcatatccttaaccactatcataatcgccgcctacatgcaaaatctacgacgtcggggatccaacataccgccgggaccaccaacgcgatttctggtcggaaaccttcatcaactgaaaccattatggacgcagtctttctccgagtggtcacagacttatggccccatcatatcggtgtggttaggatcacagctagctgttgtggtctcgagctctgacttagccaaacaagtgttgagagacaaagactaccaactctgtaaccgacacagaaccgcaaggatgactcagaacggcagcgatcttatttggtctgactacggagcacattatgtgaaaatgagaaaactctgtacactcgagctcttttctttgaaaagcatagagtgtttcaggtcgatgagagagatggaagtaagttccatggttaagtcgattttcaatgacttcatgagcgatgatcagaaaccagtggtgttgaggaactatctagattctgttgctttgaacattgtttcaagattagttatcgggaaaacattcgaacccaaagatggaagagagtttagatcaattgtagaaagggagactcgcttgcccggcgcaaccaagatgcttgattacaccgtttggcttaaacgtctttcgtcatggttcactagcgacaaggcgttcatgaagcacatggctcggaaaagaaattggtttaaacgagctgtaatggatgaagtatatggaggaagagatcaaaagtgttttgttcagagtctgttagagttgaaagagaaggatgagctgaccgaggagactgtgatgggactggtctggaacatgttaactgcaggagctgacacaaccgccataactattgaatgggcaatggcagagatgatcagatgcccgaccgtgaaagaaaaggtgcaggatgagcttgattccgtggttggatccggacggttaatgtctgatgcagatatcccaaaactgccgtttctgcaatgcgtactcaaagaagctctccggcttcaccctccaacaccattgatgcttccacacaaggccagcgaatcagttcaggtaggtgggtacaaagttcctaagggagccacggtttatgtcaacgtgcaggcgattgctcgagatcctgcaaactggagtaacccagatgagtttagaccagagaggtttcttgtggaggaaacggacgttaaaggtcaagactttcgggttcttccatttgggtcgggaagacgggtgtgtccagccgctcaactcagcctcaatatgatgacattagcactaggtagtttgttgcattgtttctcatggacatcctctacacctcgagaacacattgacatgaccgagaagcctggattagtttgttacatgaaggctccattgcaggctctagcttcgtccaggctgccacaagagttatacctttaacttttaactgagatagattatattaatcaacataagataaagagagattctcaattgcgaaaaacagatgtagctatggcaagatttaggacatggatgatgaaatggttcgtacaaacagaatgtagctattgatagtaaataaactaaatattcc

SEQ ID NO: 43749 - protein, 500 aa, Arabidopsis thaliana
  peptide (1)..(500): Ceres Seq. ID no. 12421353
  misc_feature (16)..(499): Homolog of NCBI NO: 22651521 NR Description: p-coumaroyl shikimate 3'-hydroxylase isoform 2
  misc_feature (14)..(499): Homolog of NCBI NO: 30688445 NR Description: cytochrome P450 98A3 [Arabidopsis thaliana]
  misc_feature (14)..(493): Homolog of NCBI NO: 21595281 NR Description: putative cytochrome P450 [Arabidopsis thaliana]
  misc_feature (14)..(493): Homolog of NCBI NO: 15221294 NR Description: cytochrome p450 monooxygenase, putative
  misc_feature (14)..(500): Homolog of NCBI NO: 15221296 NR Description: cytochrome p450 monooxygenase, putative
TCILSITTLCLSKMDLLLISLTTIIIAAYMQNLRRRGSNIPPGPPTRFLVGNLHQLKPLWTQSFSEWSQTYGPIISVWLGSQLAVVVSSSDLAKQVLRDKDYQLCNRHRTARMTQNGSDLIWSDYGAHYVKMRKLCTLELFSLKSIECFRSMREMEVSSMVKSIFNDFMSDDQKPVVLRNYLDSVALNIVSRLVIGKTFEPKDGREFRSIVERETRLPGATKMLDYTVWLKRLSSWFTSDKAFMKHMARKRNWFKRAVMDEVYGGRDQKCFVQSLLELKEKDELTEETVMGLVWNMLTAGADTTAITIEWAMAEMIRCPTVKEKVQDELDSVVGSGRLMSDADIPKLPFLQCVLKEALRLHPPTPLMLPHKASESVQVGGYKVPKGATVYVNVQAIARDPANWSNPDEFRPERFLVEETDVKGQDFRVLPFGSGRRVCPAAQLSLNMMTLALGSLLHCFSWTSSTPREHIDMTEKPGLVCYMKAPLQALASSRLPQELYL

SEQ ID NO: 43750 - protein, 487 aa, Arabidopsis thaliana
  peptide (1)..(487): Ceres Seq. ID no. 12421354
  misc_feature (3)..(486): Homolog of NCBI NO: 22651521 NR Description: p-coumaroyl shikimate 3'-hydroxylase isoform 2
  misc_feature (1)..(486): Homolog of NCBI NO: 30688445 NR Description: cytochrome P450 98A3 [Arabidopsis thaliana]
  misc_feature (1)..(480): Homolog of NCBI NO: 21595281 NR Description: putative cytochrome P450 [Arabidopsis thaliana]
  misc_feature (1)..(480): Homolog of NCBI NO: 15221294 NR Description: cytochrome p450 monooxygenase, putative
  misc_feature (1)..(487): Homolog of NCBI NO: 15221296 NR Description: cytochrome p450 monooxygenase, putative
MDLLLISLTTIIIAAYMQNLRRRGSNIPPGPPTRFLVGNLHQLKPLWTQSFSEWSQTYGPIISVWLGSQLAVVVSSSDLAKQVLRDKDYQLCNRHRTARMTQNGSDLIWSDYGAHYVKMRKLCTLELFSLKSIECFRSMREMEVSSMVKSIFNDFMSDDQKPVVLRNYLDSVALNIVSRLVIGKTFEPKDGREFRSIVERETRLPGATKMLDYTVWLKRLSSWFTSDKAFMKHMARKRNWFKRAVMDEVYGGRDQKCFVQSLLELKEKDELTEETVMGLVWNMLTAGADTTAITIEWAMAEMIRCPTVKEKVQDELDSVVGSGRLMSDADIPKLPFLQCVLKEALRLHPPTPLMLPHKASESVQVGGYKVPKGATVYVNVQAIARDPANWSNPDEFRPERFLVEETDVKGQDFRVLPFGSGRRVCPAAQLSLNMMTLALGSLLHCFSWTSSTPREHIDMTEKPGLVCYMKAPLQALASSRLPQELYL

SEQ ID NO: 43751 - protein, 471 aa, Arabidopsis thaliana
  peptide (1)..(471): Ceres Seq. ID no. 12421355
  misc_feature (1)..(470): Homolog of NCBI NO: 22651521 NR Description: p-coumaroyl shikimate 3'-hydroxylase isoform 2
  misc_feature (1)..(470): Homolog of NCBI NO: 30688445 NR Description: cytochrome P450 98A3 [Arabidopsis thaliana]
  misc_feature (1)..(464): Homolog of NCBI NO: 21595281 NR Description: putative cytochrome P450 [Arabidopsis thaliana]
  misc_feature (1)..(464): Homolog of NCBI NO: 15221294 NR Description: cytochrome p450 monooxygenase, putative
  misc_feature (1)..(471): Homolog of NCBI NO: 15221296 NR Description: cytochrome p450 monooxygenase, putative
MQNLRRRGSNIPPGPPTRFLVGNLHQLKPLWTQSFSEWSQTYGPIISVWLGSQLAVVVSSSDLAKQVLRDKDYQLCNRHRTARMTQNGSDLIWSDYGAHYVKMRKLCTLELFSLKSIECFRSMREMEVSSMVKSIFNDFMSDDQKPVVLRNYLDSVALNIVSRLVIGKTFEPKDGREFRSIVERETRLPGATKMLDYTVWLKRLSSWFTSDKAFMKHMARKRNWFKRAVMDEVYGGRDQKCFVQSLLELKEKDELTEETVMGLVWNMLTAGADTTAITIEWAMAEMIRCPTVKEKVQDELDSVVGSGRLMSDADIPKLPFLQCVLKEALRLHPPTPLMLPHKASESVQVGGYKVPKGATVYVNVQAIARDPANWSNPDEFRPERFLVEETDVKGQDFRVLPFGSGRRVCPAAQLSLNMMTLALGSLLHCFSWTSSTPREHIDMTEKPGLVCYMKAPLQALASSRLPQELYL

SEQ ID NO: 43752 - DNA, 573 bp, Arabidopsis thaliana
  misc_feature (1)..(573): Ceres Seq. ID no. 4921303
  misc_feature: MA Experiment ID: 108434 Result: Up-regulated in Transcription
  misc_feature: MA Experiment 108434 PARAMETER Experiment Name: At_Root_Tips_cDNA_P Parameter: Tissue Value: Root Tips
  misc_feature: MA Experiment ID: 108461 Result: Down-regulated in Transcription
  misc_feature: MA Experiment 108461 PARAMETER Experiment Name: At_Germinating_Seeds_cDNA_P Parameter: Age (day) Value: 1 vs. 0
  misc_feature: MA Experiment 108461 PARAMETER Experiment Name: At_Germinating_Seeds_cDNA_P Parameter: Tissue Value: Germinating Seeds
  misc_feature: MA Experiment ID: 108462 Result: Down-regulated in Transcription
  misc_feature: MA Experiment 108462 PARAMETER Experiment Name: At_Germinating_Seeds_cDNA_P Parameter: Age (day) Value: 2 vs. 0
  misc_feature: MA Experiment 108462 PARAMETER Experiment Name: At_Germinating_Seeds_cDNA_P Parameter: Tissue Value: Germinating Seeds
  misc_feature: MA Experiment ID: 108463 Result: Down-regulated in Transcription
  misc_feature: MA Experiment 108463 PARAMETER Experiment Name: At_Germinating_Seeds_cDNA_P Parameter: Age (day) Value: 3 vs. 0
  misc_feature: MA Experiment 108463 PARAMETER Experiment Name: At_Germinating_Seeds_cDNA_P Parameter: Tissue Value: Germinating Seeds
  misc_feature: MA Experiment ID: 108464 Result: Down-regulated in Transcription
  misc_feature: MA Experiment 108464 PARAMETER Experiment Name: At_Germinating_Seeds_cDNA_P Parameter: Age (day) Value: 4 vs. 0
  misc_feature: MA Experiment 108464 PARAMETER Experiment Name: At_Germinating_Seeds_cDNA_P Parameter: Tissue Value: Germinating Seeds
  misc_feature: MA Experiment ID: 108573 Result: Down-regulated in Transcription
  misc_feature: MA Experiment 108573 PARAMETER Experiment Name: At_Drought_cDNA_P Parameter: Timepoint (hr) Value: 6
  misc_feature: MA Experiment 108573 PARAMETER Experiment Name: At_Drought_cDNA_P Parameter: Tissue Value: Aerial
  misc_feature: MA Experiment 108573 PARAMETER Experiment Name: At_Drought_cDNA_P Parameter: Treatment Value: Drought vs. No Drought
  misc_feature: MA Experiment ID: 108579 Result: Up-regulated in Transcription
  misc_feature: MA Experiment 108579 PARAMETER Experiment Name: At_4deg_Cold_cDNA_P Parameter: Temperature (deg C) Value: 4 vs. 22
  misc_feature: MA Experiment 108579 PARAMETER Experiment Name: At_4deg_Cold_cDNA_P Parameter: Timepoint (hr) Value: 6
  misc_feature: MA Experiment 108579 PARAMETER Experiment Name: At_4deg_Cold_cDNA_P Parameter: Tissue Value: Aerial
gaaggacagatttgtaaacattctcaaatccttcaaaaaccctaatttctttctgtgaggttattgagaacgaagaagatgacgggagaggtagtgaaccctaaggcgtacccgttagcagattctcagctttcgataacaataatggatcttgttcaacaagctactaactacaagcagcttaagaagggagctaatgaagctaccaaaacattgaaccgtggaatctctgagttcgttgttatggctgctgatgctgaaccacttgagattcttcttcatcttcctttgcttgccgaagataagaatgtgccatatgtgtttgtaccttcgaaacaagcattgggaagagcatgtggagtaacaagacctgttattgcttgttcagtgacatcgaatgaggcaagccagttgaaatcgcagattcagcatctcaaggatgcgattgagaagctcctgatctaaggattctgctcagtatgagagtctntgcaatgtggatggctctgntgaagtantttggtgattacctntttaagatgtattggactggggtatgctagttggggacat

SEQ ID NO: 43753 - protein, 128 aa, Arabidopsis thaliana; identical to SEQ ID NO: 26405
  peptide (1)..(128): Ceres Seq. ID no. 4921304
  misc_feature (20)..(114): Pfam Name: Ribosomal protein L7Ae/L30e/S12e/Gadd45 family Pfam Description: Ribosomal protein L7Ae/L30e/S12e/Gadd45 family
  misc_feature (1)..(128): Homolog of NCBI NO: 17535189 NR Description: Ribosomal protein L7Ae/L30e/S12e/Gadd45 family
  misc_feature (1)..(128): Homolog of NCBI NO: 38174386 NR Description: Unknown (protein for MGC:75724) [Silurana
  misc_feature (6)..(128): Homolog of NCBI NO: 37530712 NR Description: putative ribosomal protein L7Ae-like
  misc_feature (1)..(108): Homolog of NCBI NO: 25295061 NR Description: Ribosomal protein L7Ae-like (partial)
  misc_feature (1)..(128): Homolog of NCBI NO: 15235416 NR Description: Ribosomal protein L7Ae -like
  misc_feature (1)..(128): Homolog of NCBI NO: 21592866 NR Description: Ribosomal protein L7Ae-like [Arabidopsis thaliana]
  misc_feature (1)..(46): Homolog of NCBI NO: 30687670 NR Description: ribosomal protein L7Ae family [Arabidopsis
  misc_feature (42)..(128): Homolog of NCBI NO: 30687670 NR Description: ribosomal protein L7Ae family [Arabidopsis
  misc_feature (1)..(128): Homolog of NCBI NO: 15241276 NR Description: ribosomal protein L7Ae-like
  misc_feature (1)..(128): Homolog of NCBI NO: 15236127 NR Description: Ribosomal protein L7Ae - like; protein id:

SEQ ID NO: 43754 - protein, 106 aa, Arabidopsis thaliana; identical to SEQ ID NO: 26406
  peptide (1)..(106): Ceres Seq. ID no. 4921305
  misc_feature (1)..(92): Pfam Name: Ribosomal protein L7Ae/L30e/S12e/Gadd45 family Pfam Description: Ribosomal protein L7Ae/L30e/S12e/Gadd45 family
  misc_feature (1)..(106): Homolog of NCBI NO: 17535189 NR Description: Ribosomal protein L7Ae/L30e/S12e/Gadd45 family
  misc_feature (1)..(106): Homolog of NCBI NO: 38174386 NR Description: Unknown (protein for MGC:75724) [Silurana
  misc_feature (1)..(106): Homolog of NCBI NO: 37530712 NR Description: putative ribosomal protein L7Ae-like
  misc_feature (1)..(86): Homolog of NCBI NO: 25295061 NR Description: Ribosomal protein L7Ae-like (partial)
  misc_feature (1)..(106): Homolog of NCBI NO: 15235416 NR Description: Ribosomal protein L7Ae -like
  misc_feature (1)..(106): Homolog of NCBI NO: 21592866 NR Description: Ribosomal protein L7Ae-like [Arabidopsis thaliana]
  misc_feature (1)..(24): Homolog of NCBI NO: 30687670 NR Description: ribosomal protein L7Ae family [Arabidopsis
  misc_feature (20)..(106): Homolog of NCBI NO: 30687670 NR Description: ribosomal protein L7Ae family [Arabidopsis
  misc_feature (1)..(106): Homolog of NCBI NO: 15241276 NR Description: ribosomal protein L7Ae-like
  misc_feature (1)..(106): Homolog of NCBI NO: 15236127 NR Description: Ribosomal protein L7Ae - like; protein id:

SEQ ID NO: 43755 - protein, 73 aa, Arabidopsis thaliana; identical to SEQ ID NO: 21543
  peptide (1)..(73): Ceres Seq. ID no. 4921306
  misc_feature (1)..(59): Pfam Name: Ribosomal protein L7Ae/L30e/S12e/Gadd45 family Pfam Description: Ribosomal protein L7Ae/L30e/S12e/Gadd45 family
  misc_feature (1)..(73): Homolog of NCBI NO: 28302201 NR Description: Similar to NHP2 non-histone chromosome protein
  misc_feature (1)..(73): Homolog of NCBI NO: 17535189 NR Description: Ribosomal protein L7Ae/L30e/S12e/Gadd45 family
  misc_feature (1)..(73): Homolog of NCBI NO: 38174386 NR Description: Unknown (protein for MGC:75724) [Silurana
  misc_feature (1)..(73): Homolog of NCBI NO: 37530712 NR Description: putative ribosomal protein L7Ae-like
  misc_feature (1)..(53): Homolog of NCBI NO: 25295061 NR Description: Ribosomal protein L7Ae-like (partial)
  misc_feature (1)..(73): Homolog of NCBI NO: 15235416 NR Description: Ribosomal protein L7Ae -like
  misc_feature (1)..(73): Homolog of NCBI NO: 21592866 NR Description: Ribosomal protein L7Ae-like [Arabidopsis thaliana]
  misc_feature (1)..(73): Homolog of NCBI NO: 30687670 NR Description: ribosomal protein L7Ae family [Arabidopsis
  misc_feature (1)..(73): Homolog of NCBI NO: 15241276 NR Description: ribosomal protein L7Ae-like
  misc_feature (1)..(73): Homolog of NCBI NO: 15236127 NR Description: Ribosomal protein L7Ae - like; protein id:

SEQ ID NO: 43756 - DNA, 854 bp, Arabidopsis thaliana; identical to SEQ ID NO: 40130
  misc_feature (1)..(854): Ceres Seq. ID no. 13497569
  misc_feature: MA Experiment ID: 20000069 Result: Up-regulated in Transcription
  misc_feature: MA Experiment 20000069 PARAMETER Experiment Name: At_100uM_ABA_Mutants_cDNA_P Parameter: Plant Line Value: CS23
  misc_feature: MA Experiment 20000069 PARAMETER Experiment Name: At_100uM_ABA_Mutants_cDNA_P Parameter: Timepoint (hr) Value: 6
  misc_feature: MA Experiment 20000069 PARAMETER Experiment Name: At_100uM_ABA_Mutants_cDNA_P Parameter: Tissue Value: Aerial
  misc_feature: MA Experiment 20000069 PARAMETER Experiment Name: At_100uM_ABA_Mutants_cDNA_P Parameter: Treatment Value: 100uM ABA vs. No Treatment
  misc_feature: MA Experiment ID: 20000070 Result: Up-regulated in Transcription
  misc_feature: MA Experiment 20000070 PARAMETER Experiment Name: At_100uM_ABA_Mutants_cDNA_P Parameter: Plant Line Value: CS24
  misc_feature: MA Experiment 20000070 PARAMETER Experiment Name: At_100uM_ABA_Mutants_cDNA_P Parameter: Timepoint (hr) Value: 6
  misc_feature: MA Experiment 20000070 PARAMETER Experiment Name: At_100uM_ABA_Mutants_cDNA_P Parameter: Tissue Value: Aerial
  misc_feature: MA Experiment 20000070 PARAMETER Experiment Name: At_100uM_ABA_Mutants_cDNA_P Parameter: Treatment Value: 100uM ABA vs. No Treatment
  misc_feature: MA Experiment ID: 20000071 Result: Up-regulated in Transcription
  misc_feature: MA Experiment 20000071 PARAMETER Experiment Name: At_100uM_ABA_Mutants_cDNA_P Parameter: Plant Line Value: CS8104
  misc_feature: MA Experiment 20000071 PARAMETER Experiment Name: At_100uM_ABA_Mutants_cDNA_P Parameter: Timepoint (hr) Value: 6
  misc_feature: MA Experiment 20000071 PARAMETER Experiment Name: At_100uM_ABA_Mutants_cDNA_P Parameter: Tissue Value: Aerial
  misc_feature: MA Experiment 20000071 PARAMETER Experiment Name: At_100uM_ABA_Mutants_cDNA_P Parameter: Treatment Value: 100uM ABA vs. No Treatment
  misc_feature: MA Experiment ID: 20000072 Result: Up-regulated in Transcription
  misc_feature: MA Experiment 20000072 PARAMETER Experiment Name: At_100uM_ABA_Mutants_cDNA_P Parameter: Plant Line Value: CS8105
  misc_feature: MA Experiment 20000072 PARAMETER Experiment Name: At_100uM_ABA_Mutants_cDNA_P Parameter: Timepoint (hr) Value: 6
  misc_feature: MA Experiment 20000072 PARAMETER Experiment Name: At_100uM_ABA_Mutants_cDNA_P Parameter: Tissue Value: Aerial
  misc_feature: MA Experiment 20000072 PARAMETER Experiment Name: At_100uM_ABA_Mutants_cDNA_P Parameter: Treatment Value: 100uM ABA vs. No Treatment
  misc_feature: MA Experiment ID: 20000086 Result: Up-regulated in Transcription
  misc_feature: MA Experiment 20000086 PARAMETER Experiment Name: At_100uM_ABA_Mutants_cDNA_P Parameter: Plant Line Value: CS22
  misc_feature: MA Experiment 20000086 PARAMETER Experiment Name: At_100uM_ABA_Mutants_cDNA_P Parameter: Timepoint (hr) Value: 6
  misc_feature: MA Experiment 20000086 PARAMETER Experiment Name: At_100uM_ABA_Mutants_cDNA_P Parameter: Tissue Value: Aerial
  misc_feature: MA Experiment 20000086 PARAMETER Experiment Name: At_100uM_ABA_Mutants_cDNA_P Parameter: Treatment Value: 100uM ABA vs. No Treatment
  misc_feature: MA Experiment ID: 20000087 Result: Up-regulated in Transcription
  misc_feature: MA Experiment 20000087 PARAMETER Experiment Name: At_100uM_ABA_Mutants_cDNA_P Parameter: Plant Line Value: WS
  misc_feature: MA Experiment 20000087 PARAMETER Experiment Name: At_100uM_ABA_Mutants_cDNA_P Parameter: Timepoint (hr) Value: 6
  misc_feature: MA Experiment 20000087 PARAMETER Experiment Name: At_100uM_ABA_Mutants_cDNA_P Parameter: Tissue Value: Aerial
  misc_feature: MA Experiment 20000087 PARAMETER Experiment Name: At_100uM_ABA_Mutants_cDNA_P Parameter: Treatment Value: 100uM ABA vs. No Treatment
  misc_feature: MA Experiment ID: 20000088 Result: Up-regulated in Transcription
  misc_feature: MA Experiment 20000088 PARAMETER Experiment Name: At_100uM_ABA_Mutants_cDNA_P Parameter: Plant Line Value: Landsberg
  misc_feature: MA Experiment 20000088 PARAMETER Experiment Name: At_100uM_ABA_Mutants_cDNA_P Parameter: Timepoint (hr) Value: 6
  misc_feature: MA Experiment 20000088 PARAMETER Experiment Name: At_100uM_ABA_Mutants_cDNA_P Parameter: Tissue Value: Aerial
  misc_feature: MA Experiment 20000088 PARAMETER Experiment Name: At_100uM_ABA_Mutants_cDNA_P Parameter: Treatment Value: 100uM ABA vs. No Treatment
  misc_feature: MA Experiment ID: 20000089 Result: Up-regulated in Transcription
  misc_feature: MA Experiment ID: 20000090 Result: Up-regulated in Transcription
  misc_feature: MA Experiment ID: 20000117 Result: Up-regulated in Transcription
  misc_feature: MA Experiment 20000117 PARAMETER Experiment Name: At_100uM_ABA_Mutants_cDNA_P Parameter: Plant Line Value: Columbia
  misc_feature: MA Experiment 20000117 PARAMETER Experiment Name: At_100uM_ABA_Mutants_cDNA_P Parameter: Timepoint (hr) Value: 6
  misc_feature: MA Experiment 20000117 PARAMETER Experiment Name: At_100uM_ABA_Mutants_cDNA_P Parameter: Tissue Value: Aerial
  misc_feature: MA Experiment 20000117 PARAMETER Experiment Name: At_100uM_ABA_Mutants_cDNA_P Parameter: Treatment Value: 100uM ABA vs. No Treatment
  misc_feature: MA Experiment ID: 20001248 Result: Up-regulated in Transcription
  misc_feature: MA Experiment 20001248 PARAMETER Experiment Name: At_Far-red-induction_P Parameter: Age (day) Value: 7
  misc_feature: MA Experiment 20001248 PARAMETER Experiment Name: At_Far-red-induction_P Parameter: Light Value: Far-red vs. White
  misc_feature: MA Experiment 20001248 PARAMETER Experiment Name: At_Far-red-induction_P Parameter: Organism Value: A. thaliana
  misc_feature: MA Experiment 20001248 PARAMETER Experiment Name: At_Far-red-induction_P Parameter: Plant Line Value: Columbia
  misc_feature: MA Experiment 20001248 PARAMETER Experiment Name: At_Far-red-induction_P Parameter: Timepoint (hr) Value: 4
  misc_feature: MA Experiment 20001248 PARAMETER Experiment Name: At_Far-red-induction_P Parameter: Tissue Value: Whole Plant

SEQ ID NO: 43757 - protein, 142 aa, Arabidopsis thaliana; identical to SEQ ID NO: 40131
  peptide (1)..(142): Ceres Seq. ID no. 13497570
  misc_feature (87)..(141): Pfam Name: Helix-turn-helix Pfam Description: Helix-turn-helix
  misc_feature (87)..(141): Pfam Name: Helix-turn-helix Pfam Description: Helix-turn-helix
  misc_feature (87)..(141): Pfam Name: Helix-turn-helix Pfam Description: Helix-turn-helix
  misc_feature (10)..(141): Homolog of NCBI NO: 4503453 NR Description: endothelial differentiation-related factor 1
  misc_feature (5)..(141): Homolog of NCBI NO: 19225065 NR Description: ethylene-responsive transciptional
  misc_feature (7)..(141): Homolog of NCBI NO: 21553721 NR Description: ethylene-responsive transcriptional coactivator,
  misc_feature (5)..(141): Homolog of NCBI NO: 15230125 NR Description: ethylene-responsive transcriptional coactivator
  misc_feature (5)..(142): Homolog of NCBI NO: 20086364 NR Description: putative multiprotein bridging factor 1
  misc_feature (10)..(141): Homolog of NCBI NO: 4503453 NR Description: endothelial differentiation-related factor 1
  misc_feature (7)..(141): Homolog of NCBI NO: 21553721 NR Description: ethylene-responsive transcriptional coactivator,
  misc_feature (5)..(142): Homolog of NCBI NO: 20086364 NR Description: putative multiprotein bridging factor 1
  misc_feature (5)..(141): Homolog of NCBI NO: 15230125 NR Description: ethylene-responsive transcriptional coactivator
  misc_feature (7)..(141): Homolog of NCBI NO: 21553721 NR Description: ethylene-responsive transcriptional coactivator,
  misc_feature (5)..(141): Homolog of NCBI NO: 19225065 NR Description: ethylene-responsive transciptional
  misc_feature (10)..(141): Homolog of NCBI NO: 4503453 NR Description: endothelial differentiation-related factor 1
  misc_feature (1)..(142): Homolog of NCBI NO: 15231105 NR Description: transcriptional coactivator - like protein
  misc_feature (1)..(142): Homolog of NCBI NO: 18406032 NR Description: expressed protein [Arabidopsis thaliana]
  misc_feature (1)..(142): Homolog of NCBI NO: 7488897 NR Description: hypothetical protein - castor bean
  misc_feature (1)..(142): Homolog of NCBI NO: 38637102 NR Description: putative ethylene-responsive transcriptional
  misc_feature (7)..(142): Homolog of NCBI NO: 8895787 NR Description: multiprotein bridging factor 1 [Solanum tuberosum]
  misc_feature (1)..(142): Homolog of NCBI NO: 15231105 NR Description: transcriptional coactivator - like protein
  misc_feature (1)..(142): Homolog of NCBI NO: 18406032 NR Description: expressed protein [Arabidopsis thaliana]
  misc_feature (1)..(142): Homolog of NCBI NO: 7488897 NR Description: hypothetical protein - castor bean
  misc_feature (1)..(142): Homolog of NCBI NO: 38637102 NR Description: putative ethylene-responsive transcriptional
  misc_feature (7)..(142): Homolog of NCBI NO: 8895787 NR Description: multiprotein bridging factor 1 [Solanum tuberosum]
  misc_feature (5)..(142): Homolog of NCBI NO: 20086364 NR Description: putative multiprotein bridging factor 1
  misc_feature (5)..(141): Homolog of NCBI NO: 15230125 NR Description: ethylene-responsive transcriptional coactivator
  misc_feature (5)..(141): Homolog of NCBI NO: 19225065 NR Description: ethylene-responsive transciptional
  misc_feature (7)..(142): Homolog of NCBI NO: 8895787 NR Description: multiprotein bridging factor 1 [Solanum tuberosum]
  misc_feature (1)..(142): Homolog of NCBI NO: 38637102 NR Description: putative ethylene-responsive transcriptional
  misc_feature (1)..(142): Homolog of NCBI NO: 7488897 NR Description: hypothetical protein - castor bean
  misc_feature (1)..(142): Homolog of NCBI NO: 18406032 NR Description: expressed protein [Arabidopsis thaliana]
  misc_feature (1)..(142): Homolog of NCBI NO: 15231105 NR Description: transcriptional coactivator - like protein

SEQ ID NO: 43758 - DNA, 1213 bp, Arabidopsis thaliana; identical to SEQ ID NO: 40126
  misc_feature (1)..(1213): Ceres Seq. ID no. 12481792
  misc_feature: MA Experiment ID: 20000171 Result: Up-regulated in Transcription
  misc_feature: MA Experiment 20000171 PARAMETER Experiment Name: At_42deg_Heat_P Parameter: Age (day) Value: 14
  misc_feature: MA Experiment 20000171 PARAMETER Experiment Name: At_42deg_Heat_P Parameter: Organism Value: A. thaliana
  misc_feature: MA Experiment 20000171 PARAMETER Experiment Name: At_42deg_Heat_P Parameter: Plant Line Value: WS
  misc_feature: MA Experiment 20000171 PARAMETER Experiment Name: At_42deg_Heat_P Parameter: Temperature (deg C) Value: 42 vs. 22
  misc_feature: MA Experiment 20000171 PARAMETER Experiment Name: At_42deg_Heat_P Parameter: Timepoint (hr) Value: 1
  misc_feature: MA Experiment 20000171 PARAMETER Experiment Name: At_42deg_Heat_P Parameter: Tissue Value: Aerial
  misc_feature: MA Experiment ID: 20000227 Result: Down-regulated in Transcription
  misc_feature: MA Experiment 20000227 PARAMETER Experiment Name: At_Root-Tips-vs-Tops_P Parameter: Tissue Value: Root Tips vs. Root Tops
  misc_feature: MA Experiment ID: 20001905 Result: Down-regulated in Transcription
  misc_feature: MA Experiment 20001905 PARAMETER Experiment Name: At_Drought_Reproduction_P Parameter: Age (day) Value: 40
  misc_feature: MA Experiment 20001905 PARAMETER Experiment Name: At_Drought_Reproduction_P Parameter: Organism Value: A. thaliana
  misc_feature: MA Experiment 20001905 PARAMETER Experiment Name: At_Drought_Reproduction_P Parameter: Plant Line Value: WS
  misc_feature: MA Experiment 20001905 PARAMETER Experiment Name: At_Drought_Reproduction_P Parameter: Timepoint (day) Value: 10
  misc_feature: MA Experiment 20001905 PARAMETER Experiment Name: At_Drought_Reproduction_P Parameter: Tissue Value: Rosettes
  misc_feature: MA Experiment 20001905 PARAMETER Experiment Name: At_Drought_Reproduction_P Parameter: Treatment Value: Drought vs. No Drought
  misc_feature: MA Experiment ID: 20001906 Result: Down-regulated in Transcription
  misc_feature: MA Experiment 20001906 PARAMETER Experiment Name: At_Drought_Reproduction_P Parameter: Age (day) Value: 35
  misc_feature: MA Experiment 20001906 PARAMETER Experiment Name: At_Drought_Reproduction_P Parameter: Organism Value: A. thaliana
  misc_feature: MA Experiment 20001906 PARAMETER Experiment Name: At_Drought_Reproduction_P Parameter: Plant Line Value: WS
  misc_feature: MA Experiment 20001906 PARAMETER Experiment Name: At_Drought_Reproduction_P Parameter: Timepoint (day) Value: 5
  misc_feature: MA Experiment 20001906 PARAMETER Experiment Name: At_Drought_Reproduction_P Parameter: Tissue Value: Siliques
  misc_feature: MA Experiment 20001906 PARAMETER Experiment Name: At_Drought_Reproduction_P Parameter: Treatment Value: Drought vs. No Drought

SEQ ID NO: 43759 - protein, 306 aa, Arabidopsis thaliana; identical to SEQ ID NO: 40127
  peptide (1)..(306): Ceres Seq. ID no. 12481793
  misc_feature (39)..(298): Pfam Name: AUX/IAA family Pfam Description: AUX/IAA family
  misc_feature (39)..(298): Pfam Name: AUX/IAA family Pfam Description: AUX/IAA family
  misc_feature (9)..(58): Homolog of NCBI NO: 20269051 NR Description: aux/IAA protein [Populus tremula x Populus
  misc_feature (73)..(306): Homolog of NCBI NO: 20269051 NR Description: aux/IAA protein [Populus tremula x Populus
  misc_feature (9)..(102): Homolog of NCBI NO: 6136832 NR Description: CS-IAA2 [Cucumis sativus]
  misc_feature (73)..(306): Homolog of NCBI NO: 6136832 NR Description: CS-IAA2 [Cucumis sativus]
  misc_feature (73)..(306): Homolog of NCBI NO: 20269051 NR Description: aux/IAA protein [Populus tremula x Populus
  misc_feature (73)..(306): Homolog of NCBI NO: 6136832 NR Description: CS-IAA2 [Cucumis sativus]
  misc_feature (5)..(306): Homolog of NCBI NO: 25989504 NR Description: Aux/IAA protein [Solanum tuberosum]
  misc_feature (2)..(306): Homolog of NCBI NO: 15235556 NR Description: phytochrome-associated protein PAP2
  misc_feature (9)..(306): Homolog of NCBI NO: 16610193 NR Description: IAA9 protein [Nicotiana tabacum]
  misc_feature (9)..(102): Homolog of NCBI NO: 6136832 NR Description: CS-IAA2 [Cucumis sativus]
  misc_feature (9)..(58): Homolog of NCBI NO: 20269051 NR Description: aux/IAA protein [Populus tremula x Populus
  misc_feature (9)..(306): Homolog of NCBI NO: 16610193 NR Description: IAA9 protein [Nicotiana tabacum]
  misc_feature (5)..(306): Homolog of NCBI NO: 25989504 NR Description: Aux/IAA protein [Solanum tuberosum]
  misc_feature (2)..(306): Homolog of NCBI NO: 15235556 NR Description: phytochrome-associated protein PAP2

SEQ ID NO: 43760 - protein, 305 aa, Arabidopsis thaliana; identical to SEQ ID NO: 40128
  peptide (1)..(305): Ceres Seq. ID no. 12481794
  misc_feature (38)..(297): Pfam Name: AUX/IAA family Pfam Description: AUX/IAA family
  misc_feature (38)..(297): Pfam Name: AUX/IAA family Pfam Description: AUX/IAA family
  misc_feature (8)..(57): Homolog of NCBI NO: 20269051 NR Description: aux/IAA protein [Populus tremula x Populus
  misc_feature (72)..(305): Homolog of NCBI NO: 20269051 NR Description: aux/IAA protein [Populus tremula x Populus
  misc_feature (8)..(101): Homolog of NCBI NO: 6136832 NR Description: CS-IAA2 [Cucumis sativus]
  misc_feature (72)..(305): Homolog of NCBI NO: 6136832 NR Description: CS-IAA2 [Cucumis sativus]
  misc_feature (72)..(305): Homolog of NCBI NO: 20269051 NR Description: aux/IAA protein [Populus tremula x Populus
  misc_feature (72)..(305): Homolog of NCBI NO: 6136832 NR Description: CS-IAA2 [Cucumis sativus]
  misc_feature (4)..(305): Homolog of NCBI NO: 25989504 NR Description: Aux/IAA protein [Solanum tuberosum]
  misc_feature (1)..(305): Homolog of NCBI NO: 15235556 NR Description: phytochrome-associated protein PAP2
  misc_feature (8)..(305): Homolog of NCBI NO: 16610193 NR Description: IAA9 protein [Nicotiana tabacum]
  misc_feature (8)..(101): Homolog of NCBI NO: 6136832 NR Description: CS-IAA2 [Cucumis sativus]
  misc_feature (8)..(57): Homolog of NCBI NO: 20269051 NR Description: aux/IAA protein [Populus tremula x Populus
  misc_feature (8)..(305): Homolog of NCBI NO: 16610193 NR Description: IAA9 protein [Nicotiana tabacum]
  misc_feature (4)..(305): Homolog of NCBI NO: 25989504 NR Description: Aux/IAA protein [Solanum tuberosum]
  misc_feature (1)..(305): Homolog of NCBI NO: 15235556 NR Description: phytochrome-associated protein PAP2

SEQ ID NO: 43761 - protein, 286 aa, Arabidopsis thaliana; identical to SEQ ID NO: 40129
  peptide (1)..(286): Ceres Seq. ID no. 12481795
  misc_feature (19)..(278): Pfam Name: AUX/IAA family Pfam Description: AUX/IAA family
  misc_feature (19)..(278): Pfam Name: AUX/IAA family Pfam Description: AUX/IAA family
  misc_feature (1)..(38): Homolog of NCBI NO: 20269051 NR Description: aux/IAA protein [Populus tremula x Populus
  misc_feature (53)..(286): Homolog of NCBI NO: 20269051 NR Description: aux/IAA protein [Populus tremula x Populus
  misc_feature (1)..(82): Homolog of NCBI NO: 6136832 NR Description: CS-IAA2 [Cucumis sativus]
  misc_feature (53)..(286): Homolog of NCBI NO: 6136832 NR Description: CS-IAA2 [Cucumis sativus]
  misc_feature (53)..(286): Homolog of NCBI NO: 20269051 NR Description: aux/IAA protein [Populus tremula x Populus
  misc_feature (53)..(286): Homolog of NCBI NO: 6136832 NR Description: CS-IAA2 [Cucumis sativus]
  misc_feature (1)..(286): Homolog of NCBI NO: 25989504 NR Description: Aux/IAA protein [Solanum tuberosum]
  misc_feature (1)..(286): Homolog of NCBI NO: 15235556 NR Description: phytochrome-associated protein PAP2
  misc_feature (1)..(286): Homolog of NCBI NO: 16610193 NR Description: IAA9 protein [Nicotiana tabacum]
  misc_feature (1)..(82): Homolog of NCBI NO: 6136832 NR Description: CS-IAA2 [Cucumis sativus]
  misc_feature (1)..(38): Homolog of NCBI NO: 20269051 NR Description: aux/IAA protein [Populus tremula x Populus
  misc_feature (1)..(286): Homolog of NCBI NO: 16610193 NR Description: IAA9 protein [Nicotiana tabacum]
  misc_feature (1)..(286): Homolog of NCBI NO: 25989504 NR Description: Aux/IAA protein [Solanum tuberosum]
  misc_feature (1)..(286): Homolog of NCBI NO: 15235556 NR Description: phytochrome-associated protein PAP2

SEQ ID NO: 43762 - DNA, 780 bp, Arabidopsis thaliana; identical to SEQ ID NO: 21927
  misc_feature (1)..(780): Ceres Seq. ID no. 12331618
  misc_feature: MA Experiment ID: 20000180 Result: Up-regulated in Transcription
  misc_feature: MA Experiment 20000180 PARAMETER Experiment Name: At_Germinating_Seeds_P Parameter: Age (hr) Value: 24 vs. 0
  misc_feature: MA Experiment 20000180 PARAMETER Experiment Name: At_Germinating_Seeds_P Parameter: Tissue Value: Germinating Seeds
  misc_feature: MA Experiment ID: 20000184 Result: Up-regulated in Transcription
  misc_feature: MA Experiment 20000184 PARAMETER Experiment Name: At_Shoots__P Parameter: Age (day) Value: 7
  misc_feature: MA Experiment 20000184 PARAMETER Experiment Name: At_Shoots__P Parameter: Tissue Value: Shoots vs. Whole Plant
  misc_feature: MA Experiment ID: 20000185 Result: Down-regulated in Transcription
  misc_feature: MA Experiment 20000185 PARAMETER Experiment Name: At_Roots__P Parameter: Age (day) Value: 7 vs. 21
  misc_feature: MA Experiment 20000185 PARAMETER Experiment Name: At_Roots__P Parameter: Organism Value: A. thaliana
  misc_feature: MA Experiment 20000185 PARAMETER Experiment Name: At_Roots__P Parameter: Tissue Value: Roots vs. Whole Plant
  misc_feature: MA Experiment ID: 20000286 Result: Down-regulated in Transcription
  misc_feature: MA Experiment 20000286 PARAMETER Experiment Name: At_Open_Flower_P Parameter: Age (day) Value: 21
  misc_feature: MA Experiment 20000286 PARAMETER Experiment Name: At_Open_Flower_P Parameter: Plant Line Value: WS
  misc_feature: MA Experiment 20000286 PARAMETER Experiment Name: At_Open_Flower_P Parameter: Tissue Value: Half Open vs. Whole Plant
  misc_feature: MA Experiment ID: 20000437 Result: Down-regulated in Transcription
  misc_feature: MA Experiment 20000437 PARAMETER Experiment Name: At_Drought_P Parameter: Age (day) Value: 8
  misc_feature: MA Experiment 20000437 PARAMETER Experiment Name: At_Drought_P Parameter: Organism Value: A. thaliana
  misc_feature: MA Experiment 20000437 PARAMETER Experiment Name: At_Drought_P Parameter: Plant Line Value: WS
  misc_feature: MA Experiment 20000437 PARAMETER Experiment Name: At_Drought_P Parameter: Timepoint (hr) Value: 24
  misc_feature: MA Experiment 20000437 PARAMETER Experiment Name: At_Drought_P Parameter: Tissue Value: Whole Plant
  misc_feature: MA Experiment 20000437 PARAMETER Experiment Name: At_Drought_P Parameter: Treatment Value: Drought vs. No Drought
  misc_feature: MA Experiment ID: 20000438 Result: Up-regulated in Transcription
  misc_feature: MA Experiment 20000438 PARAMETER Experiment Name: At_Shoots__P Parameter: Age (day) Value: 14
  misc_feature: MA Experiment 20000438 PARAMETER Experiment Name: At_Shoots__P Parameter: Tissue Value: Shoots vs. Whole Plant
  misc_feature: MA Experiment ID: 20000439 Result: Down-regulated in Transcription
  misc_feature: MA Experiment 20000439 PARAMETER Experiment Name: At_Roots__P Parameter: Age (day) Value: 14 vs. 21
  misc_feature: MA Experiment 20000439 PARAMETER Experiment Name: At_Roots__P Parameter: Organism Value: A. thaliana
  misc_feature: MA Experiment 20000439 PARAMETER Experiment Name: At_Roots__P Parameter: Tissue Value: Roots vs. Whole Plant
  misc_feature: MA Experiment ID: 20000527 Result: Down-regulated in Transcription
  misc_feature: MA Experiment 20000527 PARAMETER Experiment Name: At_10percent_PEG_P Parameter: Age (day) Value: 20
  misc_feature: MA Experiment 20000527 PARAMETER Experiment Name: At_10percent_PEG_P Parameter: Organism Value: A. thaliana
  misc_feature: MA Experiment 20000527 PARAMETER Experiment Name: At_10percent_PEG_P Parameter: Plant Line Value: WS
  misc_feature: MA Experiment 20000527 PARAMETER Experiment Name: At_10percent_PEG_P Parameter: Timepoint (day) Value: 20
  misc_feature: MA Experiment 20000527 PARAMETER Experiment Name: At_10percent_PEG_P Parameter: Tissue Value: Whole Plant
  misc_feature: MA Experiment 20000527 PARAMETER Experiment Name: At_10percent_PEG_P Parameter: Treatment Value: 10percent PEG vs. No Treatment
  misc_feature: MA Experiment ID: 20000573 Result: Down-regulated in Transcription
  misc_feature: MA Experiment 20000573 PARAMETER Experiment Name: At_100uM_ABA_Mutants__P Parameter: Organism Value: A. thaliana
  misc_feature: MA Experiment 20000573 PARAMETER Experiment Name: At_100uM_ABA_Mutants__P Parameter: Plant Line Value: CS22 vs. Ler wt
  misc_feature: MA Experiment 20000573 PARAMETER Experiment Name: At_100uM_ABA_Mutants__P Parameter: Timepoint (hr) Value: N/A
  misc_feature: MA Experiment 20000573 PARAMETER Experiment Name: At_100uM_ABA_Mutants__P Parameter: Tissue Value: Whole Plant
  misc_feature: MA Experiment 20000573 PARAMETER Experiment Name: At_100uM_ABA_Mutants__P Parameter: Treatment Value: None
  misc_feature: MA Experiment ID: 20000574 Result: Down-regulated in Transcription
  misc_feature: MA Experiment 20000574 PARAMETER Experiment Name: At_100uM_ABA_Mutants__P Parameter: Organism Value: A. thaliana
  misc_feature: MA Experiment 20000574 PARAMETER Experiment Name: At_100uM_ABA_Mutants__P Parameter: Plant Line Value: CS23 vs. Ler wt
  misc_feature: MA Experiment 20000574 PARAMETER Experiment Name: At_100uM_ABA_Mutants__P Parameter: Timepoint (hr) Value: N/A
  misc_feature: MA Experiment 20000574 PARAMETER Experiment Name: At_100uM_ABA_Mutants__P Parameter: Tissue Value: Whole Plant
  misc_feature: MA Experiment 20000574 PARAMETER Experiment Name: At_100uM_ABA_Mutants__P Parameter: Treatment Value: None
  misc_feature: MA Experiment ID: 20000794 Result: Down-regulated in Transcription
  misc_feature: MA Experiment 20000794 PARAMETER Experiment Name: At_Petals_P Parameter: Age (day) Value: 23-25 days
  misc_feature: MA Experiment 20000794 PARAMETER Experiment Name: At_Petals_P Parameter: Plant Line Value: WS
  misc_feature: MA Experiment 20000794 PARAMETER Experiment Name: At_Petals_P Parameter: Tissue Value: Petals vs. Whole plant
  misc_feature: MA Experiment ID: 20001248 Result: Down-regulated in Transcription
  misc_feature: MA Experiment 20001248 PARAMETER Experiment Name: At_Far-red-induction_P Parameter: Age (day) Value: 7
  misc_feature: MA Experiment 20001248 PARAMETER Experiment Name: At_Far-red-induction_P Parameter: Light Value: Far-red vs. White
  misc_feature: MA Experiment 20001248 PARAMETER Experiment Name: At_Far-red-induction_P Parameter: Organism Value: A. thaliana
  misc_feature: MA Experiment 20001248 PARAMETER Experiment Name: At_Far-red-induction_P Parameter: Plant Line Value: Columbia
  misc_feature: MA Experiment 20001248 PARAMETER Experiment Name: At_Far-red-induction_P Parameter: Timepoint (hr) Value: 4
  misc_feature: MA Experiment 20001248 PARAMETER Experiment Name: At_Far-red-induction_P Parameter: Tissue Value: Whole Plant
  misc_feature: MA Experiment ID: 20001555 Result: Down-regulated in Transcription
  misc_feature: MA Experiment 20001555 PARAMETER Experiment Name: At_Drought_Soil_Dry_P Parameter: Age (day) Value: 24
  misc_feature: MA Experiment 20001555 PARAMETER Experiment Name: At_Drought_Soil_Dry_P Parameter: Organism Value: A. thaliana
  misc_feature: MA Experiment 20001555 PARAMETER Experiment Name: At_Drought_Soil_Dry_P Parameter: Plant Line Value: WS
  misc_feature: MA Experiment 20001555 PARAMETER Experiment Name: At_Drought_Soil_Dry_P Parameter: Post Timepoint (hr) Value: None
  misc_feature: MA Experiment 20001555 PARAMETER Experiment Name: At_Drought_Soil_Dry_P Parameter: Post-Treatment Value: None
  misc_feature: MA Experiment 20001555 PARAMETER Experiment Name: At_Drought_Soil_Dry_P Parameter: Timepoint (day) Value: 10
  misc_feature: MA Experiment 20001555 PARAMETER Experiment Name: At_Drought_Soil_Dry_P Parameter: Treatment Value: Drought vs. No Drought
  misc_feature: MA Experiment ID: 20001556 Result: Down-regulated in Transcription
  misc_feature: MA Experiment 20001556 PARAMETER Experiment Name: At_Drought_Soil_Dry_P Parameter: Age (day) Value: 26
  misc_feature: MA Experiment 20001556 PARAMETER Experiment Name: At_Drought_Soil_Dry_P Parameter: Organism Value: A. thaliana
  misc_feature: MA Experiment 20001556 PARAMETER Experiment Name: At_Drought_Soil_Dry_P Parameter: Plant Line Value: WS
  misc_feature: MA Experiment 20001556 PARAMETER Experiment Name: At_Drought_Soil_Dry_P Parameter: Post Timepoint (hr) Value: None
  misc_feature: MA Experiment 20001556 PARAMETER Experiment Name: At_Drought_Soil_Dry_P Parameter: Post-Treatment Value: None
  misc_feature: MA Experiment 20001556 PARAMETER Experiment Name: At_Drought_Soil_Dry_P Parameter: Timepoint (day) Value: 12
  misc_feature: MA Experiment 20001556 PARAMETER Experiment Name: At_Drought_Soil_Dry_P Parameter: Treatment Value: Drought vs. No Drought
  misc_feature: MA Experiment ID: 20001557 Result: Down-regulated in Transcription
  misc_feature: MA Experiment 20001557 PARAMETER Experiment Name: At_Drought_Soil_Dry_P Parameter: Age (day) Value: 27
  misc_feature: MA Experiment 20001557 PARAMETER Experiment Name: At_Drought_Soil_Dry_P Parameter: Organism Value: A. thaliana
  misc_feature: MA Experiment 20001557 PARAMETER Experiment Name: At_Drought_Soil_Dry_P Parameter: Plant Line Value: WS
  misc_feature: MA Experiment 20001557 PARAMETER Experiment Name: At_Drought_Soil_Dry_P Parameter: Post Timepoint (hr) Value: 3
  misc_feature: MA Experiment 20001557 PARAMETER Experiment Name: At_Drought_Soil_Dry_P Parameter: Post-Treatment Value: Re-Water vs. No Drought
  misc_feature: MA Experiment 20001557 PARAMETER Experiment Name: At_Drought_Soil_Dry_P Parameter: Timepoint (day) Value: 13
  misc_feature: MA Experiment 20001557 PARAMETER Experiment Name: At_Drought_Soil_Dry_P Parameter: Treatment Value: Drought vs. No Drought
  misc_feature: MA Experiment ID: 20001558 Result: Down-regulated in Transcription
  misc_feature: MA Experiment 20001558 PARAMETER Experiment Name: At_Drought_Soil_Dry_P Parameter: Age (day) Value: 27
  misc_feature: MA Experiment 20001558 PARAMETER Experiment Name: At_Drought_Soil_Dry_P Parameter: Organism Value: A. thaliana
  misc_feature: MA Experiment 20001558 PARAMETER Experiment Name: At_Drought_Soil_Dry_P Parameter: Plant Line Value: WS
  misc_feature: MA Experiment 20001558 PARAMETER Experiment Name: At_Drought_Soil_Dry_P Parameter: Post Timepoint (hr) Value: 6
  misc_feature: MA Experiment 20001558 PARAMETER Experiment Name: At_Drought_Soil_Dry_P Parameter: Post-Treatment Value: Re-Water vs. No Drought
  misc_feature: MA Experiment 20001558 PARAMETER Experiment Name: At_Drought_Soil_Dry_P Parameter: Timepoint (day) Value: 13
  misc_feature: MA Experiment 20001558 PARAMETER Experiment Name: At_Drought_Soil_Dry_P Parameter: Treatment Value: Drought vs. No Drought
  misc_feature: MA Experiment ID: 20001757 Result: Up-regulated in Transcription
  misc_feature: MA Experiment 20001757 PARAMETER Experiment Name: At_50mM_NH4NO3_L-to-H_P Parameter: Timepoint (hr) Value: 6
  misc_feature: MA Experiment 20001757 PARAMETER Experiment Name: At_50mM_NH4NO3_L-to-H_P Parameter: Tissue Value: Leaf
  misc_feature: MA Experiment 20001757 PARAMETER Experiment Name: At_50mM_NH4NO3_L-to-H_P Parameter: Treatment Value: 50mM NH4NO3 vs 100mM Mannitol
  misc_feature: MA Experiment ID: 20001904 Result: Down-regulated in Transcription
  misc_feature: MA Experiment 20001904 PARAMETER Experiment Name: At_Drought_Reproduction_P Parameter: Age (day) Value: 37
  misc_feature: MA Experiment 20001904 PARAMETER Experiment Name: At_Drought_Reproduction_P Parameter: Organism Value: A. thaliana
  misc_feature: MA Experiment 20001904 PARAMETER Experiment Name: At_Drought_Reproduction_P Parameter: Plant Line Value: WS
  misc_feature: MA Experiment 20001904 PARAMETER Experiment Name: At_Drought_Reproduction_P Parameter: Timepoint (day) Value: 7
  misc_feature: MA Experiment 20001904 PARAMETER Experiment Name: At_Drought_Reproduction_P Parameter: Tissue Value: Rosettes
  misc_feature: MA Experiment 20001904 PARAMETER Experiment Name: At_Drought_Reproduction_P Parameter: Treatment Value: Drought vs. No Drought
  misc_feature: MA Experiment ID: 20001905 Result: Down-regulated in Transcription
  misc_feature: MA Experiment 20001905 PARAMETER Experiment Name: At_Drought_Reproduction_P Parameter: Age (day) Value: 40
  misc_feature: MA Experiment 20001905 PARAMETER Experiment Name: At_Drought_Reproduction_P Parameter: Organism Value: A. thaliana
  misc_feature: MA Experiment 20001905 PARAMETER Experiment Name: At_Drought_Reproduction_P Parameter: Plant Line Value: WS
  misc_feature: MA Experiment 20001905 PARAMETER Experiment Name: At_Drought_Reproduction_P Parameter: Timepoint (day) Value: 10
  misc_feature: MA Experiment 20001905 PARAMETER Experiment Name: At_Drought_Reproduction_P Parameter: Tissue Value: Rosettes
  misc_feature: MA Experiment 20001905 PARAMETER Experiment Name: At_Drought_Reproduction_P Parameter: Treatment Value: Drought vs. No Drought
  misc_feature: MA Experiment ID: 20001906 Result: Down-regulated in Transcription
  misc_feature: MA Experiment 20001906 PARAMETER Experiment Name: At_Drought_Reproduction_P Parameter: Age (day) Value: 35
  misc_feature: MA Experiment 20001906 PARAMETER Experiment Name: At_Drought_Reproduction_P Parameter: Organism Value: A. thaliana
  misc_feature: MA Experiment 20001906 PARAMETER Experiment Name: At_Drought_Reproduction_P Parameter: Plant Line Value: WS
  misc_feature: MA Experiment 20001906 PARAMETER Experiment Name: At_Drought_Reproduction_P Parameter: Timepoint (day) Value: 5
  misc_feature: MA Experiment 20001906 PARAMETER Experiment Name: At_Drought_Reproduction_P Parameter: Tissue Value: Siliques
  misc_feature: MA Experiment 20001906 PARAMETER Experiment Name: At_Drought_Reproduction_P Parameter: Treatment Value: Drought vs. No Drought
  misc_feature: MA Experiment ID: 20001908 Result: Down-regulated in Transcription
  misc_feature: MA Experiment 20001908 PARAMETER Experiment Name: At_Drought_Reproduction_P Parameter: Age (day) Value: 40
  misc_feature: MA Experiment 20001908 PARAMETER Experiment Name: At_Drought_Reproduction_P Parameter: Organism Value: A. thaliana
  misc_feature: MA Experiment 20001908 PARAMETER Experiment Name: At_Drought_Reproduction_P Parameter: Plant Line Value: WS
  misc_feature: MA Experiment 20001908 PARAMETER Experiment Name: At_Drought_Reproduction_P Parameter: Timepoint (day) Value: 10
  misc_feature: MA Experiment 20001908 PARAMETER Experiment Name: At_Drought_Reproduction_P Parameter: Tissue Value: Siliques
  misc_feature: MA Experiment 20001908 PARAMETER Experiment Name: At_Drought_Reproduction_P Parameter: Treatment Value: Drought vs. No Drought

SEQ ID NO: 43763 - protein, 222 aa, Arabidopsis thaliana; identical to SEQ ID NO: 21928
  peptide (1)..(222): Ceres Seq. ID no. 12331619
  misc_feature (84)..(221): Pfam Name: PsaD Pfam Description: PsaD
  misc_feature (84)..(221): Pfam Name: PsaD Pfam Description: PsaD
  misc_feature (84)..(221): Pfam Name: PsaD Pfam Description: PsaD
  misc_feature (19)..(222): Homolog of NCBI NO: 131166 NR Description: Photosystem I reaction center subunit II,
  misc_feature (19)..(222): Homolog of NCBI NO: 131167 NR Description: Photosystem I reaction center subunit II,
  misc_feature (19)..(222): Homolog of NCBI NO: 34787117 NR Description: putative photosystem I reaction centre PSI-D
  misc_feature (19)..(222): Homolog of NCBI NO: 21293 NR Description: 20 kDa protein (AA 1-212) [Spinacia oleracea]
  misc_feature (19)..(222): Homolog of NCBI NO: 19855891 NR Description: Photosystem I reaction center subunit II,
  misc_feature (19)..(222): Homolog of NCBI NO: 131166 NR Description: Photosystem I reaction center subunit II,
  misc_feature (19)..(222): Homolog of NCBI NO: 34787117 NR Description: putative photosystem I reaction centre PSI-D
  misc_feature (19)..(222): Homolog of NCBI NO: 19855891 NR Description: Photosystem I reaction center subunit II,
  misc_feature (19)..(222): Homolog of NCBI NO: 21293 NR Description: 20 kDa protein (AA 1-212) [Spinacia oleracea]
  misc_feature (19)..(222): Homolog of NCBI NO: 34787117 NR Description: putative photosystem I reaction centre PSI-D
  misc_feature (19)..(222): Homolog of NCBI NO: 131167 NR Description: Photosystem I reaction center subunit II,
  misc_feature (19)..(222): Homolog of NCBI NO: 131166 NR Description: Photosystem I reaction center subunit II,
  misc_feature (19)..(222): Homolog of NCBI NO: 15218708 NR Description: putative photosystem I reaction center subunit II
  misc_feature (19)..(222): Homolog of NCBI NO: 5732201 NR Description: photosystem I subunit II precursor [Arabidopsis
  misc_feature (19)..(222): Homolog of NCBI NO: 15235503 NR Description: putative photosystem I reaction center subunit II
  misc_feature (19)..(222): Homolog of NCBI NO: 21595031 NR Description: putative photosystem I reaction center subunit II
  misc_feature (19)..(222): Homolog of NCBI NO: 72680 NR Description: photosystem I chain II precursor - spinach
  misc_feature (19)..(222): Homolog of NCBI NO: 15218708 NR Description: putative photosystem I reaction center subunit II
  misc_feature (19)..(222): Homolog of NCBI NO: 5732201 NR Description: photosystem I subunit II precursor [Arabidopsis
  misc_feature (19)..(222): Homolog of NCBI NO: 15235503 NR Description: putative photosystem I reaction center subunit II
  misc_feature (19)..(222): Homolog of NCBI NO: 21595031 NR Description: putative photosystem I reaction center subunit II
  misc_feature (19)..(222): Homolog of NCBI NO: 72680 NR Description: photosystem I chain II precursor - spinach
  misc_feature (19)..(222): Homolog of NCBI NO: 19855891 NR Description: Photosystem I reaction center subunit II,
  misc_feature (19)..(222): Homolog of NCBI NO: 21293 NR Description: 20 kDa protein (AA 1-212) [Spinacia oleracea]
  misc_feature (19)..(222): Homolog of NCBI NO: 131167 NR Description: Photosystem I reaction center subunit II,
  misc_feature (19)..(222): Homolog of NCBI NO: 72680 NR Description: photosystem I chain II precursor - spinach
  misc_feature (19)..(222): Homolog of NCBI NO: 21595031 NR Description: putative photosystem I reaction center subunit II
  misc_feature (19)..(222): Homolog of NCBI NO: 15235503 NR Description: putative photosystem I reaction center subunit II
  misc_feature (19)..(222): Homolog of NCBI NO: 5732201 NR Description: photosystem I subunit II precursor [Arabidopsis
  misc_feature (19)..(222): Homolog of NCBI NO: 15218708 NR Description: putative photosystem I reaction center subunit II

SEQ ID NO: 43764 - protein, 204 aa, Arabidopsis thaliana; identical to SEQ ID NO: 21929
  peptide (1)..(204): Ceres Seq. ID no. 12331620
  misc_feature (66)..(203): Pfam Name: PsaD Pfam Description: PsaD
  misc_feature (66)..(203): Pfam Name: PsaD Pfam Description: PsaD
  misc_feature (66)..(203): Pfam Name: PsaD Pfam Description: PsaD
  misc_feature (1)..(204): Homolog of NCBI NO: 131166 NR Description: Photosystem I reaction center subunit II,
  misc_feature (1)..(204): Homolog of NCBI NO: 131167 NR Description: Photosystem I reaction center subunit II,
  misc_feature (1)..(204): Homolog of NCBI NO: 34787117 NR Description: putative photosystem I reaction centre PSI-D
  misc_feature (1)..(204): Homolog of NCBI NO: 21293 NR Description: 20 kDa protein (AA 1-212) [Spinacia oleracea]
  misc_feature (1)..(204): Homolog of NCBI NO: 19855891 NR Description: Photosystem I reaction center subunit II,
  misc_feature (1)..(204): Homolog of NCBI NO: 5732201 NR Description: photosystem I subunit II precursor [Arabidopsis
  misc_feature (1)..(204): Homolog of NCBI NO: 131167 NR Description: Photosystem I reaction center subunit II,
  misc_feature (1)..(204): Homolog of NCBI NO: 34787117 NR Description: putative photosystem I reaction centre PSI-D
  misc_feature (1)..(204): Homolog of NCBI NO: 131167 NR Description: Photosystem I reaction center subunit II,
  misc_feature (1)..(204): Homolog of NCBI NO: 131166 NR Description: Photosystem I reaction center subunit II,
  misc_feature (1)..(204): Homolog of NCBI NO: 15235503 NR Description: putative photosystem I reaction center subunit II
  misc_feature (1)..(204): Homolog of NCBI NO: 21595031 NR Description: putative photosystem I reaction center subunit II
  misc_feature (1)..(204): Homolog of NCBI NO: 72680 NR Description: photosystem I chain II precursor - spinach
  misc_feature (1)..(204): Homolog of NCBI NO: 19855891 NR Description: Photosystem I reaction center subunit II,
  misc_feature (1)..(204): Homolog of NCBI NO: 21293 NR Description: 20 kDa protein (AA 1-212) [Spinacia oleracea]
  misc_feature (1)..(204): Homolog of NCBI NO: 34787117 NR Description: putative photosystem I reaction centre PSI-D
  misc_feature (1)..(204): Homolog of NCBI NO: 15218708 NR Description: putative photosystem I reaction center subunit II
  misc_feature (1)..(204): Homolog of NCBI NO: 5732201 NR Description: photosystem I subunit II precursor [Arabidopsis
  misc_feature (1)..(204): Homolog of NCBI NO: 15235503 NR Description: putative photosystem I reaction center subunit II
  misc_feature (1)..(204): Homolog of NCBI NO: 21595031 NR Description: putative photosystem I reaction center subunit II
  misc_feature (1)..(204): Homolog of NCBI NO: 72680 NR Description: photosystem I chain II precursor - spinach
  misc_feature (1)..(204): Homolog of NCBI NO: 19855891 NR Description: Photosystem I reaction center subunit II,
  misc_feature (1)..(204): Homolog of NCBI NO: 21293 NR Description: 20 kDa protein (AA 1-212) [Spinacia oleracea]
  misc_feature (1)..(204): Homolog of NCBI NO: 131166 NR Description: Photosystem I reaction center subunit II,
  misc_feature (1)..(204): Homolog of NCBI NO: 15218708 NR Description: putative photosystem I reaction center subunit II
  misc_feature (1)..(204): Homolog of NCBI NO: 72680 NR Description: photosystem I chain II precursor - spinach
  misc_feature (1)..(204): Homolog of NCBI NO: 21595031 NR Description: putative photosystem I reaction center subunit II
  misc_feature (1)..(204): Homolog of NCBI NO: 15235503 NR Description: putative photosystem I reaction center subunit II
  misc_feature (1)..(204): Homolog of NCBI NO: 5732201 NR Description: photosystem I subunit II precursor [Arabidopsis
  misc_feature (1)..(204): Homolog of NCBI NO: 15218708 NR Description: putative photosystem I reaction center subunit II

SEQ ID NO: 43765 - DNA, 854 bp, Arabidopsis thaliana; identical to SEQ ID NO: 40130
  misc_feature (1)..(854): Ceres Seq. ID no. 13497569
  misc_feature: MA Experiment ID: 20000069 Result: Up-regulated in Transcription
  misc_feature: MA Experiment 20000069 PARAMETER Experiment Name: At_100uM_ABA_Mutants_cDNA_P Parameter: Plant Line Value: CS23
  misc_feature: MA Experiment 20000069 PARAMETER Experiment Name: At_100uM_ABA_Mutants_cDNA_P Parameter: Timepoint (hr) Value: 6
  misc_feature: MA Experiment 20000069 PARAMETER Experiment Name: At_100uM_ABA_Mutants_cDNA_P Parameter: Tissue Value: Aerial
  misc_feature: MA Experiment 20000069 PARAMETER Experiment Name: At_100uM_ABA_Mutants_cDNA_P Parameter: Treatment Value: 100uM ABA vs. No Treatment
  misc_feature: MA Experiment ID: 20000070 Result: Up-regulated in Transcription
  misc_feature: MA Experiment 20000070 PARAMETER Experiment Name: At_100uM_ABA_Mutants_cDNA_P Parameter: Plant Line Value: CS24
  misc_feature: MA Experiment 20000070 PARAMETER Experiment Name: At_100uM_ABA_Mutants_cDNA_P Parameter: Timepoint (hr) Value: 6
  misc_feature: MA Experiment 20000070 PARAMETER Experiment Name: At_100uM_ABA_Mutants_cDNA_P Parameter: Tissue Value: Aerial
  misc_feature: MA Experiment 20000070 PARAMETER Experiment Name: At_100uM_ABA_Mutants_cDNA_P Parameter: Treatment Value: 100uM ABA vs. No Treatment
  misc_feature: MA Experiment ID: 20000071 Result: Up-regulated in Transcription
  misc_feature: MA Experiment 20000071 PARAMETER Experiment Name: At_100uM_ABA_Mutants_cDNA_P Parameter: Plant Line Value: CS8104
  misc_feature: MA Experiment 20000071 PARAMETER Experiment Name: At_100uM_ABA_Mutants_cDNA_P Parameter: Timepoint (hr) Value: 6
  misc_feature: MA Experiment 20000071 PARAMETER Experiment Name: At_100uM_ABA_Mutants_cDNA_P Parameter: Tissue Value: Aerial
  misc_feature: MA Experiment 20000071 PARAMETER Experiment Name: At_100uM_ABA_Mutants_cDNA_P Parameter: Treatment Value: 100uM ABA vs. No Treatment
  misc_feature: MA Experiment ID: 20000072 Result: Up-regulated in Transcription
  misc_feature: MA Experiment 20000072 PARAMETER Experiment Name: At_100uM_ABA_Mutants_cDNA_P Parameter: Plant Line Value: CS8105
  misc_feature: MA Experiment 20000072 PARAMETER Experiment Name: At_100uM_ABA_Mutants_cDNA_P Parameter: Timepoint (hr) Value: 6
  misc_feature: MA Experiment 20000072 PARAMETER Experiment Name: At_100uM_ABA_Mutants_cDNA_P Parameter: Tissue Value: Aerial
  misc_feature: MA Experiment 20000072 PARAMETER Experiment Name: At_100uM_ABA_Mutants_cDNA_P Parameter: Treatment Value: 100uM ABA vs. No Treatment
  misc_feature: MA Experiment ID: 20000086 Result: Up-regulated in Transcription
  misc_feature: MA Experiment 20000086 PARAMETER Experiment Name: At_100uM_ABA_Mutants_cDNA_P Parameter: Plant Line Value: CS22
  misc_feature: MA Experiment 20000086 PARAMETER Experiment Name: At_100uM_ABA_Mutants_cDNA_P Parameter: Timepoint (hr) Value: 6
  misc_feature: MA Experiment 20000086 PARAMETER Experiment Name: At_100uM_ABA_Mutants_cDNA_P Parameter: Tissue Value: Aerial
  misc_feature: MA Experiment 20000086 PARAMETER Experiment Name: At_100uM_ABA_Mutants_cDNA_P Parameter: Treatment Value: 100uM ABA vs. No Treatment
  misc_feature: MA Experiment ID: 20000087 Result: Up-regulated in Transcription
  misc_feature: MA Experiment 20000087 PARAMETER Experiment Name: At_100uM_ABA_Mutants_cDNA_P Parameter: Plant Line Value: WS
  misc_feature: MA Experiment 20000087 PARAMETER Experiment Name: At_100uM_ABA_Mutants_cDNA_P Parameter: Timepoint (hr) Value: 6
  misc_feature: MA Experiment 20000087 PARAMETER Experiment Name: At_100uM_ABA_Mutants_cDNA_P Parameter: Tissue Value: Aerial
  misc_feature: MA Experiment 20000087 PARAMETER Experiment Name: At_100uM_ABA_Mutants_cDNA_P Parameter: Treatment Value: 100uM ABA vs. No Treatment
  misc_feature: MA Experiment ID: 20000088 Result: Up-regulated in Transcription
  misc_feature: MA Experiment 20000088 PARAMETER Experiment Name: At_100uM_ABA_Mutants_cDNA_P Parameter: Plant Line Value: Landsberg
  misc_feature: MA Experiment 20000088 PARAMETER Experiment Name: At_100uM_ABA_Mutants_cDNA_P Parameter: Timepoint (hr) Value: 6
  misc_feature: MA Experiment 20000088 PARAMETER Experiment Name: At_100uM_ABA_Mutants_cDNA_P Parameter: Tissue Value: Aerial
  misc_feature: MA Experiment 20000088 PARAMETER Experiment Name: At_100uM_ABA_Mutants_cDNA_P Parameter: Treatment Value: 100uM ABA vs. No Treatment
  misc_feature: MA Experiment ID: 20000089 Result: Up-regulated in Transcription
  misc_feature: MA Experiment ID: 20000090 Result: Up-regulated in Transcription
  misc_feature: MA Experiment ID: 20000117 Result: Up-regulated in Transcription
  misc_feature: MA Experiment 20000117 PARAMETER Experiment Name: At_100uM_ABA_Mutants_cDNA_P Parameter: Plant Line Value: Columbia
  misc_feature: MA Experiment 20000117 PARAMETER Experiment Name: At_100uM_ABA_Mutants_cDNA_P Parameter: Timepoint (hr) Value: 6
  misc_feature: MA Experiment 20000117 PARAMETER Experiment Name: At_100uM_ABA_Mutants_cDNA_P Parameter: Tissue Value: Aerial
  misc_feature: MA Experiment 20000117 PARAMETER Experiment Name: At_100uM_ABA_Mutants_cDNA_P Parameter: Treatment Value: 100uM ABA vs. No Treatment
  misc_feature: MA Experiment ID: 20001248 Result: Up-regulated in Transcription
  misc_feature: MA Experiment 20001248 PARAMETER Experiment Name: At_Far-red-induction_P Parameter: Age (day) Value: 7
  misc_feature: MA Experiment 20001248 PARAMETER Experiment Name: At_Far-red-induction_P Parameter: Light Value: Far-red vs. White
  misc_feature: MA Experiment 20001248 PARAMETER Experiment Name: At_Far-red-induction_P Parameter: Organism Value: A. thaliana
  misc_feature: MA Experiment 20001248 PARAMETER Experiment Name: At_Far-red-induction_P Parameter: Plant Line Value: Columbia
  misc_feature: MA Experiment 20001248 PARAMETER Experiment Name: At_Far-red-induction_P Parameter: Timepoint (hr) Value: 4
  misc_feature: MA Experiment 20001248 PARAMETER Experiment Name: At_Far-red-induction_P Parameter: Tissue Value: Whole Plant

SEQ ID NO: 43766 - protein, 142 aa, Arabidopsis thaliana; identical to SEQ ID NO: 40131
  peptide (1)..(142): Ceres Seq. ID no. 13497570
  misc_feature (87)..(141): Pfam Name: Helix-turn-helix Pfam Description: Helix-turn-helix
  misc_feature (87)..(141): Pfam Name: Helix-turn-helix Pfam Description: Helix-turn-helix
  misc_feature (87)..(141): Pfam Name: Helix-turn-helix Pfam Description: Helix-turn-helix
  misc_feature (10)..(141): Homolog of NCBI NO: 4503453 NR Description: endothelial differentiation-related factor 1
  misc_feature (5)..(141): Homolog of NCBI NO: 19225065 NR Description: ethylene-responsive transciptional
  misc_feature (7)..(141): Homolog of NCBI NO: 21553721 NR Description: ethylene-responsive transcriptional coactivator,
  misc_feature (5)..(141): Homolog of NCBI NO: 15230125 NR Description: ethylene-responsive transcriptional coactivator
  misc_feature (5)..(142): Homolog of NCBI NO: 20086364 NR Description: putative multiprotein bridging factor 1
  misc_feature (10)..(141): Homolog of NCBI NO: 4503453 NR Description: endothelial differentiation-related factor 1
  misc_feature (7)..(141): Homolog of NCBI NO: 21553721 NR Description: ethylene-responsive transcriptional coactivator,
  misc_feature (5)..(142): Homolog of NCBI NO: 20086364 NR Description: putative multiprotein bridging factor 1
  misc_feature (5)..(141): Homolog of NCBI NO: 15230125 NR Description: ethylene-responsive transcriptional coactivator
  misc_feature (7)..(141): Homolog of NCBI NO: 21553721 NR Description: ethylene-responsive transcriptional coactivator,
  misc_feature (5)..(141): Homolog of NCBI NO: 19225065 NR Description: ethylene-responsive transciptional
  misc_feature (10)..(141): Homolog of NCBI NO: 4503453 NR Description: endothelial differentiation-related factor 1
  misc_feature (1)..(142): Homolog of NCBI NO: 15231105 NR Description: transcriptional coactivator - like protein
  misc_feature (1)..(142): Homolog of NCBI NO: 18406032 NR Description: expressed protein [Arabidopsis thaliana]
  misc_feature (1)..(142): Homolog of NCBI NO: 7488897 NR Description: hypothetical protein - castor bean
  misc_feature (1)..(142): Homolog of NCBI NO: 38637102 NR Description: putative ethylene-responsive transcriptional
  misc_feature (7)..(142): Homolog of NCBI NO: 8895787 NR Description: multiprotein bridging factor 1 [Solanum tuberosum]
  misc_feature (1)..(142): Homolog of NCBI NO: 15231105 NR Description: transcriptional coactivator - like protein
  misc_feature (1)..(142): Homolog of NCBI NO: 18406032 NR Description: expressed protein [Arabidopsis thaliana]
  misc_feature (1)..(142): Homolog of NCBI NO: 7488897 NR Description: hypothetical protein - castor bean
  misc_feature (1)..(142): Homolog of NCBI NO: 38637102 NR Description: putative ethylene-responsive transcriptional
  misc_feature (7)..(142): Homolog of NCBI NO: 8895787 NR Description: multiprotein bridging factor 1 [Solanum tuberosum]
  misc_feature (5)..(142): Homolog of NCBI NO: 20086364 NR Description: putative multiprotein bridging factor 1
  misc_feature (5)..(141): Homolog of NCBI NO: 15230125 NR Description: ethylene-responsive transcriptional coactivator
  misc_feature (5)..(141): Homolog of NCBI NO: 19225065 NR Description: ethylene-responsive transciptional
  misc_feature (7)..(142): Homolog of NCBI NO: 8895787 NR Description: multiprotein bridging factor 1 [Solanum tuberosum]
  misc_feature (1)..(142): Homolog of NCBI NO: 38637102 NR Description: putative ethylene-responsive transcriptional
  misc_feature (1)..(142): Homolog of NCBI NO: 7488897 NR Description: hypothetical protein - castor bean
  misc_feature (1)..(142): Homolog of NCBI NO: 18406032 NR Description: expressed protein [Arabidopsis thaliana]
  misc_feature (1)..(142): Homolog of NCBI NO: 15231105 NR Description: transcriptional coactivator - like protein

SEQ ID NO: 43767 - DNA, 781 bp, Arabidopsis thaliana; identical to SEQ ID NO: 29994
  misc_feature (1)..(781): Ceres Seq. ID no. 13487058
  misc_feature: MA Experiment ID: 108434 Result: Down-regulated in Transcription
  misc_feature: MA Experiment 108434 PARAMETER Experiment Name: At_Root_Tips_cDNA_P Parameter: Tissue Value: Root Tips
  misc_feature: MA Experiment ID: 108461 Result: Up-regulated in Transcription
  misc_feature: MA Experiment 108461 PARAMETER Experiment Name: At_Germinating_Seeds_cDNA_P Parameter: Age (day) Value: 1 vs. 0
  misc_feature: MA Experiment 108461 PARAMETER Experiment Name: At_Germinating_Seeds_cDNA_P Parameter: Tissue Value: Germinating Seeds
  misc_feature: MA Experiment ID: 108462 Result: Up-regulated in Transcription
  misc_feature: MA Experiment 108462 PARAMETER Experiment Name: At_Germinating_Seeds_cDNA_P Parameter: Age (day) Value: 2 vs. 0
  misc_feature: MA Experiment 108462 PARAMETER Experiment Name: At_Germinating_Seeds_cDNA_P Parameter: Tissue Value: Germinating Seeds
  misc_feature: MA Experiment ID: 108463 Result: Up-regulated in Transcription
  misc_feature: MA Experiment 108463 PARAMETER Experiment Name: At_Germinating_Seeds_cDNA_P Parameter: Age (day) Value: 3 vs. 0
  misc_feature: MA Experiment 108463 PARAMETER Experiment Name: At_Germinating_Seeds_cDNA_P Parameter: Tissue Value: Germinating Seeds
  misc_feature: MA Experiment ID: 108464 Result: Up-regulated in Transcription
  misc_feature: MA Experiment 108464 PARAMETER Experiment Name: At_Germinating_Seeds_cDNA_P Parameter: Age (day) Value: 4 vs. 0
  misc_feature: MA Experiment 108464 PARAMETER Experiment Name: At_Germinating_Seeds_cDNA_P Parameter: Tissue Value: Germinating Seeds
  misc_feature: MA Experiment ID: 108488 Result: Down-regulated in Transcription
  misc_feature: MA Experiment ID: 108561 Result: Up-regulated in Transcription
  misc_feature: MA Experiment 108561 PARAMETER Experiment Name: At_100uM_ABA_cDNA_P Parameter: Timepoint (hr) Value: 6
  misc_feature: MA Experiment 108561 PARAMETER Experiment Name: At_100uM_ABA_cDNA_P Parameter: Tissue Value: Aerial
  misc_feature: MA Experiment 108561 PARAMETER Experiment Name: At_100uM_ABA_cDNA_P Parameter: Treatment Value: 100uM ABA vs. No Treatment
  misc_feature: MA Experiment ID: 108594 Result: Down-regulated in Transcription
  misc_feature: MA Experiment 108594 PARAMETER Experiment Name: At_Ler-rhl_Root_cDNA_P Parameter: Plant Line Value: null
  misc_feature: MA Experiment ID: 20000069 Result: Up-regulated in Transcription
  misc_feature: MA Experiment 20000069 PARAMETER Experiment Name: At_100uM_ABA_Mutants_cDNA_P Parameter: Plant Line Value: CS23
  misc_feature: MA Experiment 20000069 PARAMETER Experiment Name: At_100uM_ABA_Mutants_cDNA_P Parameter: Timepoint (hr) Value: 6
  misc_feature: MA Experiment 20000069 PARAMETER Experiment Name: At_100uM_ABA_Mutants_cDNA_P Parameter: Tissue Value: Aerial
  misc_feature: MA Experiment 20000069 PARAMETER Experiment Name: At_100uM_ABA_Mutants_cDNA_P Parameter: Treatment Value: 100uM ABA vs. No Treatment
  misc_feature: MA Experiment ID: 20000070 Result: Up-regulated in Transcription
  misc_feature: MA Experiment 20000070 PARAMETER Experiment Name: At_100uM_ABA_Mutants_cDNA_P Parameter: Plant Line Value: CS24
  misc_feature: MA Experiment 20000070 PARAMETER Experiment Name: At_100uM_ABA_Mutants_cDNA_P Parameter: Timepoint (hr) Value: 6
  misc_feature: MA Experiment 20000070 PARAMETER Experiment Name: At_100uM_ABA_Mutants_cDNA_P Parameter: Tissue Value: Aerial
  misc_feature: MA Experiment 20000070 PARAMETER Experiment Name: At_100uM_ABA_Mutants_cDNA_P Parameter: Treatment Value: 100uM ABA vs. No Treatment
  misc_feature: MA Experiment ID: 20000071 Result: Up-regulated in Transcription
  misc_feature: MA Experiment 20000071 PARAMETER Experiment Name: At_100uM_ABA_Mutants_cDNA_P Parameter: Plant Line Value: CS8104
  misc_feature: MA Experiment 20000071 PARAMETER Experiment Name: At_100uM_ABA_Mutants_cDNA_P Parameter: Timepoint (hr) Value: 6
  misc_feature: MA Experiment 20000071 PARAMETER Experiment Name: At_100uM_ABA_Mutants_cDNA_P Parameter: Tissue Value: Aerial
  misc_feature: MA Experiment 20000071 PARAMETER Experiment Name: At_100uM_ABA_Mutants_cDNA_P Parameter: Treatment Value: 100uM ABA vs. No Treatment
  misc_feature: MA Experiment ID: 20000072 Result: Up-regulated in Transcription
  misc_feature: MA Experiment 20000072 PARAMETER Experiment Name: At_100uM_ABA_Mutants_cDNA_P Parameter: Plant Line Value: CS8105
  misc_feature: MA Experiment 20000072 PARAMETER Experiment Name: At_100uM_ABA_Mutants_cDNA_P Parameter: Timepoint (hr) Value: 6
  misc_feature: MA Experiment 20000072 PARAMETER Experiment Name: At_100uM_ABA_Mutants_cDNA_P Parameter: Tissue Value: Aerial
  misc_feature: MA Experiment 20000072 PARAMETER Experiment Name: At_100uM_ABA_Mutants_cDNA_P Parameter: Treatment Value: 100uM ABA vs. No Treatment
  misc_feature: MA Experiment ID: 20000086 Result: Up-regulated in Transcription
  misc_feature: MA Experiment 20000086 PARAMETER Experiment Name: At_100uM_ABA_Mutants_cDNA_P Parameter: Plant Line Value: CS22
  misc_feature: MA Experiment 20000086 PARAMETER Experiment Name: At_100uM_ABA_Mutants_cDNA_P Parameter: Timepoint (hr) Value: 6
  misc_feature: MA Experiment 20000086 PARAMETER Experiment Name: At_100uM_ABA_Mutants_cDNA_P Parameter: Tissue Value: Aerial
  misc_feature: MA Experiment 20000086 PARAMETER Experiment Name: At_100uM_ABA_Mutants_cDNA_P Parameter: Treatment Value: 100uM ABA vs. No Treatment
  misc_feature: MA Experiment ID: 20000087 Result: Up-regulated in Transcription
  misc_feature: MA Experiment 20000087 PARAMETER Experiment Name: At_100uM_ABA_Mutants_cDNA_P Parameter: Plant Line Value: WS
  misc_feature: MA Experiment 20000087 PARAMETER Experiment Name: At_100uM_ABA_Mutants_cDNA_P Parameter: Timepoint (hr) Value: 6
  misc_feature: MA Experiment 20000087 PARAMETER Experiment Name: At_100uM_ABA_Mutants_cDNA_P Parameter: Tissue Value: Aerial
  misc_feature: MA Experiment 20000087 PARAMETER Experiment Name: At_100uM_ABA_Mutants_cDNA_P Parameter: Treatment Value: 100uM ABA vs. No Treatment
  misc_feature: MA Experiment ID: 20000111 Result: Down-regulated in Transcription
  misc_feature: MA Experiment 20000111 PARAMETER Experiment Name: At_42deg_Heat_cDNA_P Parameter: Temperature (deg C) Value: 42 vs. 22
  misc_feature: MA Experiment 20000111 PARAMETER Experiment Name: At_42deg_Heat_cDNA_P Parameter: Timepoint (hr) Value: 6
  misc_feature: MA Experiment 20000111 PARAMETER Experiment Name: At_42deg_Heat_cDNA_P Parameter: Tissue Value: Aerial
  misc_feature: MA Experiment ID: 20000113 Result: Down-regulated in Transcription
  misc_feature: MA Experiment 20000113 PARAMETER Experiment Name: At_42deg_Heat_cDNA_P Parameter: Temperature (deg C) Value: 42 vs. 22
  misc_feature: MA Experiment 20000113 PARAMETER Experiment Name: At_42deg_Heat_cDNA_P Parameter: Timepoint (hr) Value: 8
  misc_feature: MA Experiment 20000113 PARAMETER Experiment Name: At_42deg_Heat_cDNA_P Parameter: Tissue Value: Aerial
  misc_feature: MA Experiment ID: 20000117 Result: Up-regulated in Transcription
  misc_feature: MA Experiment 20000117 PARAMETER Experiment Name: At_100uM_ABA_Mutants_cDNA_P Parameter: Plant Line Value: Columbia
  misc_feature: MA Experiment 20000117 PARAMETER Experiment Name: At_100uM_ABA_Mutants_cDNA_P Parameter: Timepoint (hr) Value: 6
  misc_feature: MA Experiment 20000117 PARAMETER Experiment Name: At_100uM_ABA_Mutants_cDNA_P Parameter: Tissue Value: Aerial
  misc_feature: MA Experiment 20000117 PARAMETER Experiment Name: At_100uM_ABA_Mutants_cDNA_P Parameter: Treatment Value: 100uM ABA vs. No Treatment
  misc_feature: MA Experiment ID: 20000180 Result: Up-regulated in Transcription
  misc_feature: MA Experiment 20000180 PARAMETER Experiment Name: At_Germinating_Seeds_P Parameter: Age (hr) Value: 24 vs. 0
  misc_feature: MA Experiment 20000180 PARAMETER Experiment Name: At_Germinating_Seeds_P Parameter: Tissue Value: Germinating Seeds
  misc_feature: MA Experiment ID: 20000224 Result: Down-regulated in Transcription
  misc_feature: MA Experiment ID: 20000794 Result: Up-regulated in Transcription
  misc_feature: MA Experiment 20000794 PARAMETER Experiment Name: At_Petals_P Parameter: Age (day) Value: 23-25 days
  misc_feature: MA Experiment 20000794 PARAMETER Experiment Name: At_Petals_P Parameter: Plant Line Value: WS
  misc_feature: MA Experiment 20000794 PARAMETER Experiment Name: At_Petals_P Parameter: Tissue Value: Petals vs. Whole plant

SEQ ID NO: 43768 - protein, 130 aa, Arabidopsis thaliana; identical to SEQ ID NO: 29995
  peptide (1)..(130): Ceres Seq. ID no. 13487059
  misc_feature (1)..(108): Pfam Name: Yippee putative zinc-binding protein Pfam Description: Yippee putative zinc-binding protein
  misc_feature (1)..(108): Pfam Name: Yippee putative zinc-binding protein Pfam Description: Yippee putative zinc-binding protein
  misc_feature (14)..(101): Homolog of NCBI NO: 40255199 NR Description: hypothetical protein MGC10500 [Homo sapiens]
  misc_feature (12)..(101): Homolog of NCBI NO: 20840809 NR Description: similar to hypothetical protein FLJ30213
  misc_feature (1)..(130): Homolog of NCBI NO: 15238881 NR Description: zinc-binding protein-related [Arabidopsis
  misc_feature (1)..(103): Homolog of NCBI NO: 15232001 NR Description: Yippee-related protein [Arabidopsis thaliana]
  misc_feature (1)..(116): Homolog of NCBI NO: 15228759 NR Description: Yippee-related protein [Arabidopsis thaliana]
  misc_feature (14)..(101): Homolog of NCBI NO: 40255199 NR Description: hypothetical protein MGC10500 [Homo sapiens]
  misc_feature (1)..(130): Homolog of NCBI NO: 15238881 NR Description: zinc-binding protein-related [Arabidopsis
  misc_feature (1)..(116): Homolog of NCBI NO: 15228759 NR Description: Yippee-related protein [Arabidopsis thaliana]
  misc_feature (1)..(130): Homolog of NCBI NO: 15225631 NR Description: expressed protein [Arabidopsis thaliana]
  misc_feature (1)..(129): Homolog of NCBI NO: 27923880 NR Description: Yippee-like protein
  misc_feature (1)..(129): Homolog of NCBI NO: 28273361 NR Description: putative zinc binding protein
  misc_feature (1)..(130): Homolog of NCBI NO: 18399156 NR Description: expressed protein [Arabidopsis thaliana]
  misc_feature (1)..(130): Homolog of NCBI NO: 21617953 NR Description: yippee-like protein [Arabidopsis thaliana]
  misc_feature (1)..(103): Homolog of NCBI NO: 15232001 NR Description: Yippee-related protein [Arabidopsis thaliana]
  misc_feature (12)..(101): Homolog of NCBI NO: 20840809 NR Description: similar to hypothetical protein FLJ30213
  misc_feature (1)..(130): Homolog of NCBI NO: 21617953 NR Description: yippee-like protein [Arabidopsis thaliana]
  misc_feature (1)..(130): Homolog of NCBI NO: 18399156 NR Description: expressed protein [Arabidopsis thaliana]
  misc_feature (1)..(129): Homolog of NCBI NO: 28273361 NR Description: putative zinc binding protein
  misc_feature (1)..(129): Homolog of NCBI NO: 27923880 NR Description: Yippee-like protein
  misc_feature (1)..(130): Homolog of NCBI NO: 15225631 NR Description: expressed protein [Arabidopsis thaliana]

SEQ ID NO: 43769 - protein, 71 aa, Arabidopsis thaliana; identical to SEQ ID NO: 29996
  peptide (1)..(71): Ceres Seq. ID no. 13487060
  misc_feature (1)..(42): Homolog of NCBI NO: 40255199 NR Description: hypothetical protein MGC10500 [Homo sapiens]
  misc_feature (1)..(42): Homolog of NCBI NO: 20840809 NR Description: similar to hypothetical protein FLJ30213
  misc_feature (1)..(71): Homolog of NCBI NO: 15238881 NR Description: zinc-binding protein-related [Arabidopsis
  misc_feature (1)..(44): Homolog of NCBI NO: 15232001 NR Description: Yippee-related protein [Arabidopsis thaliana]
  misc_feature (1)..(57): Homolog of NCBI NO: 15228759 NR Description: Yippee-related protein [Arabidopsis thaliana]
  misc_feature (1)..(71): Homolog of NCBI NO: 21617953 NR Description: yippee-like protein [Arabidopsis thaliana]
  misc_feature (1)..(71): Homolog of NCBI NO: 18399156 NR Description: expressed protein [Arabidopsis thaliana]
  misc_feature (1)..(70): Homolog of NCBI NO: 28273361 NR Description: putative zinc binding protein
  misc_feature (1)..(70): Homolog of NCBI NO: 27923880 NR Description: Yippee-like protein
  misc_feature (1)..(71): Homolog of NCBI NO: 15225631 NR Description: expressed protein [Arabidopsis thaliana]
  misc_feature (1)..(42): Homolog of NCBI NO: 40255199 NR Description: hypothetical protein MGC10500 [Homo sapiens]
  misc_feature (1)..(42): Homolog of NCBI NO: 20840809 NR Description: similar to hypothetical protein FLJ30213
  misc_feature (1)..(71): Homolog of NCBI NO: 15238881 NR Description: zinc-binding protein-related [Arabidopsis
  misc_feature (1)..(44): Homolog of NCBI NO: 15232001 NR Description: Yippee-related protein [Arabidopsis thaliana]
  misc_feature (1)..(57): Homolog of NCBI NO: 15228759 NR Description: Yippee-related protein [Arabidopsis thaliana]
  misc_feature (1)..(71): Homolog of NCBI NO: 21617953 NR Description: yippee-like protein [Arabidopsis thaliana]
  misc_feature (1)..(71): Homolog of NCBI NO: 18399156 NR Description: expressed protein [Arabidopsis thaliana]
  misc_feature (1)..(70): Homolog of NCBI NO: 28273361 NR Description: putative zinc binding protein
  misc_feature (1)..(70): Homolog of NCBI NO: 27923880 NR Description: Yippee-like protein
  misc_feature (1)..(71): Homolog of NCBI NO: 15225631 NR Description: expressed protein [Arabidopsis thaliana]

SEQ ID NO: 43770 - protein, 70 aa, Arabidopsis thaliana; identical to SEQ ID NO: 29997
  peptide (1)..(70): Ceres Seq. ID no. 13487061
  misc_feature (1)..(41): Homolog of NCBI NO: 40255199 NR Description: hypothetical protein MGC10500 [Homo sapiens]
  misc_feature (1)..(41): Homolog of NCBI NO: 20840809 NR Description: similar to hypothetical protein FLJ30213
  misc_feature (1)..(70): Homolog of NCBI NO: 15238881 NR Description: zinc-binding protein-related [Arabidopsis
  misc_feature (1)..(43): Homolog of NCBI NO: 15232001 NR Description: Yippee-related protein [Arabidopsis thaliana]
  misc_feature (1)..(56): Homolog of NCBI NO: 15228759 NR Description: Yippee-related protein [Arabidopsis thaliana]
  misc_feature (1)..(70): Homolog of NCBI NO: 21617953 NR Description: yippee-like protein [Arabidopsis thaliana]
  misc_feature (1)..(70): Homolog of NCBI NO: 18399156 NR Description: expressed protein [Arabidopsis thaliana]
  misc_feature (1)..(69): Homolog of NCBI NO: 28273361 NR Description: putative zinc binding protein
  misc_feature (1)..(69): Homolog of NCBI NO: 27923880 NR Description: Yippee-like protein
  misc_feature (1)..(70): Homolog of NCBI NO: 15225631 NR Description: expressed protein [Arabidopsis thaliana]
  misc_feature (1)..(41): Homolog of NCBI NO: 40255199 NR Description: hypothetical protein MGC10500 [Homo sapiens]
  misc_feature (1)..(41): Homolog of NCBI NO: 20840809 NR Description: similar to hypothetical protein FLJ30213
  misc_feature (1)..(70): Homolog of NCBI NO: 15238881 NR Description: zinc-binding protein-related [Arabidopsis
  misc_feature (1)..(43): Homolog of NCBI NO: 15232001 NR Description: Yippee-related protein [Arabidopsis thaliana]
  misc_feature (1)..(56): Homolog of NCBI NO: 15228759 NR Description: Yippee-related protein [Arabidopsis thaliana]
  misc_feature (1)..(70): Homolog of NCBI NO: 21617953 NR Description: yippee-like protein [Arabidopsis thaliana]
  misc_feature (1)..(70): Homolog of NCBI NO: 18399156 NR Description: expressed protein [Arabidopsis thaliana]
  misc_feature (1)..(69): Homolog of NCBI NO: 28273361 NR Description: putative zinc binding protein
  misc_feature (1)..(69): Homolog of NCBI NO: 27923880 NR Description: Yippee-like protein
  misc_feature (1)..(70): Homolog of NCBI NO: 15225631 NR Description: expressed protein [Arabidopsis thaliana]

SEQ ID NO: 43771 - DNA, 639 bp, Arabidopsis thaliana
  misc_feature (1)..(639): Ceres Seq. ID no. 13503788
  misc_feature: MA Experiment ID: 108434 Result: Down-regulated in Transcription
  misc_feature: MA Experiment 108434 PARAMETER Experiment Name: At_Root_Tips_cDNA_P Parameter: Tissue Value: Root Tips
  misc_feature: MA Experiment ID: 108435 Result: Down-regulated in Transcription
  misc_feature: MA Experiment 108435 PARAMETER Experiment Name: At_stm_Mutants_cDNA_P Parameter: Plant Line Value: wt Landsburg vs stm
  misc_feature: MA Experiment 108435 PARAMETER Experiment Name: At_stm_Mutants_cDNA_P Parameter: Tissue Value: Shoot Apical Meristem Region
  misc_feature: MA Experiment ID: 108461 Result: Up-regulated in Transcription
  misc_feature: MA Experiment 108461 PARAMETER Experiment Name: At_Germinating_Seeds_cDNA_P Parameter: Age (day) Value: 1 vs. 0
  misc_feature: MA Experiment 108461 PARAMETER Experiment Name: At_Germinating_Seeds_cDNA_P Parameter: Tissue Value: Germinating Seeds
  misc_feature: MA Experiment ID: 108462 Result: Up-regulated in Transcription
  misc_feature: MA Experiment 108462 PARAMETER Experiment Name: At_Germinating_Seeds_cDNA_P Parameter: Age (day) Value: 2 vs. 0
  misc_feature: MA Experiment 108462 PARAMETER Experiment Name: At_Germinating_Seeds_cDNA_P Parameter: Tissue Value: Germinating Seeds
  misc_feature: MA Experiment ID: 108464 Result: Up-regulated in Transcription
  misc_feature: MA Experiment 108464 PARAMETER Experiment Name: At_Germinating_Seeds_cDNA_P Parameter: Age (day) Value: 4 vs. 0
  misc_feature: MA Experiment 108464 PARAMETER Experiment Name: At_Germinating_Seeds_cDNA_P Parameter: Tissue Value: Germinating Seeds
  misc_feature: MA Experiment ID: 108488 Result: Up-regulated in Transcription
  misc_feature: MA Experiment ID: 20000180 Result: Up-regulated in Transcription
  misc_feature: MA Experiment 20000180 PARAMETER Experiment Name: At_Germinating_Seeds_P Parameter: Age (hr) Value: 24 vs. 0
  misc_feature: MA Experiment 20000180 PARAMETER Experiment Name: At_Germinating_Seeds_P Parameter: Tissue Value: Germinating Seeds
  misc_feature: MA Experiment ID: 20000185 Result: Down-regulated in Transcription
  misc_feature: MA Experiment 20000185 PARAMETER Experiment Name: At_Roots__P Parameter: Age (day) Value: 7 vs. 21
  misc_feature: MA Experiment 20000185 PARAMETER Experiment Name: At_Roots__P Parameter: Organism Value: A. thaliana
  misc_feature: MA Experiment 20000185 PARAMETER Experiment Name: At_Roots__P Parameter: Tissue Value: Roots vs. Whole Plant
  misc_feature: MA Experiment ID: 20000264 Result: Down-regulated in Transcription
  misc_feature: MA Experiment 20000264 PARAMETER Experiment Name: At_Open_Flower_P Parameter: Age (day) Value: 21
  misc_feature: MA Experiment 20000264 PARAMETER Experiment Name: At_Open_Flower_P Parameter: Plant Line Value: WS
  misc_feature: MA Experiment 20000264 PARAMETER Experiment Name: At_Open_Flower_P Parameter: Tissue Value: Open Flower vs. Whole Plant
  misc_feature: MA Experiment ID: 20000265 Result: Down-regulated in Transcription
  misc_feature: MA Experiment 20000265 PARAMETER Experiment Name: At_Open_Flower_P Parameter: Age (day) Value: 21
  misc_feature: MA Experiment 20000265 PARAMETER Experiment Name: At_Open_Flower_P Parameter: Plant Line Value: WS
  misc_feature: MA Experiment 20000265 PARAMETER Experiment Name: At_Open_Flower_P Parameter: Tissue Value: Closed Flower vs. Whole Plant
  misc_feature: MA Experiment ID: 20000286 Result: Down-regulated in Transcription
  misc_feature: MA Experiment 20000286 PARAMETER Experiment Name: At_Open_Flower_P Parameter: Age (day) Value: 21
  misc_feature: MA Experiment 20000286 PARAMETER Experiment Name: At_Open_Flower_P Parameter: Plant Line Value: WS
  misc_feature: MA Experiment 20000286 PARAMETER Experiment Name: At_Open_Flower_P Parameter: Tissue Value: Half Open vs. Whole Plant
  misc_feature: MA Experiment ID: 20000437 Result: Down-regulated in Transcription
  misc_feature: MA Experiment 20000437 PARAMETER Experiment Name: At_Drought_P Parameter: Age (day) Value: 8
  misc_feature: MA Experiment 20000437 PARAMETER Experiment Name: At_Drought_P Parameter: Organism Value: A. thaliana
  misc_feature: MA Experiment 20000437 PARAMETER Experiment Name: At_Drought_P Parameter: Plant Line Value: WS
  misc_feature: MA Experiment 20000437 PARAMETER Experiment Name: At_Drought_P Parameter: Timepoint (hr) Value: 24
  misc_feature: MA Experiment 20000437 PARAMETER Experiment Name: At_Drought_P Parameter: Tissue Value: Whole Plant
  misc_feature: MA Experiment 20000437 PARAMETER Experiment Name: At_Drought_P Parameter: Treatment Value: Drought vs. No Drought
  misc_feature: MA Experiment ID: 20000438 Result: Up-regulated in Transcription
  misc_feature: MA Experiment 20000438 PARAMETER Experiment Name: At_Shoots__P Parameter: Age (day) Value: 14
  misc_feature: MA Experiment 20000438 PARAMETER Experiment Name: At_Shoots__P Parameter: Tissue Value: Shoots vs. Whole Plant
  misc_feature: MA Experiment ID: 20000439 Result: Down-regulated in Transcription
  misc_feature: MA Experiment 20000439 PARAMETER Experiment Name: At_Roots__P Parameter: Age (day) Value: 14 vs. 21
  misc_feature: MA Experiment 20000439 PARAMETER Experiment Name: At_Roots__P Parameter: Organism Value: A. thaliana
  misc_feature: MA Experiment 20000439 PARAMETER Experiment Name: At_Roots__P Parameter: Tissue Value: Roots vs. Whole Plant
  misc_feature: MA Experiment ID: 20000794 Result: Down-regulated in Transcription
  misc_feature: MA Experiment 20000794 PARAMETER Experiment Name: At_Petals_P Parameter: Age (day) Value: 23-25 days
  misc_feature: MA Experiment 20000794 PARAMETER Experiment Name: At_Petals_P Parameter: Plant Line Value: WS
  misc_feature: MA Experiment 20000794 PARAMETER Experiment Name: At_Petals_P Parameter: Tissue Value: Petals vs. Whole plant
  misc_feature: MA Experiment ID: 20001557 Result: Down-regulated in Transcription
  misc_feature: MA Experiment 20001557 PARAMETER Experiment Name: At_Drought_Soil_Dry_P Parameter: Age (day) Value: 27
  misc_feature: MA Experiment 20001557 PARAMETER Experiment Name: At_Drought_Soil_Dry_P Parameter: Organism Value: A. thaliana
  misc_feature: MA Experiment 20001557 PARAMETER Experiment Name: At_Drought_Soil_Dry_P Parameter: Plant Line Value: WS
  misc_feature: MA Experiment 20001557 PARAMETER Experiment Name: At_Drought_Soil_Dry_P Parameter: Post Timepoint (hr) Value: 3
  misc_feature: MA Experiment 20001557 PARAMETER Experiment Name: At_Drought_Soil_Dry_P Parameter: Post-Treatment Value: Re-Water vs. No Drought
  misc_feature: MA Experiment 20001557 PARAMETER Experiment Name: At_Drought_Soil_Dry_P Parameter: Timepoint (day) Value: 13
  misc_feature: MA Experiment 20001557 PARAMETER Experiment Name: At_Drought_Soil_Dry_P Parameter: Treatment Value: Drought vs. No Drought
  misc_feature: MA Experiment ID: 20001558 Result: Down-regulated in Transcription
  misc_feature: MA Experiment 20001558 PARAMETER Experiment Name: At_Drought_Soil_Dry_P Parameter: Age (day) Value: 27
  misc_feature: MA Experiment 20001558 PARAMETER Experiment Name: At_Drought_Soil_Dry_P Parameter: Organism Value: A. thaliana
  misc_feature: MA Experiment 20001558 PARAMETER Experiment Name: At_Drought_Soil_Dry_P Parameter: Plant Line Value: WS
  misc_feature: MA Experiment 20001558 PARAMETER Experiment Name: At_Drought_Soil_Dry_P Parameter: Post Timepoint (hr) Value: 6
  misc_feature: MA Experiment 20001558 PARAMETER Experiment Name: At_Drought_Soil_Dry_P Parameter: Post-Treatment Value: Re-Water vs. No Drought
  misc_feature: MA Experiment 20001558 PARAMETER Experiment Name: At_Drought_Soil_Dry_P Parameter: Timepoint (day) Value: 13
  misc_feature: MA Experiment 20001558 PARAMETER Experiment Name: At_Drought_Soil_Dry_P Parameter: Treatment Value: Drought vs. No Drought
  misc_feature: MA Experiment ID: 20001757 Result: Up-regulated in Transcription
  misc_feature: MA Experiment 20001757 PARAMETER Experiment Name: At_50mM_NH4NO3_L-to-H_P Parameter: Timepoint (hr) Value: 6
  misc_feature: MA Experiment 20001757 PARAMETER Experiment Name: At_50mM_NH4NO3_L-to-H_P Parameter: Tissue Value: Leaf
  misc_feature: MA Experiment 20001757 PARAMETER Experiment Name: At_50mM_NH4NO3_L-to-H_P Parameter: Treatment Value: 50mM NH4NO3 vs 100mM Mannitol
  misc_feature: MA Experiment ID: 20001904 Result: Down-regulated in Transcription
  misc_feature: MA Experiment 20001904 PARAMETER Experiment Name: At_Drought_Reproduction_P Parameter: Age (day) Value: 37
  misc_feature: MA Experiment 20001904 PARAMETER Experiment Name: At_Drought_Reproduction_P Parameter: Organism Value: A. thaliana
  misc_feature: MA Experiment 20001904 PARAMETER Experiment Name: At_Drought_Reproduction_P Parameter: Plant Line Value: WS
  misc_feature: MA Experiment 20001904 PARAMETER Experiment Name: At_Drought_Reproduction_P Parameter: Timepoint (day) Value: 7
  misc_feature: MA Experiment 20001904 PARAMETER Experiment Name: At_Drought_Reproduction_P Parameter: Tissue Value: Rosettes
  misc_feature: MA Experiment 20001904 PARAMETER Experiment Name: At_Drought_Reproduction_P Parameter: Treatment Value: Drought vs. No Drought
  misc_feature: MA Experiment ID: 20001905 Result: Down-regulated in Transcription
  misc_feature: MA Experiment 20001905 PARAMETER Experiment Name: At_Drought_Reproduction_P Parameter: Age (day) Value: 40
  misc_feature: MA Experiment 20001905 PARAMETER Experiment Name: At_Drought_Reproduction_P Parameter: Organism Value: A. thaliana
  misc_feature: MA Experiment 20001905 PARAMETER Experiment Name: At_Drought_Reproduction_P Parameter: Plant Line Value: WS
  misc_feature: MA Experiment 20001905 PARAMETER Experiment Name: At_Drought_Reproduction_P Parameter: Timepoint (day) Value: 10
  misc_feature: MA Experiment 20001905 PARAMETER Experiment Name: At_Drought_Reproduction_P Parameter: Tissue Value: Rosettes
  misc_feature: MA Experiment 20001905 PARAMETER Experiment Name: At_Drought_Reproduction_P Parameter: Treatment Value: Drought vs. No Drought
  misc_feature: MA Experiment ID: 20001908 Result: Down-regulated in Transcription
  misc_feature: MA Experiment 20001908 PARAMETER Experiment Name: At_Drought_Reproduction_P Parameter: Age (day) Value: 40
  misc_feature: MA Experiment 20001908 PARAMETER Experiment Name: At_Drought_Reproduction_P Parameter: Organism Value: A. thaliana
  misc_feature: MA Experiment 20001908 PARAMETER Experiment Name: At_Drought_Reproduction_P Parameter: Plant Line Value: WS
  misc_feature: MA Experiment 20001908 PARAMETER Experiment Name: At_Drought_Reproduction_P Parameter: Timepoint (day) Value: 10
  misc_feature: MA Experiment 20001908 PARAMETER Experiment Name: At_Drought_Reproduction_P Parameter: Tissue Value: Siliques
  misc_feature: MA Experiment 20001908 PARAMETER Experiment Name: At_Drought_Reproduction_P Parameter: Treatment Value: Drought vs. No Drought
aaaacaatcaagaaccactctttcgtgtcgcaataacaataagaaagaaagaaaaagaaaaccagagatggcgatgacgacagcatctacggtatttgttctaccggccaatgtcacctcggtcgccggcgcttcgtcgtccaggagctccgtgtctttcttgccgatgagaaacgccggttctaggctcgtagtcagggcagccgaagatcctgctccggcttcctcttcttcaaaagattctccggcagctgccgctgctccggatggagctactgccaccaaacccaagccaccaccgattggtcctaagagagggtctaaggtcaagattctaaggagagaatcctattggttcaagaacgttggatcagttgttgccgttgatcaggaccctaagactcgatacccggttgtggtccggttcgcaaaagtcaattacgccaacatatcgaccaacaactatgcattggatgaggtcgaagaagttgcagcttaaatgggagaattcaaaaactctgtgtattctataccggtttatccgtttgtaacttgacccaaaccgtatgtaccgcaaaagtttaccaattatttctcctcaaaaaaaaaaaaaaaaaaaactcgagggggggcccggta

SEQ ID NO: 43772 - protein, 165 aa, Arabidopsis thaliana
  peptide (1)..(165): Ceres Seq. ID no. 13503789
  misc_feature (103)..(164): Pfam Name: Photosystem I reaction centre subunit IV / PsaE Pfam Description: Photosystem I reaction centre subunit IV / PsaE
  misc_feature (103)..(164): Pfam Name: Photosystem I reaction centre subunit IV / PsaE Pfam Description: Photosystem I reaction centre subunit IV / PsaE
  misc_feature (38)..(164): Homolog of NCBI NO: 131178 NR Description: Photosystem I reaction center subunit IV,
  misc_feature (25)..(163): Homolog of NCBI NO: 26986114 NR Description: putative photosystem I reaction centre subunit IV
  misc_feature (26)..(163): Homolog of NCBI NO: 2499966 NR Description: Photosystem I reaction center subunit IV A,
  misc_feature (25)..(165): Homolog of NCBI NO: 131176 NR Description: Photosystem I reaction center subunit IV,
  misc_feature (25)..(163): Homolog of NCBI NO: 21555308 NR Description: Photosystem I reaction center subunit IV B,
  misc_feature (38)..(164): Homolog of NCBI NO: 131178 NR Description: Photosystem I reaction center subunit IV,
  misc_feature (26)..(163): Homolog of NCBI NO: 2499966 NR Description: Photosystem I reaction center subunit IV A,
  misc_feature (25)..(163): Homolog of NCBI NO: 21555308 NR Description: Photosystem I reaction center subunit IV B,
  misc_feature (23)..(165): Homolog of NCBI NO: 30688100 NR Description: photosystem I subunit PSI-E - like protein
  misc_feature (25)..(165): Homolog of NCBI NO: 24030202 NR Description: putative photosystem I subunit PSI-E protein
  misc_feature (51)..(165): Homolog of NCBI NO: 22091414 NR Description: putative photosystem I subunit PSI-E [Arabidopsis
  misc_feature (56)..(165): Homolog of NCBI NO: 11692884 NR Description: AT4g28750 [Arabidopsis thaliana]
  misc_feature (23)..(163): Homolog of NCBI NO: 15225331 NR Description: photosystem I reaction center subunit IV -related
  misc_feature (25)..(165): Homolog of NCBI NO: 131176 NR Description: Photosystem I reaction center subunit IV,
  misc_feature (25)..(163): Homolog of NCBI NO: 26986114 NR Description: putative photosystem I reaction centre subunit IV
  misc_feature (23)..(163): Homolog of NCBI NO: 15225331 NR Description: photosystem I reaction center subunit IV -related
  misc_feature (56)..(165): Homolog of NCBI NO: 11692884 NR Description: AT4g28750 [Arabidopsis thaliana]
  misc_feature (51)..(165): Homolog of NCBI NO: 22091414 NR Description: putative photosystem I subunit PSI-E [Arabidopsis
  misc_feature (25)..(165): Homolog of NCBI NO: 24030202 NR Description: putative photosystem I subunit PSI-E protein
  misc_feature (23)..(165): Homolog of NCBI NO: 30688100 NR Description: photosystem I subunit PSI-E - like protein
KQSRTTLSCRNNNKKERKRKPEMAMTTASTVFVLPANVTSVAGASSSRSSVSFLPMRNAGSRLVVRAAEDPAPASSSSKDSPAAAAAPDGATATKPKPPPIGPKRGSKVKILRRESYWFKNVGSVVAVDQDPKTRYPVVVRFAKVNYANISTNNYALDEVEEVAA

SEQ ID NO: 43773 - protein, 143 aa, Arabidopsis thaliana
  peptide (1)..(143): Ceres Seq. ID no. 13503790
  misc_feature (81)..(142): Pfam Name: Photosystem I reaction centre subunit IV / PsaE Pfam Description: Photosystem I reaction centre subunit IV / PsaE
  misc_feature (81)..(142): Pfam Name: Photosystem I reaction centre subunit IV / PsaE Pfam Description: Photosystem I reaction centre subunit IV / PsaE
  misc_feature (16)..(142): Homolog of NCBI NO: 131178 NR Description: Photosystem I reaction center subunit IV,
  misc_feature (3)..(141): Homolog of NCBI NO: 26986114 NR Description: putative photosystem I reaction centre subunit IV
  misc_feature (4)..(141): Homolog of NCBI NO: 2499966 NR Description: Photosystem I reaction center subunit IV A,
  misc_feature (3)..(143): Homolog of NCBI NO: 131176 NR Description: Photosystem I reaction center subunit IV,
  misc_feature (3)..(141): Homolog of NCBI NO: 21555308 NR Description: Photosystem I reaction center subunit IV B,
  misc_feature (16)..(142): Homolog of NCBI NO: 131178 NR Description: Photosystem I reaction center subunit IV,
  misc_feature (4)..(141): Homolog of NCBI NO: 2499966 NR Description: Photosystem I reaction center subunit IV A,
  misc_feature (3)..(141): Homolog of NCBI NO: 21555308 NR Description: Photosystem I reaction center subunit IV B,
  misc_feature (1)..(143): Homolog of NCBI NO: 30688100 NR Description: photosystem I subunit PSI-E - like protein
  misc_feature (3)..(143): Homolog of NCBI NO: 24030202 NR Description: putative photosystem I subunit PSI-E protein
  misc_feature (29)..(143): Homolog of NCBI NO: 22091414 NR Description: putative photosystem I subunit PSI-E [Arabidopsis
  misc_feature (34)..(143): Homolog of NCBI NO: 11692884 NR Description: AT4g28750 [Arabidopsis thaliana]
  misc_feature (1)..(141): Homolog of NCBI NO: 15225331 NR Description: photosystem I reaction center subunit IV -related
  misc_feature (3)..(143): Homolog of NCBI NO: 131176 NR Description: Photosystem I reaction center subunit IV,
  misc_feature (3)..(141): Homolog of NCBI NO: 26986114 NR Description: putative photosystem I reaction centre subunit IV
  misc_feature (1)..(141): Homolog of NCBI NO: 15225331 NR Description: photosystem I reaction center subunit IV -related
  misc_feature (34)..(143): Homolog of NCBI NO: 11692884 NR Description: AT4g28750 [Arabidopsis thaliana]
  misc_feature (29)..(143): Homolog of NCBI NO: 22091414 NR Description: putative photosystem I subunit PSI-E [Arabidopsis
  misc_feature (3)..(143): Homolog of NCBI NO: 24030202 NR Description: putative photosystem I subunit PSI-E protein
  misc_feature (1)..(143): Homolog of NCBI NO: 30688100 NR Description: photosystem I subunit PSI-E - like protein
MAMTTASTVFVLPANVTSVAGASSSRSSVSFLPMRNAGSRLVVRAAEDPAPASSSSKDSPAAAAAPDGATATKPKPPPIGPKRGSKVKILRRESYWFKNVGSVVAVDQDPKTRYPVVVRFAKVNYANISTNNYALDEVEEVAA

SEQ ID NO: 43774 - protein, 141 aa, Arabidopsis thaliana
  peptide (1)..(141): Ceres Seq. ID no. 13503791
  misc_feature (79)..(140): Pfam Name: Photosystem I reaction centre subunit IV / PsaE Pfam Description: Photosystem I reaction centre subunit IV / PsaE
  misc_feature (79)..(140): Pfam Name: Photosystem I reaction centre subunit IV / PsaE Pfam Description: Photosystem I reaction centre subunit IV / PsaE
  misc_feature (14)..(140): Homolog of NCBI NO: 131178 NR Description: Photosystem I reaction center subunit IV,
  misc_feature (1)..(139): Homolog of NCBI NO: 26986114 NR Description: putative photosystem I reaction centre subunit IV
  misc_feature (2)..(139): Homolog of NCBI NO: 2499966 NR Description: Photosystem I reaction center subunit IV A,
  misc_feature (1)..(141): Homolog of NCBI NO: 131176 NR Description: Photosystem I reaction center subunit IV,
  misc_feature (1)..(139): Homolog of NCBI NO: 21555308 NR Description: Photosystem I reaction center subunit IV B,
  misc_feature (14)..(140): Homolog of NCBI NO: 131178 NR Description: Photosystem I reaction center subunit IV,
  misc_feature (2)..(139): Homolog of NCBI NO: 2499966 NR Description: Photosystem I reaction center subunit IV A,
  misc_feature (1)..(139): Homolog of NCBI NO: 21555308 NR Description: Photosystem I reaction center subunit IV B,
  misc_feature (1)..(141): Homolog of NCBI NO: 30688100 NR Description: photosystem I subunit PSI-E - like protein
  misc_feature (1)..(141): Homolog of NCBI NO: 24030202 NR Description: putative photosystem I subunit PSI-E protein
  misc_feature (27)..(141): Homolog of NCBI NO: 22091414 NR Description: putative photosystem I subunit PSI-E [Arabidopsis
  misc_feature (32)..(141): Homolog of NCBI NO: 11692884 NR Description: AT4g28750 [Arabidopsis thaliana]
  misc_feature (1)..(139): Homolog of NCBI NO: 15225331 NR Description: photosystem I reaction center subunit IV -related
  misc_feature (1)..(141): Homolog of NCBI NO: 131176 NR Description: Photosystem I reaction center subunit IV,
  misc_feature (1)..(139): Homolog of NCBI NO: 26986114 NR Description: putative photosystem I reaction centre subunit IV
  misc_feature (1)..(139): Homolog of NCBI NO: 15225331 NR Description: photosystem I reaction center subunit IV -related
  misc_feature (32)..(141): Homolog of NCBI NO: 11692884 NR Description: AT4g28750 [Arabidopsis thaliana]
  misc_feature (27)..(141): Homolog of NCBI NO: 22091414 NR Description: putative photosystem I subunit PSI-E [Arabidopsis
  misc_feature (1)..(141): Homolog of NCBI NO: 24030202 NR Description: putative photosystem I subunit PSI-E protein
  misc_feature (1)..(141): Homolog of NCBI NO: 30688100 NR Description: photosystem I subunit PSI-E - like protein
MTTASTVFVLPANVTSVAGASSSRSSVSFLPMRNAGSRLVVRAAEDPAPASSSSKDSPAAAAAPDGATATKPKPPPIGPKRGSKVKILRRESYWFKNVGSVVAVDQDPKTRYPVVVRFAKVNYANISTNNYALDEVEEVAA

SEQ ID NO: 43775 - DNA, 1206 bp, Arabidopsis thaliana; identical to SEQ ID NO: 29329
  misc_feature (1)..(1206): Ceres Seq. ID no. 12601145
  misc_feature: MA Experiment ID: 108561 Result: Down-regulated in Transcription
  misc_feature: MA Experiment 108561 PARAMETER Experiment Name: At_100uM_ABA_cDNA_P Parameter: Timepoint (hr) Value: 6
  misc_feature: MA Experiment 108561 PARAMETER Experiment Name: At_100uM_ABA_cDNA_P Parameter: Tissue Value: Aerial
  misc_feature: MA Experiment 108561 PARAMETER Experiment Name: At_100uM_ABA_cDNA_P Parameter: Treatment Value: 100uM ABA vs. No Treatment
  misc_feature: MA Experiment ID: 108585 Result: Down-regulated in Transcription
  misc_feature: MA Experiment 108585 PARAMETER Experiment Name: At_5mM_NaNP_cDNA_P Parameter: Timepoint (hr) Value: 6
  misc_feature: MA Experiment 108585 PARAMETER Experiment Name: At_5mM_NaNP_cDNA_P Parameter: Tissue Value: Aerial
  misc_feature: MA Experiment 108585 PARAMETER Experiment Name: At_5mM_NaNP_cDNA_P Parameter: Treatment Value: null
  misc_feature: MA Experiment ID: 20000180 Result: Up-regulated in Transcription
  misc_feature: MA Experiment 20000180 PARAMETER Experiment Name: At_Germinating_Seeds_P Parameter: Age (hr) Value: 24 vs. 0
  misc_feature: MA Experiment 20000180 PARAMETER Experiment Name: At_Germinating_Seeds_P Parameter: Tissue Value: Germinating Seeds
  misc_feature: MA Experiment ID: 20000185 Result: Down-regulated in Transcription
  misc_feature: MA Experiment 20000185 PARAMETER Experiment Name: At_Roots__P Parameter: Age (day) Value: 7 vs. 21
  misc_feature: MA Experiment 20000185 PARAMETER Experiment Name: At_Roots__P Parameter: Organism Value: A. thaliana
  misc_feature: MA Experiment 20000185 PARAMETER Experiment Name: At_Roots__P Parameter: Tissue Value: Roots vs. Whole Plant
  misc_feature: MA Experiment ID: 20000234 Result: Up-regulated in Transcription
  misc_feature: MA Experiment 20000234 PARAMETER Experiment Name: At_Siliques_P Parameter: Age (day) Value: 21
  misc_feature: MA Experiment 20000234 PARAMETER Experiment Name: At_Siliques_P Parameter: Organism Value: A. thaliana
  misc_feature: MA Experiment 20000234 PARAMETER Experiment Name: At_Siliques_P Parameter: Plant Line Value: WS
  misc_feature: MA Experiment 20000234 PARAMETER Experiment Name: At_Siliques_P Parameter: Tissue Value: Less Than 5mm Siliques vs. Whole Plant
  misc_feature: MA Experiment ID: 20000436 Result: Down-regulated in Transcription
  misc_feature: MA Experiment 20000436 PARAMETER Experiment Name: At_Drought_P Parameter: Age (day) Value: 7
  misc_feature: MA Experiment 20000436 PARAMETER Experiment Name: At_Drought_P Parameter: Organism Value: A. thaliana
  misc_feature: MA Experiment 20000436 PARAMETER Experiment Name: At_Drought_P Parameter: Plant Line Value: WS
  misc_feature: MA Experiment 20000436 PARAMETER Experiment Name: At_Drought_P Parameter: Timepoint (hr) Value: 12
  misc_feature: MA Experiment 20000436 PARAMETER Experiment Name: At_Drought_P Parameter: Tissue Value: Whole Plant
  misc_feature: MA Experiment 20000436 PARAMETER Experiment Name: At_Drought_P Parameter: Treatment Value: Drought vs. No Drought
  misc_feature: MA Experiment ID: 20000437 Result: Down-regulated in Transcription
  misc_feature: MA Experiment 20000437 PARAMETER Experiment Name: At_Drought_P Parameter: Age (day) Value: 8
  misc_feature: MA Experiment 20000437 PARAMETER Experiment Name: At_Drought_P Parameter: Organism Value: A. thaliana
  misc_feature: MA Experiment 20000437 PARAMETER Experiment Name: At_Drought_P Parameter: Plant Line Value: WS
  misc_feature: MA Experiment 20000437 PARAMETER Experiment Name: At_Drought_P Parameter: Timepoint (hr) Value: 24
  misc_feature: MA Experiment 20000437 PARAMETER Experiment Name: At_Drought_P Parameter: Tissue Value: Whole Plant
  misc_feature: MA Experiment 20000437 PARAMETER Experiment Name: At_Drought_P Parameter: Treatment Value: Drought vs. No Drought
  misc_feature: MA Experiment ID: 20000439 Result: Down-regulated in Transcription
  misc_feature: MA Experiment 20000439 PARAMETER Experiment Name: At_Roots__P Parameter: Age (day) Value: 14 vs. 21
  misc_feature: MA Experiment 20000439 PARAMETER Experiment Name: At_Roots__P Parameter: Organism Value: A. thaliana
  misc_feature: MA Experiment 20000439 PARAMETER Experiment Name: At_Roots__P Parameter: Tissue Value: Roots vs. Whole Plant
  misc_feature: MA Experiment ID: 20000794 Result: Down-regulated in Transcription
  misc_feature: MA Experiment 20000794 PARAMETER Experiment Name: At_Petals_P Parameter: Age (day) Value: 23-25 days
  misc_feature: MA Experiment 20000794 PARAMETER Experiment Name: At_Petals_P Parameter: Plant Line Value: WS
  misc_feature: MA Experiment 20000794 PARAMETER Experiment Name: At_Petals_P Parameter: Tissue Value: Petals vs. Whole plant
  misc_feature: MA Experiment ID: 20001248 Result: Down-regulated in Transcription
  misc_feature: MA Experiment 20001248 PARAMETER Experiment Name: At_Far-red-induction_P Parameter: Age (day) Value: 7
  misc_feature: MA Experiment 20001248 PARAMETER Experiment Name: At_Far-red-induction_P Parameter: Light Value: Far-red vs. White
  misc_feature: MA Experiment 20001248 PARAMETER Experiment Name: At_Far-red-induction_P Parameter: Organism Value: A. thaliana
  misc_feature: MA Experiment 20001248 PARAMETER Experiment Name: At_Far-red-induction_P Parameter: Plant Line Value: Columbia
  misc_feature: MA Experiment 20001248 PARAMETER Experiment Name: At_Far-red-induction_P Parameter: Timepoint (hr) Value: 4
  misc_feature: MA Experiment 20001248 PARAMETER Experiment Name: At_Far-red-induction_P Parameter: Tissue Value: Whole Plant
  misc_feature: MA Experiment ID: 20001450 Result: Down-regulated in Transcription
  misc_feature: MA Experiment 20001450 PARAMETER Experiment Name: At_Far-red-induction_P Parameter: Age (day) Value: 7
  misc_feature: MA Experiment 20001450 PARAMETER Experiment Name: At_Far-red-induction_P Parameter: Light Value: Far-red vs. White
  misc_feature: MA Experiment 20001450 PARAMETER Experiment Name: At_Far-red-induction_P Parameter: Organism Value: A. thaliana
  misc_feature: MA Experiment 20001450 PARAMETER Experiment Name: At_Far-red-induction_P Parameter: Plant Line Value: Columbia
  misc_feature: MA Experiment 20001450 PARAMETER Experiment Name: At_Far-red-induction_P Parameter: Timepoint (hr) Value: 8
  misc_feature: MA Experiment 20001450 PARAMETER Experiment Name: At_Far-red-induction_P Parameter: Tissue Value: Whole Plant
  misc_feature: MA Experiment ID: 20001560 Result: Up-regulated in Transcription
  misc_feature: MA Experiment 20001560 PARAMETER Experiment Name: At_Drought_Soil_Dry_P Parameter: Age (day) Value: 28
  misc_feature: MA Experiment 20001560 PARAMETER Experiment Name: At_Drought_Soil_Dry_P Parameter: Organism Value: A. thaliana
  misc_feature: MA Experiment 20001560 PARAMETER Experiment Name: At_Drought_Soil_Dry_P Parameter: Plant Line Value: WS
  misc_feature: MA Experiment 20001560 PARAMETER Experiment Name: At_Drought_Soil_Dry_P Parameter: Post Timepoint (hr) Value: None
  misc_feature: MA Experiment 20001560 PARAMETER Experiment Name: At_Drought_Soil_Dry_P Parameter: Post-Treatment Value: None
  misc_feature: MA Experiment 20001560 PARAMETER Experiment Name: At_Drought_Soil_Dry_P Parameter: Timepoint (day) Value: 14
  misc_feature: MA Experiment 20001560 PARAMETER Experiment Name: At_Drought_Soil_Dry_P Parameter: Treatment Value: Drought vs. No Drought
  misc_feature: MA Experiment ID: 20001757 Result: Up-regulated in Transcription
  misc_feature: MA Experiment 20001757 PARAMETER Experiment Name: At_50mM_NH4NO3_L-to-H_P Parameter: Timepoint (hr) Value: 6
  misc_feature: MA Experiment 20001757 PARAMETER Experiment Name: At_50mM_NH4NO3_L-to-H_P Parameter: Tissue Value: Leaf
  misc_feature: MA Experiment 20001757 PARAMETER Experiment Name: At_50mM_NH4NO3_L-to-H_P Parameter: Treatment Value: 50mM NH4NO3 vs 100mM Mannitol
  misc_feature: MA Experiment ID: 20001905 Result: Down-regulated in Transcription
  misc_feature: MA Experiment 20001905 PARAMETER Experiment Name: At_Drought_Reproduction_P Parameter: Age (day) Value: 40
  misc_feature: MA Experiment 20001905 PARAMETER Experiment Name: At_Drought_Reproduction_P Parameter: Organism Value: A. thaliana
  misc_feature: MA Experiment 20001905 PARAMETER Experiment Name: At_Drought_Reproduction_P Parameter: Plant Line Value: WS
  misc_feature: MA Experiment 20001905 PARAMETER Experiment Name: At_Drought_Reproduction_P Parameter: Timepoint (day) Value: 10
  misc_feature: MA Experiment 20001905 PARAMETER Experiment Name: At_Drought_Reproduction_P Parameter: Tissue Value: Rosettes
  misc_feature: MA Experiment 20001905 PARAMETER Experiment Name: At_Drought_Reproduction_P Parameter: Treatment Value: Drought vs. No Drought

SEQ ID NO: 43776 - protein, 325 aa, Arabidopsis thaliana; identical to SEQ ID NO: 29330
  peptide (1)..(325): Ceres Seq. ID no. 12601146
  misc_feature (164)..(320): Homolog of NCBI NO: 17230243 NR Description: hypothetical protein [Nostoc sp. PCC 7120]
  misc_feature (170)..(311): Homolog of NCBI NO: 37523053 NR Description: hypothetical protein gll3484 [Gloeobacter
  misc_feature (164)..(321): Homolog of NCBI NO: 16330694 NR Description: hypothetical protein [Synechocystis sp. PCC 6803]
  misc_feature (3)..(324): Homolog of NCBI NO: 30689062 NR Description: expressed protein [Arabidopsis thaliana]
  misc_feature (78)..(320): Homolog of NCBI NO: 11358410 NR Description: hypothetical protein T7H20.290 - Arabidopsis
  misc_feature (78)..(325): Homolog of NCBI NO: 18413869 NR Description: putative protein
  misc_feature (78)..(325): Homolog of NCBI NO: 34897418 NR Description: unknown protein [Oryza sativa (japonica
  misc_feature (62)..(325): Homolog of NCBI NO: 14719331 NR Description: putative 3-beta hydroxysteroid
  misc_feature (1)..(325): Homolog of NCBI NO: 7485430 NR Description: hypothetical protein At2g37660 [imported] -
  misc_feature (1)..(325): Homolog of NCBI NO: 18404496 NR Description: expressed protein
  misc_feature (164)..(320): Homolog of NCBI NO: 17230243 NR Description: hypothetical protein [Nostoc sp. PCC 7120]
  misc_feature (170)..(311): Homolog of NCBI NO: 37523053 NR Description: hypothetical protein gll3484 [Gloeobacter
  misc_feature (164)..(321): Homolog of NCBI NO: 16330694 NR Description: hypothetical protein [Synechocystis sp. PCC 6803]
  misc_feature (3)..(324): Homolog of NCBI NO: 30689062 NR Description: expressed protein [Arabidopsis thaliana]
  misc_feature (78)..(320): Homolog of NCBI NO: 11358410 NR Description: hypothetical protein T7H20.290 - Arabidopsis
  misc_feature (78)..(325): Homolog of NCBI NO: 18413869 NR Description: putative protein
  misc_feature (78)..(325): Homolog of NCBI NO: 34897418 NR Description: unknown protein [Oryza sativa (japonica
  misc_feature (62)..(325): Homolog of NCBI NO: 14719331 NR Description: putative 3-beta hydroxysteroid
  misc_feature (1)..(325): Homolog of NCBI NO: 7485430 NR Description: hypothetical protein At2g37660 [imported] -
  misc_feature (1)..(325): Homolog of NCBI NO: 18404496 NR Description: expressed protein
  misc_feature (164)..(320): Homolog of NCBI NO: 17230243 NR Description: hypothetical protein [Nostoc sp. PCC 7120]
  misc_feature (170)..(311): Homolog of NCBI NO: 37523053 NR Description: hypothetical protein gll3484 [Gloeobacter
  misc_feature (164)..(321): Homolog of NCBI NO: 16330694 NR Description: hypothetical protein [Synechocystis sp. PCC 6803]
  misc_feature (3)..(324): Homolog of NCBI NO: 30689062 NR Description: expressed protein [Arabidopsis thaliana]
  misc_feature (78)..(320): Homolog of NCBI NO: 11358410 NR Description: hypothetical protein T7H20.290 - Arabidopsis
  misc_feature (78)..(325): Homolog of NCBI NO: 18413869 NR Description: putative protein
  misc_feature (78)..(325): Homolog of NCBI NO: 34897418 NR Description: unknown protein [Oryza sativa (japonica
  misc_feature (62)..(325): Homolog of NCBI NO: 14719331 NR Description: putative 3-beta hydroxysteroid
  misc_feature (1)..(325): Homolog of NCBI NO: 7485430 NR Description: hypothetical protein At2g37660 [imported] -
  misc_feature (1)..(325): Homolog of NCBI NO: 18404496 NR Description: expressed protein
  misc_feature (164)..(320): Homolog of NCBI NO: 17230243 NR Description: hypothetical protein [Nostoc sp. PCC 7120]
  misc_feature (170)..(311): Homolog of NCBI NO: 37523053 NR Description: hypothetical protein gll3484 [Gloeobacter
  misc_feature (164)..(321): Homolog of NCBI NO: 16330694 NR Description: hypothetical protein [Synechocystis sp. PCC 6803]
  misc_feature (3)..(324): Homolog of NCBI NO: 30689062 NR Description: expressed protein [Arabidopsis thaliana]
  misc_feature (78)..(320): Homolog of NCBI NO: 11358410 NR Description: hypothetical protein T7H20.290 - Arabidopsis
  misc_feature (78)..(325): Homolog of NCBI NO: 18413869 NR Description: putative protein
  misc_feature (78)..(325): Homolog of NCBI NO: 34897418 NR Description: unknown protein [Oryza sativa (japonica
  misc_feature (62)..(325): Homolog of NCBI NO: 14719331 NR Description: putative 3-beta hydroxysteroid
  misc_feature (1)..(325): Homolog of NCBI NO: 7485430 NR Description: hypothetical protein At2g37660 [imported] -
  misc_feature (1)..(325): Homolog of NCBI NO: 18404496 NR Description: expressed protein

SEQ ID NO: 43777 - protein, 323 aa, Arabidopsis thaliana; identical to SEQ ID NO: 29331
  peptide (1)..(323): Ceres Seq. ID no. 12601147
  misc_feature (162)..(318): Homolog of NCBI NO: 17230243 NR Description: hypothetical protein [Nostoc sp. PCC 7120]
  misc_feature (168)..(309): Homolog of NCBI NO: 37523053 NR Description: hypothetical protein gll3484 [Gloeobacter
  misc_feature (162)..(319): Homolog of NCBI NO: 16330694 NR Description: hypothetical protein [Synechocystis sp. PCC 6803]
  misc_feature (1)..(322): Homolog of NCBI NO: 30689062 NR Description: expressed protein [Arabidopsis thaliana]
  misc_feature (76)..(318): Homolog of NCBI NO: 11358410 NR Description: hypothetical protein T7H20.290 - Arabidopsis
  misc_feature (76)..(323): Homolog of NCBI NO: 18413869 NR Description: putative protein
  misc_feature (76)..(323): Homolog of NCBI NO: 34897418 NR Description: unknown protein [Oryza sativa (japonica
  misc_feature (60)..(323): Homolog of NCBI NO: 14719331 NR Description: putative 3-beta hydroxysteroid
  misc_feature (1)..(323): Homolog of NCBI NO: 7485430 NR Description: hypothetical protein At2g37660 [imported] -
  misc_feature (1)..(323): Homolog of NCBI NO: 18404496 NR Description: expressed protein
  misc_feature (162)..(318): Homolog of NCBI NO: 17230243 NR Description: hypothetical protein [Nostoc sp. PCC 7120]
  misc_feature (168)..(309): Homolog of NCBI NO: 37523053 NR Description: hypothetical protein gll3484 [Gloeobacter
  misc_feature (162)..(319): Homolog of NCBI NO: 16330694 NR Description: hypothetical protein [Synechocystis sp. PCC 6803]
  misc_feature (1)..(322): Homolog of NCBI NO: 30689062 NR Description: expressed protein [Arabidopsis thaliana]
  misc_feature (76)..(318): Homolog of NCBI NO: 11358410 NR Description: hypothetical protein T7H20.290 - Arabidopsis
  misc_feature (76)..(323): Homolog of NCBI NO: 18413869 NR Description: putative protein
  misc_feature (76)..(323): Homolog of NCBI NO: 34897418 NR Description: unknown protein [Oryza sativa (japonica
  misc_feature (60)..(323): Homolog of NCBI NO: 14719331 NR Description: putative 3-beta hydroxysteroid
  misc_feature (1)..(323): Homolog of NCBI NO: 7485430 NR Description: hypothetical protein At2g37660 [imported] -
  misc_feature (1)..(323): Homolog of NCBI NO: 18404496 NR Description: expressed protein
  misc_feature (162)..(318): Homolog of NCBI NO: 17230243 NR Description: hypothetical protein [Nostoc sp. PCC 7120]
  misc_feature (168)..(309): Homolog of NCBI NO: 37523053 NR Description: hypothetical protein gll3484 [Gloeobacter
  misc_feature (162)..(319): Homolog of NCBI NO: 16330694 NR Description: hypothetical protein [Synechocystis sp. PCC 6803]
  misc_feature (1)..(322): Homolog of NCBI NO: 30689062 NR Description: expressed protein [Arabidopsis thaliana]
  misc_feature (76)..(318): Homolog of NCBI NO: 11358410 NR Description: hypothetical protein T7H20.290 - Arabidopsis
  misc_feature (76)..(323): Homolog of NCBI NO: 18413869 NR Description: putative protein
  misc_feature (76)..(323): Homolog of NCBI NO: 34897418 NR Description: unknown protein [Oryza sativa (japonica
  misc_feature (60)..(323): Homolog of NCBI NO: 14719331 NR Description: putative 3-beta hydroxysteroid
  misc_feature (1)..(323): Homolog of NCBI NO: 7485430 NR Description: hypothetical protein At2g37660 [imported] -
  misc_feature (1)..(323): Homolog of NCBI NO: 18404496 NR Description: expressed protein
  misc_feature (162)..(318): Homolog of NCBI NO: 17230243 NR Description: hypothetical protein [Nostoc sp. PCC 7120]
  misc_feature (168)..(309): Homolog of NCBI NO: 37523053 NR Description: hypothetical protein gll3484 [Gloeobacter
  misc_feature (162)..(319): Homolog of NCBI NO: 16330694 NR Description: hypothetical protein [Synechocystis sp. PCC 6803]
  misc_feature (1)..(322): Homolog of NCBI NO: 30689062 NR Description: expressed protein [Arabidopsis thaliana]
  misc_feature (76)..(318): Homolog of NCBI NO: 11358410 NR Description: hypothetical protein T7H20.290 - Arabidopsis
  misc_feature (76)..(323): Homolog of NCBI NO: 18413869 NR Description: putative protein
  misc_feature (76)..(323): Homolog of NCBI NO: 34897418 NR Description: unknown protein [Oryza sativa (japonica
  misc_feature (60)..(323): Homolog of NCBI NO: 14719331 NR Description: putative 3-beta hydroxysteroid
  misc_feature (1)..(323): Homolog of NCBI NO: 7485430 NR Description: hypothetical protein At2g37660 [imported] -
  misc_feature (1)..(323): Homolog of NCBI NO: 18404496 NR Description: expressed protein

SEQ ID NO: 43778 - protein, 322 aa, Arabidopsis thaliana; identical to SEQ ID NO: 29332
  peptide (1)..(322): Ceres Seq. ID no. 12601148
  misc_feature (161)..(317): Homolog of NCBI NO: 17230243 NR Description: hypothetical protein [Nostoc sp. PCC 7120]
  misc_feature (167)..(308): Homolog of NCBI NO: 37523053 NR Description: hypothetical protein gll3484 [Gloeobacter
  misc_feature (161)..(318): Homolog of NCBI NO: 16330694 NR Description: hypothetical protein [Synechocystis sp. PCC 6803]
  misc_feature (1)..(321): Homolog of NCBI NO: 30689062 NR Description: expressed protein [Arabidopsis thaliana]
  misc_feature (75)..(317): Homolog of NCBI NO: 11358410 NR Description: hypothetical protein T7H20.290 - Arabidopsis
  misc_feature (75)..(322): Homolog of NCBI NO: 18413869 NR Description: putative protein
  misc_feature (75)..(322): Homolog of NCBI NO: 34897418 NR Description: unknown protein [Oryza sativa (japonica
  misc_feature (59)..(322): Homolog of NCBI NO: 14719331 NR Description: putative 3-beta hydroxysteroid
  misc_feature (1)..(322): Homolog of NCBI NO: 7485430 NR Description: hypothetical protein At2g37660 [imported] -
  misc_feature (1)..(322): Homolog of NCBI NO: 18404496 NR Description: expressed protein
  misc_feature (161)..(317): Homolog of NCBI NO: 17230243 NR Description: hypothetical protein [Nostoc sp. PCC 7120]
  misc_feature (167)..(308): Homolog of NCBI NO: 37523053 NR Description: hypothetical protein gll3484 [Gloeobacter
  misc_feature (161)..(318): Homolog of NCBI NO: 16330694 NR Description: hypothetical protein [Synechocystis sp. PCC 6803]
  misc_feature (1)..(321): Homolog of NCBI NO: 30689062 NR Description: expressed protein [Arabidopsis thaliana]
  misc_feature (75)..(317): Homolog of NCBI NO: 11358410 NR Description: hypothetical protein T7H20.290 - Arabidopsis
  misc_feature (75)..(322): Homolog of NCBI NO: 18413869 NR Description: putative protein
  misc_feature (75)..(322): Homolog of NCBI NO: 34897418 NR Description: unknown protein [Oryza sativa (japonica
  misc_feature (59)..(322): Homolog of NCBI NO: 14719331 NR Description: putative 3-beta hydroxysteroid
  misc_feature (1)..(322): Homolog of NCBI NO: 7485430 NR Description: hypothetical protein At2g37660 [imported] -
  misc_feature (1)..(322): Homolog of NCBI NO: 18404496 NR Description: expressed protein
  misc_feature (161)..(317): Homolog of NCBI NO: 17230243 NR Description: hypothetical protein [Nostoc sp. PCC 7120]
  misc_feature (167)..(308): Homolog of NCBI NO: 37523053 NR Description: hypothetical protein gll3484 [Gloeobacter
  misc_feature (161)..(318): Homolog of NCBI NO: 16330694 NR Description: hypothetical protein [Synechocystis sp. PCC 6803]
  misc_feature (1)..(321): Homolog of NCBI NO: 30689062 NR Description: expressed protein [Arabidopsis thaliana]
  misc_feature (75)..(317): Homolog of NCBI NO: 11358410 NR Description: hypothetical protein T7H20.290 - Arabidopsis
  misc_feature (75)..(322): Homolog of NCBI NO: 18413869 NR Description: putative protein
  misc_feature (75)..(322): Homolog of NCBI NO: 34897418 NR Description: unknown protein [Oryza sativa (japonica
  misc_feature (59)..(322): Homolog of NCBI NO: 14719331 NR Description: putative 3-beta hydroxysteroid
  misc_feature (1)..(322): Homolog of NCBI NO: 7485430 NR Description: hypothetical protein At2g37660 [imported] -
  misc_feature (1)..(322): Homolog of NCBI NO: 18404496 NR Description: expressed protein
  misc_feature (161)..(317): Homolog of NCBI NO: 17230243 NR Description: hypothetical protein [Nostoc sp. PCC 7120]
  misc_feature (167)..(308): Homolog of NCBI NO: 37523053 NR Description: hypothetical protein gll3484 [Gloeobacter
  misc_feature (161)..(318): Homolog of NCBI NO: 16330694 NR Description: hypothetical protein [Synechocystis sp. PCC 6803]
  misc_feature (1)..(321): Homolog of NCBI NO: 30689062 NR Description: expressed protein [Arabidopsis thaliana]
  misc_feature (75)..(317): Homolog of NCBI NO: 11358410 NR Description: hypothetical protein T7H20.290 - Arabidopsis
  misc_feature (75)..(322): Homolog of NCBI NO: 18413869 NR Description: putative protein
  misc_feature (75)..(322): Homolog of NCBI NO: 34897418 NR Description: unknown protein [Oryza sativa (japonica
  misc_feature (59)..(322): Homolog of NCBI NO: 14719331 NR Description: putative 3-beta hydroxysteroid
  misc_feature (1)..(322): Homolog of NCBI NO: 7485430 NR Description: hypothetical protein At2g37660 [imported] -
  misc_feature (1)..(322): Homolog of NCBI NO: 18404496 NR Description: expressed protein

SEQ ID NO: 43779 - DNA, 750 bp, Arabidopsis thaliana; identical to SEQ ID NO: 30484
  misc_feature (1)..(750): Ceres Seq. ID no. 13497622
  misc_feature: MA Experiment ID: 108434 Result: Up-regulated in Transcription
  misc_feature: MA Experiment 108434 PARAMETER Experiment Name: At_Root_Tips_cDNA_P Parameter: Tissue Value: Root Tips
  misc_feature: MA Experiment ID: 108462 Result: Down-regulated in Transcription
  misc_feature: MA Experiment 108462 PARAMETER Experiment Name: At_Germinating_Seeds_cDNA_P Parameter: Age (day) Value: 2 vs. 0
  misc_feature: MA Experiment 108462 PARAMETER Experiment Name: At_Germinating_Seeds_cDNA_P Parameter: Tissue Value: Germinating Seeds
  misc_feature: MA Experiment ID: 108463 Result: Down-regulated in Transcription
  misc_feature: MA Experiment 108463 PARAMETER Experiment Name: At_Germinating_Seeds_cDNA_P Parameter: Age (day) Value: 3 vs. 0
  misc_feature: MA Experiment 108463 PARAMETER Experiment Name: At_Germinating_Seeds_cDNA_P Parameter: Tissue Value: Germinating Seeds
  misc_feature: MA Experiment ID: 108464 Result: Down-regulated in Transcription
  misc_feature: MA Experiment 108464 PARAMETER Experiment Name: At_Germinating_Seeds_cDNA_P Parameter: Age (day) Value: 4 vs. 0
  misc_feature: MA Experiment 108464 PARAMETER Experiment Name: At_Germinating_Seeds_cDNA_P Parameter: Tissue Value: Germinating Seeds
  misc_feature: MA Experiment ID: 108488 Result: Up-regulated in Transcription
  misc_feature: MA Experiment ID: 108561 Result: Down-regulated in Transcription
  misc_feature: MA Experiment 108561 PARAMETER Experiment Name: At_100uM_ABA_cDNA_P Parameter: Timepoint (hr) Value: 6
  misc_feature: MA Experiment 108561 PARAMETER Experiment Name: At_100uM_ABA_cDNA_P Parameter: Tissue Value: Aerial
  misc_feature: MA Experiment 108561 PARAMETER Experiment Name: At_100uM_ABA_cDNA_P Parameter: Treatment Value: 100uM ABA vs. No Treatment
  misc_feature: MA Experiment ID: 108579 Result: Up-regulated in Transcription
  misc_feature: MA Experiment 108579 PARAMETER Experiment Name: At_4deg_Cold_cDNA_P Parameter: Temperature (deg C) Value: 4 vs. 22
  misc_feature: MA Experiment 108579 PARAMETER Experiment Name: At_4deg_Cold_cDNA_P Parameter: Timepoint (hr) Value: 6
  misc_feature: MA Experiment 108579 PARAMETER Experiment Name: At_4deg_Cold_cDNA_P Parameter: Tissue Value: Aerial
  misc_feature: MA Experiment ID: 108585 Result: Down-regulated in Transcription
  misc_feature: MA Experiment 108585 PARAMETER Experiment Name: At_5mM_NaNP_cDNA_P Parameter: Timepoint (hr) Value: 6
  misc_feature: MA Experiment 108585 PARAMETER Experiment Name: At_5mM_NaNP_cDNA_P Parameter: Tissue Value: Aerial
  misc_feature: MA Experiment 108585 PARAMETER Experiment Name: At_5mM_NaNP_cDNA_P Parameter: Treatment Value: null
  misc_feature: MA Experiment ID: 108595 Result: Down-regulated in Transcription
  misc_feature: MA Experiment 108595 PARAMETER Experiment Name: At_Ler-pi_Ovule_cDNA_P Parameter: Plant Line Value: null
  misc_feature: MA Experiment ID: 108605 Result: Down-regulated in Transcription
  misc_feature: MA Experiment 108605 PARAMETER Experiment Name: At_100uM_ABA_cDNA_P Parameter: Timepoint (hr) Value: 6
  misc_feature: MA Experiment 108605 PARAMETER Experiment Name: At_100uM_ABA_cDNA_P Parameter: Tissue Value: Aerial
  misc_feature: MA Experiment 108605 PARAMETER Experiment Name: At_100uM_ABA_cDNA_P Parameter: Treatment Value: 100uM ABA vs. No Treatment
  misc_feature: MA Experiment ID: 108607 Result: Down-regulated in Transcription
  misc_feature: MA Experiment 108607 PARAMETER Experiment Name: At_100uM_ABA_cDNA_P Parameter: Timepoint (hr) Value: 4
  misc_feature: MA Experiment 108607 PARAMETER Experiment Name: At_100uM_ABA_cDNA_P Parameter: Tissue Value: Aerial
  misc_feature: MA Experiment 108607 PARAMETER Experiment Name: At_100uM_ABA_cDNA_P Parameter: Treatment Value: 100uM ABA vs. No Treatment
  misc_feature: MA Experiment ID: 108668 Result: Down-regulated in Transcription
  misc_feature: MA Experiment 108668 PARAMETER Experiment Name: At_2mM_SA_cDNA_P Parameter: Plant Line Value: WS
  misc_feature: MA Experiment 108668 PARAMETER Experiment Name: At_2mM_SA_cDNA_P Parameter: Timepoint (hr) Value: 6
  misc_feature: MA Experiment 108668 PARAMETER Experiment Name: At_2mM_SA_cDNA_P Parameter: Treatment Value: 2mM SA vs. No Treatment
  misc_feature: MA Experiment ID: 20000069 Result: Down-regulated in Transcription
  misc_feature: MA Experiment 20000069 PARAMETER Experiment Name: At_100uM_ABA_Mutants_cDNA_P Parameter: Plant Line Value: CS23
  misc_feature: MA Experiment 20000069 PARAMETER Experiment Name: At_100uM_ABA_Mutants_cDNA_P Parameter: Timepoint (hr) Value: 6
  misc_feature: MA Experiment 20000069 PARAMETER Experiment Name: At_100uM_ABA_Mutants_cDNA_P Parameter: Tissue Value: Aerial
  misc_feature: MA Experiment 20000069 PARAMETER Experiment Name: At_100uM_ABA_Mutants_cDNA_P Parameter: Treatment Value: 100uM ABA vs. No Treatment
  misc_feature: MA Experiment ID: 20000070 Result: Down-regulated in Transcription
  misc_feature: MA Experiment 20000070 PARAMETER Experiment Name: At_100uM_ABA_Mutants_cDNA_P Parameter: Plant Line Value: CS24
  misc_feature: MA Experiment 20000070 PARAMETER Experiment Name: At_100uM_ABA_Mutants_cDNA_P Parameter: Timepoint (hr) Value: 6
  misc_feature: MA Experiment 20000070 PARAMETER Experiment Name: At_100uM_ABA_Mutants_cDNA_P Parameter: Tissue Value: Aerial
  misc_feature: MA Experiment 20000070 PARAMETER Experiment Name: At_100uM_ABA_Mutants_cDNA_P Parameter: Treatment Value: 100uM ABA vs. No Treatment
  misc_feature: MA Experiment ID: 20000071 Result: Down-regulated in Transcription
  misc_feature: MA Experiment 20000071 PARAMETER Experiment Name: At_100uM_ABA_Mutants_cDNA_P Parameter: Plant Line Value: CS8104
  misc_feature: MA Experiment 20000071 PARAMETER Experiment Name: At_100uM_ABA_Mutants_cDNA_P Parameter: Timepoint (hr) Value: 6
  misc_feature: MA Experiment 20000071 PARAMETER Experiment Name: At_100uM_ABA_Mutants_cDNA_P Parameter: Tissue Value: Aerial
  misc_feature: MA Experiment 20000071 PARAMETER Experiment Name: At_100uM_ABA_Mutants_cDNA_P Parameter: Treatment Value: 100uM ABA vs. No Treatment
  misc_feature: MA Experiment ID: 20000072 Result: Down-regulated in Transcription
  misc_feature: MA Experiment 20000072 PARAMETER Experiment Name: At_100uM_ABA_Mutants_cDNA_P Parameter: Plant Line Value: CS8105
  misc_feature: MA Experiment 20000072 PARAMETER Experiment Name: At_100uM_ABA_Mutants_cDNA_P Parameter: Timepoint (hr) Value: 6
  misc_feature: MA Experiment 20000072 PARAMETER Experiment Name: At_100uM_ABA_Mutants_cDNA_P Parameter: Tissue Value: Aerial
  misc_feature: MA Experiment 20000072 PARAMETER Experiment Name: At_100uM_ABA_Mutants_cDNA_P Parameter: Treatment Value: 100uM ABA vs. No Treatment
  misc_feature: MA Experiment ID: 20000087 Result: Down-regulated in Transcription
  misc_feature: MA Experiment 20000087 PARAMETER Experiment Name: At_100uM_ABA_Mutants_cDNA_P Parameter: Plant Line Value: WS
  misc_feature: MA Experiment 20000087 PARAMETER Experiment Name: At_100uM_ABA_Mutants_cDNA_P Parameter: Timepoint (hr) Value: 6
  misc_feature: MA Experiment 20000087 PARAMETER Experiment Name: At_100uM_ABA_Mutants_cDNA_P Parameter: Tissue Value: Aerial
  misc_feature: MA Experiment 20000087 PARAMETER Experiment Name: At_100uM_ABA_Mutants_cDNA_P Parameter: Treatment Value: 100uM ABA vs. No Treatment
  misc_feature: MA Experiment ID: 20000113 Result: Up-regulated in Transcription
  misc_feature: MA Experiment 20000113 PARAMETER Experiment Name: At_42deg_Heat_cDNA_P Parameter: Temperature (deg C) Value: 42 vs. 22
  misc_feature: MA Experiment 20000113 PARAMETER Experiment Name: At_42deg_Heat_cDNA_P Parameter: Timepoint (hr) Value: 8
  misc_feature: MA Experiment 20000113 PARAMETER Experiment Name: At_42deg_Heat_cDNA_P Parameter: Tissue Value: Aerial
  misc_feature: MA Experiment ID: 20000117 Result: Down-regulated in Transcription
  misc_feature: MA Experiment 20000117 PARAMETER Experiment Name: At_100uM_ABA_Mutants_cDNA_P Parameter: Plant Line Value: Columbia
  misc_feature: MA Experiment 20000117 PARAMETER Experiment Name: At_100uM_ABA_Mutants_cDNA_P Parameter: Timepoint (hr) Value: 6
  misc_feature: MA Experiment 20000117 PARAMETER Experiment Name: At_100uM_ABA_Mutants_cDNA_P Parameter: Tissue Value: Aerial
  misc_feature: MA Experiment 20000117 PARAMETER Experiment Name: At_100uM_ABA_Mutants_cDNA_P Parameter: Treatment Value: 100uM ABA vs. No Treatment
  misc_feature: MA Experiment ID: 20000179 Result: Down-regulated in Transcription
  misc_feature: MA Experiment 20000179 PARAMETER Experiment Name: At_Germinating_Seeds_P Parameter: Age (hr) Value: 6 vs. 0
  misc_feature: MA Experiment 20000179 PARAMETER Experiment Name: At_Germinating_Seeds_P Parameter: Tissue Value: Germinating Seeds
  misc_feature: MA Experiment ID: 20000182 Result: Down-regulated in Transcription
  misc_feature: MA Experiment 20000182 PARAMETER Experiment Name: At_2mM_SA_P Parameter: Age (day) Value: 14
  misc_feature: MA Experiment 20000182 PARAMETER Experiment Name: At_2mM_SA_P Parameter: Organism Value: A. thaliana
  misc_feature: MA Experiment 20000182 PARAMETER Experiment Name: At_2mM_SA_P Parameter: Plant Line Value: WS
  misc_feature: MA Experiment 20000182 PARAMETER Experiment Name: At_2mM_SA_P Parameter: Timepoint (hr) Value: 6
  misc_feature: MA Experiment 20000182 PARAMETER Experiment Name: At_2mM_SA_P Parameter: Tissue Value: Aerial
  misc_feature: MA Experiment 20000182 PARAMETER Experiment Name: At_2mM_SA_P Parameter: Treatment Value: 2mM SA vs. No Treatment
  misc_feature: MA Experiment ID: 20000184 Result: Up-regulated in Transcription
  misc_feature: MA Experiment 20000184 PARAMETER Experiment Name: At_Shoots__P Parameter: Age (day) Value: 7
  misc_feature: MA Experiment 20000184 PARAMETER Experiment Name: At_Shoots__P Parameter: Tissue Value: Shoots vs. Whole Plant
  misc_feature: MA Experiment ID: 20000185 Result: Down-regulated in Transcription
  misc_feature: MA Experiment 20000185 PARAMETER Experiment Name: At_Roots__P Parameter: Age (day) Value: 7 vs. 21
  misc_feature: MA Experiment 20000185 PARAMETER Experiment Name: At_Roots__P Parameter: Organism Value: A. thaliana
  misc_feature: MA Experiment 20000185 PARAMETER Experiment Name: At_Roots__P Parameter: Tissue Value: Roots vs. Whole Plant
  misc_feature: MA Experiment ID: 20000234 Result: Up-regulated in Transcription
  misc_feature: MA Experiment 20000234 PARAMETER Experiment Name: At_Siliques_P Parameter: Age (day) Value: 21
  misc_feature: MA Experiment 20000234 PARAMETER Experiment Name: At_Siliques_P Parameter: Organism Value: A. thaliana
  misc_feature: MA Experiment 20000234 PARAMETER Experiment Name: At_Siliques_P Parameter: Plant Line Value: WS
  misc_feature: MA Experiment 20000234 PARAMETER Experiment Name: At_Siliques_P Parameter: Tissue Value: Less Than 5mm Siliques vs. Whole Plant
  misc_feature: MA Experiment ID: 20000264 Result: Up-regulated in Transcription
  misc_feature: MA Experiment 20000264 PARAMETER Experiment Name: At_Open_Flower_P Parameter: Age (day) Value: 21
  misc_feature: MA Experiment 20000264 PARAMETER Experiment Name: At_Open_Flower_P Parameter: Plant Line Value: WS
  misc_feature: MA Experiment 20000264 PARAMETER Experiment Name: At_Open_Flower_P Parameter: Tissue Value: Open Flower vs. Whole Plant
  misc_feature: MA Experiment ID: 20000436 Result: Down-regulated in Transcription
  misc_feature: MA Experiment 20000436 PARAMETER Experiment Name: At_Drought_P Parameter: Age (day) Value: 7
  misc_feature: MA Experiment 20000436 PARAMETER Experiment Name: At_Drought_P Parameter: Organism Value: A. thaliana
  misc_feature: MA Experiment 20000436 PARAMETER Experiment Name: At_Drought_P Parameter: Plant Line Value: WS
  misc_feature: MA Experiment 20000436 PARAMETER Experiment Name: At_Drought_P Parameter: Timepoint (hr) Value: 12
  misc_feature: MA Experiment 20000436 PARAMETER Experiment Name: At_Drought_P Parameter: Tissue Value: Whole Plant
  misc_feature: MA Experiment 20000436 PARAMETER Experiment Name: At_Drought_P Parameter: Treatment Value: Drought vs. No Drought
  misc_feature: MA Experiment ID: 20000437 Result: Down-regulated in Transcription
  misc_feature: MA Experiment 20000437 PARAMETER Experiment Name: At_Drought_P Parameter: Age (day) Value: 8
  misc_feature: MA Experiment 20000437 PARAMETER Experiment Name: At_Drought_P Parameter: Organism Value: A. thaliana
  misc_feature: MA Experiment 20000437 PARAMETER Experiment Name: At_Drought_P Parameter: Plant Line Value: WS
  misc_feature: MA Experiment 20000437 PARAMETER Experiment Name: At_Drought_P Parameter: Timepoint (hr) Value: 24
  misc_feature: MA Experiment 20000437 PARAMETER Experiment Name: At_Drought_P Parameter: Tissue Value: Whole Plant
  misc_feature: MA Experiment 20000437 PARAMETER Experiment Name: At_Drought_P Parameter: Treatment Value: Drought vs. No Drought
  misc_feature: MA Experiment ID: 20000439 Result: Down-regulated in Transcription
  misc_feature: MA Experiment 20000439 PARAMETER Experiment Name: At_Roots__P Parameter: Age (day) Value: 14 vs. 21
  misc_feature: MA Experiment 20000439 PARAMETER Experiment Name: At_Roots__P Parameter: Organism Value: A. thaliana
  misc_feature: MA Experiment 20000439 PARAMETER Experiment Name: At_Roots__P Parameter: Tissue Value: Roots vs. Whole Plant
  misc_feature: MA Experiment ID: 20000445 Result: Down-regulated in Transcription
  misc_feature: MA Experiment 20000445 PARAMETER Experiment Name: At_100uM_NAA__P Parameter: Age (day) Value: 14
  misc_feature: MA Experiment 20000445 PARAMETER Experiment Name: At_100uM_NAA__P Parameter: Organism Value: A. thaliana
  misc_feature: MA Experiment 20000445 PARAMETER Experiment Name: At_100uM_NAA__P Parameter: Plant Line Value: WS
  misc_feature: MA Experiment 20000445 PARAMETER Experiment Name: At_100uM_NAA__P Parameter: Timepoint (hr) Value: 6
  misc_feature: MA Experiment 20000445 PARAMETER Experiment Name: At_100uM_NAA__P Parameter: Tissue Value: Aerial
  misc_feature: MA Experiment 20000445 PARAMETER Experiment Name: At_100uM_NAA__P Parameter: Treatment Value: 100uM NAA vs. No Treatment
  misc_feature: MA Experiment ID: 20000453 Result: Down-regulated in Transcription
  misc_feature: MA Experiment 20000453 PARAMETER Experiment Name: At_100uM_ABA_P Parameter: Age (day) Value: 15
  misc_feature: MA Experiment 20000453 PARAMETER Experiment Name: At_100uM_ABA_P Parameter: Organism Value: A. thaliana
  misc_feature: MA Experiment 20000453 PARAMETER Experiment Name: At_100uM_ABA_P Parameter: Plant Line Value: WS
  misc_feature: MA Experiment 20000453 PARAMETER Experiment Name: At_100uM_ABA_P Parameter: Timepoint (hr) Value: 24
  misc_feature: MA Experiment 20000453 PARAMETER Experiment Name: At_100uM_ABA_P Parameter: Tissue Value: Aerial
  misc_feature: MA Experiment 20000453 PARAMETER Experiment Name: At_100uM_ABA_P Parameter: Treatment Value: 100uM ABA vs. No Treatment
  misc_feature: MA Experiment ID: 20000794 Result: Down-regulated in Transcription
  misc_feature: MA Experiment 20000794 PARAMETER Experiment Name: At_Petals_P Parameter: Age (day) Value: 23-25 days
  misc_feature: MA Experiment 20000794 PARAMETER Experiment Name: At_Petals_P Parameter: Plant Line Value: WS
  misc_feature: MA Experiment 20000794 PARAMETER Experiment Name: At_Petals_P Parameter: Tissue Value: Petals vs. Whole plant
  misc_feature: MA Experiment ID: 20001248 Result: Down-regulated in Transcription
  misc_feature: MA Experiment 20001248 PARAMETER Experiment Name: At_Far-red-induction_P Parameter: Age (day) Value: 7
  misc_feature: MA Experiment 20001248 PARAMETER Experiment Name: At_Far-red-induction_P Parameter: Light Value: Far-red vs. White
  misc_feature: MA Experiment 20001248 PARAMETER Experiment Name: At_Far-red-induction_P Parameter: Organism Value: A. thaliana
  misc_feature: MA Experiment 20001248 PARAMETER Experiment Name: At_Far-red-induction_P Parameter: Plant Line Value: Columbia
  misc_feature: MA Experiment 20001248 PARAMETER Experiment Name: At_Far-red-induction_P Parameter: Timepoint (hr) Value: 4
  misc_feature: MA Experiment 20001248 PARAMETER Experiment Name: At_Far-red-induction_P Parameter: Tissue Value: Whole Plant
  misc_feature: MA Experiment ID: 20001450 Result: Down-regulated in Transcription
  misc_feature: MA Experiment 20001450 PARAMETER Experiment Name: At_Far-red-induction_P Parameter: Age (day) Value: 7
  misc_feature: MA Experiment 20001450 PARAMETER Experiment Name: At_Far-red-induction_P Parameter: Light Value: Far-red vs. White
  misc_feature: MA Experiment 20001450 PARAMETER Experiment Name: At_Far-red-induction_P Parameter: Organism Value: A. thaliana
  misc_feature: MA Experiment 20001450 PARAMETER Experiment Name: At_Far-red-induction_P Parameter: Plant Line Value: Columbia
  misc_feature: MA Experiment 20001450 PARAMETER Experiment Name: At_Far-red-induction_P Parameter: Timepoint (hr) Value: 8
  misc_feature: MA Experiment 20001450 PARAMETER Experiment Name: At_Far-red-induction_P Parameter: Tissue Value: Whole Plant
  misc_feature: MA Experiment ID: 20001556 Result: Up-regulated in Transcription
  misc_feature: MA Experiment 20001556 PARAMETER Experiment Name: At_Drought_Soil_Dry_P Parameter: Age (day) Value: 26
  misc_feature: MA Experiment 20001556 PARAMETER Experiment Name: At_Drought_Soil_Dry_P Parameter: Organism Value: A. thaliana
  misc_feature: MA Experiment 20001556 PARAMETER Experiment Name: At_Drought_Soil_Dry_P Parameter: Plant Line Value: WS
  misc_feature: MA Experiment 20001556 PARAMETER Experiment Name: At_Drought_Soil_Dry_P Parameter: Post Timepoint (hr) Value: None
  misc_feature: MA Experiment 20001556 PARAMETER Experiment Name: At_Drought_Soil_Dry_P Parameter: Post-Treatment Value: None
  misc_feature: MA Experiment 20001556 PARAMETER Experiment Name: At_Drought_Soil_Dry_P Parameter: Timepoint (day) Value: 12
  misc_feature: MA Experiment 20001556 PARAMETER Experiment Name: At_Drought_Soil_Dry_P Parameter: Treatment Value: Drought vs. No Drought
  misc_feature: MA Experiment ID: 20001558 Result: Up-regulated in Transcription
  misc_feature: MA Experiment 20001558 PARAMETER Experiment Name: At_Drought_Soil_Dry_P Parameter: Age (day) Value: 27
  misc_feature: MA Experiment 20001558 PARAMETER Experiment Name: At_Drought_Soil_Dry_P Parameter: Organism Value: A. thaliana
  misc_feature: MA Experiment 20001558 PARAMETER Experiment Name: At_Drought_Soil_Dry_P Parameter: Plant Line Value: WS
  misc_feature: MA Experiment 20001558 PARAMETER Experiment Name: At_Drought_Soil_Dry_P Parameter: Post Timepoint (hr) Value: 6
  misc_feature: MA Experiment 20001558 PARAMETER Experiment Name: At_Drought_Soil_Dry_P Parameter: Post-Treatment Value: Re-Water vs. No Drought
  misc_feature: MA Experiment 20001558 PARAMETER Experiment Name: At_Drought_Soil_Dry_P Parameter: Timepoint (day) Value: 13
  misc_feature: MA Experiment 20001558 PARAMETER Experiment Name: At_Drought_Soil_Dry_P Parameter: Treatment Value: Drought vs. No Drought
  misc_feature: MA Experiment ID: 20001757 Result: Up-regulated in Transcription
  misc_feature: MA Experiment 20001757 PARAMETER Experiment Name: At_50mM_NH4NO3_L-to-H_P Parameter: Timepoint (hr) Value: 6
  misc_feature: MA Experiment 20001757 PARAMETER Experiment Name: At_50mM_NH4NO3_L-to-H_P Parameter: Tissue Value: Leaf
  misc_feature: MA Experiment 20001757 PARAMETER Experiment Name: At_50mM_NH4NO3_L-to-H_P Parameter: Treatment Value: 50mM NH4NO3 vs 100mM Mannitol

SEQ ID NO: 43780 - protein, 161 aa, Arabidopsis thaliana; identical to SEQ ID NO: 30485
  peptide (1)..(161): Ceres Seq. ID no. 13497623
  misc_feature (85)..(161): Pfam Name: SWIB/MDM2 domain Pfam Description: SWIB/MDM2 domain
  misc_feature (85)..(161): Pfam Name: SWIB/MDM2 domain Pfam Description: SWIB/MDM2 domain
  misc_feature (39)..(161): Homolog of NCBI NO: 18396594 NR Description: expressed protein [Arabidopsis thaliana]
  misc_feature (35)..(161): Homolog of NCBI NO: 21593643 NR Description: unknown [Arabidopsis thaliana]
  misc_feature (45)..(160): Homolog of NCBI NO: 33667910 NR Description: SWIb domain-containing protein [Solanum chacoense]
  misc_feature (39)..(161): Homolog of NCBI NO: 14488372 NR Description: hypothetical protein [Oryza sativa (japonica
  misc_feature (18)..(161): Homolog of NCBI NO: 21593713 NR Description: unknown [Arabidopsis thaliana]
  misc_feature (39)..(161): Homolog of NCBI NO: 18396594 NR Description: expressed protein [Arabidopsis thaliana]
  misc_feature (45)..(160): Homolog of NCBI NO: 33667910 NR Description: SWIb domain-containing protein [Solanum chacoense]
  misc_feature (18)..(161): Homolog of NCBI NO: 21593713 NR Description: unknown [Arabidopsis thaliana]
  misc_feature (18)..(161): Homolog of NCBI NO: 15235320 NR Description: expressed protein [Arabidopsis thaliana]
  misc_feature (18)..(161): Homolog of NCBI NO: 14423526 NR Description: putative protein [Arabidopsis thaliana]
  misc_feature (18)..(161): Homolog of NCBI NO: 21553903 NR Description: unknown [Arabidopsis thaliana]
  misc_feature (18)..(161): Homolog of NCBI NO: 18397658 NR Description: expressed protein [Arabidopsis thaliana]
  misc_feature (18)..(161): Homolog of NCBI NO: 19698859 NR Description: unknown protein [Arabidopsis thaliana]
  misc_feature (39)..(161): Homolog of NCBI NO: 14488372 NR Description: hypothetical protein [Oryza sativa (japonica
  misc_feature (35)..(161): Homolog of NCBI NO: 21593643 NR Description: unknown [Arabidopsis thaliana]
  misc_feature (18)..(161): Homolog of NCBI NO: 19698859 NR Description: unknown protein [Arabidopsis thaliana]
  misc_feature (18)..(161): Homolog of NCBI NO: 18397658 NR Description: expressed protein [Arabidopsis thaliana]
  misc_feature (18)..(161): Homolog of NCBI NO: 21553903 NR Description: unknown [Arabidopsis thaliana]
  misc_feature (18)..(161): Homolog of NCBI NO: 14423526 NR Description: putative protein [Arabidopsis thaliana]
  misc_feature (18)..(161): Homolog of NCBI NO: 15235320 NR Description: expressed protein [Arabidopsis thaliana]

SEQ ID NO: 43781 - protein, 144 aa, Arabidopsis thaliana; identical to SEQ ID NO: 30486
  peptide (1)..(144): Ceres Seq. ID no. 13497624
  misc_feature (68)..(144): Pfam Name: SWIB/MDM2 domain Pfam Description: SWIB/MDM2 domain
  misc_feature (68)..(144): Pfam Name: SWIB/MDM2 domain Pfam Description: SWIB/MDM2 domain
  misc_feature (22)..(144): Homolog of NCBI NO: 18396594 NR Description: expressed protein [Arabidopsis thaliana]
  misc_feature (18)..(144): Homolog of NCBI NO: 21593643 NR Description: unknown [Arabidopsis thaliana]
  misc_feature (28)..(143): Homolog of NCBI NO: 33667910 NR Description: SWIb domain-containing protein [Solanum chacoense]
  misc_feature (22)..(144): Homolog of NCBI NO: 14488372 NR Description: hypothetical protein [Oryza sativa (japonica
  misc_feature (1)..(144): Homolog of NCBI NO: 21593713 NR Description: unknown [Arabidopsis thaliana]
  misc_feature (22)..(144): Homolog of NCBI NO: 18396594 NR Description: expressed protein [Arabidopsis thaliana]
  misc_feature (28)..(143): Homolog of NCBI NO: 33667910 NR Description: SWIb domain-containing protein [Solanum chacoense]
  misc_feature (1)..(144): Homolog of NCBI NO: 21593713 NR Description: unknown [Arabidopsis thaliana]
  misc_feature (1)..(144): Homolog of NCBI NO: 15235320 NR Description: expressed protein [Arabidopsis thaliana]
  misc_feature (1)..(144): Homolog of NCBI NO: 14423526 NR Description: putative protein [Arabidopsis thaliana]
  misc_feature (1)..(144): Homolog of NCBI NO: 21553903 NR Description: unknown [Arabidopsis thaliana]
  misc_feature (1)..(144): Homolog of NCBI NO: 18397658 NR Description: expressed protein [Arabidopsis thaliana]
  misc_feature (1)..(144): Homolog of NCBI NO: 19698859 NR Description: unknown protein [Arabidopsis thaliana]
  misc_feature (22)..(144): Homolog of NCBI NO: 14488372 NR Description: hypothetical protein [Oryza sativa (japonica
  misc_feature (18)..(144): Homolog of NCBI NO: 21593643 NR Description: unknown [Arabidopsis thaliana]
  misc_feature (1)..(144): Homolog of NCBI NO: 19698859 NR Description: unknown protein [Arabidopsis thaliana]
  misc_feature (1)..(144): Homolog of NCBI NO: 18397658 NR Description: expressed protein [Arabidopsis thaliana]
  misc_feature (1)..(144): Homolog of NCBI NO: 21553903 NR Description: unknown [Arabidopsis thaliana]
  misc_feature (1)..(144): Homolog of NCBI NO: 14423526 NR Description: putative protein [Arabidopsis thaliana]
  misc_feature (1)..(144): Homolog of NCBI NO: 15235320 NR Description: expressed protein [Arabidopsis thaliana]

SEQ ID NO: 43782 - protein, 121 aa, Arabidopsis thaliana; identical to SEQ ID NO: 30487
  peptide (1)..(121): Ceres Seq. ID no. 13497625
  misc_feature (45)..(121): Pfam Name: SWIB/MDM2 domain Pfam Description: SWIB/MDM2 domain
  misc_feature (45)..(121): Pfam Name: SWIB/MDM2 domain Pfam Description: SWIB/MDM2 domain
  misc_feature (1)..(121): Homolog of NCBI NO: 18396594 NR Description: expressed protein [Arabidopsis thaliana]
  misc_feature (1)..(121): Homolog of NCBI NO: 21593643 NR Description: unknown [Arabidopsis thaliana]
  misc_feature (5)..(120): Homolog of NCBI NO: 33667910 NR Description: SWIb domain-containing protein [Solanum chacoense]
  misc_feature (1)..(121): Homolog of NCBI NO: 14488372 NR Description: hypothetical protein [Oryza sativa (japonica
  misc_feature (1)..(121): Homolog of NCBI NO: 21593713 NR Description: unknown [Arabidopsis thaliana]
  misc_feature (1)..(121): Homolog of NCBI NO: 18396594 NR Description: expressed protein [Arabidopsis thaliana]
  misc_feature (5)..(120): Homolog of NCBI NO: 33667910 NR Description: SWIb domain-containing protein [Solanum chacoense]
  misc_feature (1)..(121): Homolog of NCBI NO: 21593713 NR Description: unknown [Arabidopsis thaliana]
  misc_feature (1)..(121): Homolog of NCBI NO: 15235320 NR Description: expressed protein [Arabidopsis thaliana]
  misc_feature (1)..(121): Homolog of NCBI NO: 14423526 NR Description: putative protein [Arabidopsis thaliana]
  misc_feature (1)..(121): Homolog of NCBI NO: 21553903 NR Description: unknown [Arabidopsis thaliana]
  misc_feature (1)..(121): Homolog of NCBI NO: 18397658 NR Description: expressed protein [Arabidopsis thaliana]
  misc_feature (1)..(121): Homolog of NCBI NO: 19698859 NR Description: unknown protein [Arabidopsis thaliana]
  misc_feature (1)..(121): Homolog of NCBI NO: 14488372 NR Description: hypothetical protein [Oryza sativa (japonica
  misc_feature (1)..(121): Homolog of NCBI NO: 21593643 NR Description: unknown [Arabidopsis thaliana]
  misc_feature (1)..(121): Homolog of NCBI NO: 19698859 NR Description: unknown protein [Arabidopsis thaliana]
  misc_feature (1)..(121): Homolog of NCBI NO: 18397658 NR Description: expressed protein [Arabidopsis thaliana]
  misc_feature (1)..(121): Homolog of NCBI NO: 21553903 NR Description: unknown [Arabidopsis thaliana]
  misc_feature (1)..(121): Homolog of NCBI NO: 14423526 NR Description: putative protein [Arabidopsis thaliana]
  misc_feature (1)..(121): Homolog of NCBI NO: 15235320 NR Description: expressed protein [Arabidopsis thaliana]

SEQ ID NO: 43783 - DNA, 627 bp, Arabidopsis thaliana; identical to SEQ ID NO: 35506
  misc_feature (1)..(627): Ceres Seq. ID no. 12377321
  misc_feature: MA Experiment ID: 108434 Result: Down-regulated in Transcription
  misc_feature: MA Experiment 108434 PARAMETER Experiment Name: At_Root_Tips_cDNA_P Parameter: Tissue Value: Root Tips
  misc_feature: MA Experiment ID: 108435 Result: Down-regulated in Transcription
  misc_feature: MA Experiment 108435 PARAMETER Experiment Name: At_stm_Mutants_cDNA_P Parameter: Plant Line Value: wt Landsburg vs stm
  misc_feature: MA Experiment 108435 PARAMETER Experiment Name: At_stm_Mutants_cDNA_P Parameter: Tissue Value: Shoot Apical Meristem Region
  misc_feature: MA Experiment ID: 108461 Result: Up-regulated in Transcription
  misc_feature: MA Experiment 108461 PARAMETER Experiment Name: At_Germinating_Seeds_cDNA_P Parameter: Age (day) Value: 1 vs. 0
  misc_feature: MA Experiment 108461 PARAMETER Experiment Name: At_Germinating_Seeds_cDNA_P Parameter: Tissue Value: Germinating Seeds
  misc_feature: MA Experiment ID: 108462 Result: Up-regulated in Transcription
  misc_feature: MA Experiment 108462 PARAMETER Experiment Name: At_Germinating_Seeds_cDNA_P Parameter: Age (day) Value: 2 vs. 0
  misc_feature: MA Experiment 108462 PARAMETER Experiment Name: At_Germinating_Seeds_cDNA_P Parameter: Tissue Value: Germinating Seeds
  misc_feature: MA Experiment ID: 108464 Result: Up-regulated in Transcription
  misc_feature: MA Experiment 108464 PARAMETER Experiment Name: At_Germinating_Seeds_cDNA_P Parameter: Age (day) Value: 4 vs. 0
  misc_feature: MA Experiment 108464 PARAMETER Experiment Name: At_Germinating_Seeds_cDNA_P Parameter: Tissue Value: Germinating Seeds
  misc_feature: MA Experiment ID: 108488 Result: Up-regulated in Transcription
  misc_feature: MA Experiment ID: 108595 Result: Down-regulated in Transcription
  misc_feature: MA Experiment 108595 PARAMETER Experiment Name: At_Ler-pi_Ovule_cDNA_P Parameter: Plant Line Value: null
  misc_feature: MA Experiment ID: 20000070 Result: Down-regulated in Transcription
  misc_feature: MA Experiment 20000070 PARAMETER Experiment Name: At_100uM_ABA_Mutants_cDNA_P Parameter: Plant Line Value: CS24
  misc_feature: MA Experiment 20000070 PARAMETER Experiment Name: At_100uM_ABA_Mutants_cDNA_P Parameter: Timepoint (hr) Value: 6
  misc_feature: MA Experiment 20000070 PARAMETER Experiment Name: At_100uM_ABA_Mutants_cDNA_P Parameter: Tissue Value: Aerial
  misc_feature: MA Experiment 20000070 PARAMETER Experiment Name: At_100uM_ABA_Mutants_cDNA_P Parameter: Treatment Value: 100uM ABA vs. No Treatment
  misc_feature: MA Experiment ID: 20000088 Result: Down-regulated in Transcription
  misc_feature: MA Experiment 20000088 PARAMETER Experiment Name: At_100uM_ABA_Mutants_cDNA_P Parameter: Plant Line Value: Landsberg
  misc_feature: MA Experiment 20000088 PARAMETER Experiment Name: At_100uM_ABA_Mutants_cDNA_P Parameter: Timepoint (hr) Value: 6
  misc_feature: MA Experiment 20000088 PARAMETER Experiment Name: At_100uM_ABA_Mutants_cDNA_P Parameter: Tissue Value: Aerial
  misc_feature: MA Experiment 20000088 PARAMETER Experiment Name: At_100uM_ABA_Mutants_cDNA_P Parameter: Treatment Value: 100uM ABA vs. No Treatment
  misc_feature: MA Experiment ID: 20000090 Result: Down-regulated in Transcription
  misc_feature: MA Experiment ID: 20000113 Result: Up-regulated in Transcription
  misc_feature: MA Experiment 20000113 PARAMETER Experiment Name: At_42deg_Heat_cDNA_P Parameter: Temperature (deg C) Value: 42 vs. 22
  misc_feature: MA Experiment 20000113 PARAMETER Experiment Name: At_42deg_Heat_cDNA_P Parameter: Timepoint (hr) Value: 8
  misc_feature: MA Experiment 20000113 PARAMETER Experiment Name: At_42deg_Heat_cDNA_P Parameter: Tissue Value: Aerial
  misc_feature: MA Experiment ID: 20000117 Result: Down-regulated in Transcription
  misc_feature: MA Experiment 20000117 PARAMETER Experiment Name: At_100uM_ABA_Mutants_cDNA_P Parameter: Plant Line Value: Columbia
  misc_feature: MA Experiment 20000117 PARAMETER Experiment Name: At_100uM_ABA_Mutants_cDNA_P Parameter: Timepoint (hr) Value: 6
  misc_feature: MA Experiment 20000117 PARAMETER Experiment Name: At_100uM_ABA_Mutants_cDNA_P Parameter: Tissue Value: Aerial
  misc_feature: MA Experiment 20000117 PARAMETER Experiment Name: At_100uM_ABA_Mutants_cDNA_P Parameter: Treatment Value: 100uM ABA vs. No Treatment
  misc_feature: MA Experiment ID: 20000180 Result: Up-regulated in Transcription
  misc_feature: MA Experiment 20000180 PARAMETER Experiment Name: At_Germinating_Seeds_P Parameter: Age (hr) Value: 24 vs. 0
  misc_feature: MA Experiment 20000180 PARAMETER Experiment Name: At_Germinating_Seeds_P Parameter: Tissue Value: Germinating Seeds
  misc_feature: MA Experiment ID: 20000184 Result: Up-regulated in Transcription
  misc_feature: MA Experiment 20000184 PARAMETER Experiment Name: At_Shoots__P Parameter: Age (day) Value: 7
  misc_feature: MA Experiment 20000184 PARAMETER Experiment Name: At_Shoots__P Parameter: Tissue Value: Shoots vs. Whole Plant
  misc_feature: MA Experiment ID: 20000185 Result: Down-regulated in Transcription
  misc_feature: MA Experiment 20000185 PARAMETER Experiment Name: At_Roots__P Parameter: Age (day) Value: 7 vs. 21
  misc_feature: MA Experiment 20000185 PARAMETER Experiment Name: At_Roots__P Parameter: Organism Value: A. thaliana
  misc_feature: MA Experiment 20000185 PARAMETER Experiment Name: At_Roots__P Parameter: Tissue Value: Roots vs. Whole Plant
  misc_feature: MA Experiment ID: 20000234 Result: Up-regulated in Transcription
  misc_feature: MA Experiment 20000234 PARAMETER Experiment Name: At_Siliques_P Parameter: Age (day) Value: 21
  misc_feature: MA Experiment 20000234 PARAMETER Experiment Name: At_Siliques_P Parameter: Organism Value: A. thaliana
  misc_feature: MA Experiment 20000234 PARAMETER Experiment Name: At_Siliques_P Parameter: Plant Line Value: WS
  misc_feature: MA Experiment 20000234 PARAMETER Experiment Name: At_Siliques_P Parameter: Tissue Value: Less Than 5mm Siliques vs. Whole Plant
  misc_feature: MA Experiment ID: 20000235 Result: Up-regulated in Transcription
  misc_feature: MA Experiment 20000235 PARAMETER Experiment Name: At_Siliques_P Parameter: Age (day) Value: 21
  misc_feature: MA Experiment 20000235 PARAMETER Experiment Name: At_Siliques_P Parameter: Organism Value: A. thaliana
  misc_feature: MA Experiment 20000235 PARAMETER Experiment Name: At_Siliques_P Parameter: Plant Line Value: WS
  misc_feature: MA Experiment 20000235 PARAMETER Experiment Name: At_Siliques_P Parameter: Tissue Value: 5-10mm Siliques vs. Whole Plant
  misc_feature: MA Experiment ID: 20000437 Result: Down-regulated in Transcription
  misc_feature: MA Experiment 20000437 PARAMETER Experiment Name: At_Drought_P Parameter: Age (day) Value: 8
  misc_feature: MA Experiment 20000437 PARAMETER Experiment Name: At_Drought_P Parameter: Organism Value: A. thaliana
  misc_feature: MA Experiment 20000437 PARAMETER Experiment Name: At_Drought_P Parameter: Plant Line Value: WS
  misc_feature: MA Experiment 20000437 PARAMETER Experiment Name: At_Drought_P Parameter: Timepoint (hr) Value: 24
  misc_feature: MA Experiment 20000437 PARAMETER Experiment Name: At_Drought_P Parameter: Tissue Value: Whole Plant
  misc_feature: MA Experiment 20000437 PARAMETER Experiment Name: At_Drought_P Parameter: Treatment Value: Drought vs. No Drought
  misc_feature: MA Experiment ID: 20000438 Result: Up-regulated in Transcription
  misc_feature: MA Experiment 20000438 PARAMETER Experiment Name: At_Shoots__P Parameter: Age (day) Value: 14
  misc_feature: MA Experiment 20000438 PARAMETER Experiment Name: At_Shoots__P Parameter: Tissue Value: Shoots vs. Whole Plant
  misc_feature: MA Experiment ID: 20000439 Result: Down-regulated in Transcription
  misc_feature: MA Experiment 20000439 PARAMETER Experiment Name: At_Roots__P Parameter: Age (day) Value: 14 vs. 21
  misc_feature: MA Experiment 20000439 PARAMETER Experiment Name: At_Roots__P Parameter: Organism Value: A. thaliana
  misc_feature: MA Experiment 20000439 PARAMETER Experiment Name: At_Roots__P Parameter: Tissue Value: Roots vs. Whole Plant
  misc_feature: MA Experiment ID: 20000460 Result: Down-regulated in Transcription
  misc_feature: MA Experiment 20000460 PARAMETER Experiment Name: At_10percent_PEG_P Parameter: Age (day) Value: 12
  misc_feature: MA Experiment 20000460 PARAMETER Experiment Name: At_10percent_PEG_P Parameter: Organism Value: A. thaliana
  misc_feature: MA Experiment 20000460 PARAMETER Experiment Name: At_10percent_PEG_P Parameter: Plant Line Value: WS
  misc_feature: MA Experiment 20000460 PARAMETER Experiment Name: At_10percent_PEG_P Parameter: Timepoint (day) Value: 12
  misc_feature: MA Experiment 20000460 PARAMETER Experiment Name: At_10percent_PEG_P Parameter: Tissue Value: Whole Plant
  misc_feature: MA Experiment 20000460 PARAMETER Experiment Name: At_10percent_PEG_P Parameter: Treatment Value: 10percent PEG vs. No Treatment
  misc_feature: MA Experiment ID: 20000794 Result: Down-regulated in Transcription
  misc_feature: MA Experiment 20000794 PARAMETER Experiment Name: At_Petals_P Parameter: Age (day) Value: 23-25 days
  misc_feature: MA Experiment 20000794 PARAMETER Experiment Name: At_Petals_P Parameter: Plant Line Value: WS
  misc_feature: MA Experiment 20000794 PARAMETER Experiment Name: At_Petals_P Parameter: Tissue Value: Petals vs. Whole plant
  misc_feature: MA Experiment ID: 20001247 Result: Up-regulated in Transcription
  misc_feature: MA Experiment 20001247 PARAMETER Experiment Name: At_Far-red-induction_P Parameter: Age (day) Value: 7
  misc_feature: MA Experiment 20001247 PARAMETER Experiment Name: At_Far-red-induction_P Parameter: Light Value: Far-red vs. White
  misc_feature: MA Experiment 20001247 PARAMETER Experiment Name: At_Far-red-induction_P Parameter: Organism Value: A. thaliana
  misc_feature: MA Experiment 20001247 PARAMETER Experiment Name: At_Far-red-induction_P Parameter: Plant Line Value: Columbia
  misc_feature: MA Experiment 20001247 PARAMETER Experiment Name: At_Far-red-induction_P Parameter: Timepoint (hr) Value: 1
  misc_feature: MA Experiment 20001247 PARAMETER Experiment Name: At_Far-red-induction_P Parameter: Tissue Value: Whole Plant
  misc_feature: MA Experiment ID: 20001248 Result: Down-regulated in Transcription
  misc_feature: MA Experiment 20001248 PARAMETER Experiment Name: At_Far-red-induction_P Parameter: Age (day) Value: 7
  misc_feature: MA Experiment 20001248 PARAMETER Experiment Name: At_Far-red-induction_P Parameter: Light Value: Far-red vs. White
  misc_feature: MA Experiment 20001248 PARAMETER Experiment Name: At_Far-red-induction_P Parameter: Organism Value: A. thaliana
  misc_feature: MA Experiment 20001248 PARAMETER Experiment Name: At_Far-red-induction_P Parameter: Plant Line Value: Columbia
  misc_feature: MA Experiment 20001248 PARAMETER Experiment Name: At_Far-red-induction_P Parameter: Timepoint (hr) Value: 4
  misc_feature: MA Experiment 20001248 PARAMETER Experiment Name: At_Far-red-induction_P Parameter: Tissue Value: Whole Plant
  misc_feature: MA Experiment ID: 20001559 Result: Down-regulated in Transcription
  misc_feature: MA Experiment 20001559 PARAMETER Experiment Name: At_Drought_Soil_Dry_P Parameter: Age (day) Value: 28
  misc_feature: MA Experiment 20001559 PARAMETER Experiment Name: At_Drought_Soil_Dry_P Parameter: Organism Value: A. thaliana
  misc_feature: MA Experiment 20001559 PARAMETER Experiment Name: At_Drought_Soil_Dry_P Parameter: Plant Line Value: WS
  misc_feature: MA Experiment 20001559 PARAMETER Experiment Name: At_Drought_Soil_Dry_P Parameter: Post Timepoint (hr) Value: 29
  misc_feature: MA Experiment 20001559 PARAMETER Experiment Name: At_Drought_Soil_Dry_P Parameter: Post-Treatment Value: Re-Water vs. No Drought
  misc_feature: MA Experiment 20001559 PARAMETER Experiment Name: At_Drought_Soil_Dry_P Parameter: Timepoint (day) Value: 14
  misc_feature: MA Experiment 20001559 PARAMETER Experiment Name: At_Drought_Soil_Dry_P Parameter: Treatment Value: Drought vs. No Drought
  misc_feature: MA Experiment ID: 20001757 Result: Up-regulated in Transcription
  misc_feature: MA Experiment 20001757 PARAMETER Experiment Name: At_50mM_NH4NO3_L-to-H_P Parameter: Timepoint (hr) Value: 6
  misc_feature: MA Experiment 20001757 PARAMETER Experiment Name: At_50mM_NH4NO3_L-to-H_P Parameter: Tissue Value: Leaf
  misc_feature: MA Experiment 20001757 PARAMETER Experiment Name: At_50mM_NH4NO3_L-to-H_P Parameter: Treatment Value: 50mM NH4NO3 vs 100mM Mannitol

SEQ ID NO: 43784 - protein, 165 aa, Arabidopsis thaliana; identical to SEQ ID NO: 35507
  peptide (1)..(165): Ceres Seq. ID no. 12377322
  misc_feature (77)..(152): Pfam Name: 2Fe-2S iron-sulfur cluster binding domain Pfam Description: 2Fe-2S iron-sulfur cluster binding domain
  misc_feature (77)..(152): Pfam Name: 2Fe-2S iron-sulfur cluster binding domain Pfam Description: 2Fe-2S iron-sulfur cluster binding domain
  misc_feature (18)..(164): Homolog of NCBI NO: 119931 NR Description: Ferredoxin I, chloroplast precursor
  misc_feature (70)..(165): Homolog of NCBI NO: 947124 NR Description: ferredoxin component a1
  misc_feature (70)..(165): Homolog of NCBI NO: 81707 NR Description: ferredoxin [2Fe-2S] A, leaf - radish
  misc_feature (18)..(165): Homolog of NCBI NO: 34921349 NR Description: Ferredoxin, chloroplast precursor (PFLP)
  misc_feature (18)..(164): Homolog of NCBI NO: 3023752 NR Description: Ferredoxin I, chloroplast precursor
  misc_feature (18)..(164): Homolog of NCBI NO: 119931 NR Description: Ferredoxin I, chloroplast precursor
  misc_feature (70)..(165): Homolog of NCBI NO: 81707 NR Description: ferredoxin [2Fe-2S] A, leaf - radish
  misc_feature (18)..(164): Homolog of NCBI NO: 3023752 NR Description: Ferredoxin I, chloroplast precursor
  misc_feature (18)..(165): Homolog of NCBI NO: 15219837 NR Description: ferrodoxin precursor
  misc_feature (18)..(165): Homolog of NCBI NO: 15220256 NR Description: ferredoxin precusor isolog
  misc_feature (18)..(135): Homolog of NCBI NO: 16604416 NR Description: At1g10960/T19D16_12 [Arabidopsis thaliana]
  misc_feature (18)..(164): Homolog of NCBI NO: 3023743 NR Description: Ferredoxin I, chloroplast precursor
  misc_feature (18)..(164): Homolog of NCBI NO: 119937 NR Description: Ferredoxin I, chloroplast precursor (Fd I)
  misc_feature (18)..(165): Homolog of NCBI NO: 34921349 NR Description: Ferredoxin, chloroplast precursor (PFLP)
  misc_feature (70)..(165): Homolog of NCBI NO: 947124 NR Description: ferredoxin component a1
  misc_feature (18)..(164): Homolog of NCBI NO: 119937 NR Description: Ferredoxin I, chloroplast precursor (Fd I)
  misc_feature (18)..(164): Homolog of NCBI NO: 3023743 NR Description: Ferredoxin I, chloroplast precursor
  misc_feature (18)..(135): Homolog of NCBI NO: 16604416 NR Description: At1g10960/T19D16_12 [Arabidopsis thaliana]
  misc_feature (18)..(165): Homolog of NCBI NO: 15220256 NR Description: ferredoxin precusor isolog
  misc_feature (18)..(165): Homolog of NCBI NO: 15219837 NR Description: ferrodoxin precursor

SEQ ID NO: 43785 - protein, 148 aa, Arabidopsis thaliana; identical to SEQ ID NO: 35508
  peptide (1)..(148): Ceres Seq. ID no. 12377323
  misc_feature (60)..(135): Pfam Name: 2Fe-2S iron-sulfur cluster binding domain Pfam Description: 2Fe-2S iron-sulfur cluster binding domain
  misc_feature (60)..(135): Pfam Name: 2Fe-2S iron-sulfur cluster binding domain Pfam Description: 2Fe-2S iron-sulfur cluster binding domain
  misc_feature (1)..(147): Homolog of NCBI NO: 119931 NR Description: Ferredoxin I, chloroplast precursor
  misc_feature (53)..(148): Homolog of NCBI NO: 947124 NR Description: ferredoxin component a1
  misc_feature (53)..(148): Homolog of NCBI NO: 81707 NR Description: ferredoxin [2Fe-2S] A, leaf - radish
  misc_feature (1)..(148): Homolog of NCBI NO: 34921349 NR Description: Ferredoxin, chloroplast precursor (PFLP)
  misc_feature (1)..(147): Homolog of NCBI NO: 3023752 NR Description: Ferredoxin I, chloroplast precursor
  misc_feature (1)..(147): Homolog of NCBI NO: 119931 NR Description: Ferredoxin I, chloroplast precursor
  misc_feature (53)..(148): Homolog of NCBI NO: 81707 NR Description: ferredoxin [2Fe-2S] A, leaf - radish
  misc_feature (1)..(147): Homolog of NCBI NO: 3023752 NR Description: Ferredoxin I, chloroplast precursor
  misc_feature (1)..(148): Homolog of NCBI NO: 15219837 NR Description: ferrodoxin precursor
  misc_feature (1)..(148): Homolog of NCBI NO: 15220256 NR Description: ferredoxin precusor isolog
  misc_feature (1)..(118): Homolog of NCBI NO: 16604416 NR Description: At1g10960/T19D16_12 [Arabidopsis thaliana]
  misc_feature (1)..(147): Homolog of NCBI NO: 3023743 NR Description: Ferredoxin I, chloroplast precursor
  misc_feature (1)..(147): Homolog of NCBI NO: 119937 NR Description: Ferredoxin I, chloroplast precursor (Fd I)
  misc_feature (1)..(148): Homolog of NCBI NO: 34921349 NR Description: Ferredoxin, chloroplast precursor (PFLP)
  misc_feature (53)..(148): Homolog of NCBI NO: 947124 NR Description: ferredoxin component a1
  misc_feature (1)..(147): Homolog of NCBI NO: 119937 NR Description: Ferredoxin I, chloroplast precursor (Fd I)
  misc_feature (1)..(147): Homolog of NCBI NO: 3023743 NR Description: Ferredoxin I, chloroplast precursor
  misc_feature (1)..(118): Homolog of NCBI NO: 16604416 NR Description: At1g10960/T19D16_12 [Arabidopsis thaliana]
  misc_feature (1)..(148): Homolog of NCBI NO: 15220256 NR Description: ferredoxin precusor isolog
  misc_feature (1)..(148): Homolog of NCBI NO: 15219837 NR Description: ferrodoxin precursor

SEQ ID NO: 43786 - protein, 97 aa, Arabidopsis thaliana; identical to SEQ ID NO: 35509
  peptide (1)..(97): Ceres Seq. ID no. 12377324
  misc_feature (9)..(84): Pfam Name: 2Fe-2S iron-sulfur cluster binding domain Pfam Description: 2Fe-2S iron-sulfur cluster binding domain
  misc_feature (9)..(84): Pfam Name: 2Fe-2S iron-sulfur cluster binding domain Pfam Description: 2Fe-2S iron-sulfur cluster binding domain
  misc_feature (1)..(96): Homolog of NCBI NO: 119931 NR Description: Ferredoxin I, chloroplast precursor
  misc_feature (2)..(97): Homolog of NCBI NO: 947124 NR Description: ferredoxin component a1
  misc_feature (2)..(97): Homolog of NCBI NO: 81707 NR Description: ferredoxin [2Fe-2S] A, leaf - radish
  misc_feature (1)..(97): Homolog of NCBI NO: 34921349 NR Description: Ferredoxin, chloroplast precursor (PFLP)
  misc_feature (1)..(96): Homolog of NCBI NO: 3023752 NR Description: Ferredoxin I, chloroplast precursor
  misc_feature (1)..(96): Homolog of NCBI NO: 119931 NR Description: Ferredoxin I, chloroplast precursor
  misc_feature (2)..(97): Homolog of NCBI NO: 81707 NR Description: ferredoxin [2Fe-2S] A, leaf - radish
  misc_feature (1)..(96): Homolog of NCBI NO: 3023752 NR Description: Ferredoxin I, chloroplast precursor
  misc_feature (1)..(97): Homolog of NCBI NO: 15219837 NR Description: ferrodoxin precursor
  misc_feature (1)..(97): Homolog of NCBI NO: 15220256 NR Description: ferredoxin precusor isolog
  misc_feature (1)..(67): Homolog of NCBI NO: 16604416 NR Description: At1g10960/T19D16_12 [Arabidopsis thaliana]
  misc_feature (1)..(96): Homolog of NCBI NO: 3023743 NR Description: Ferredoxin I, chloroplast precursor
  misc_feature (1)..(96): Homolog of NCBI NO: 119937 NR Description: Ferredoxin I, chloroplast precursor (Fd I)
  misc_feature (1)..(97): Homolog of NCBI NO: 34921349 NR Description: Ferredoxin, chloroplast precursor (PFLP)
  misc_feature (2)..(97): Homolog of NCBI NO: 947124 NR Description: ferredoxin component a1
  misc_feature (1)..(96): Homolog of NCBI NO: 119937 NR Description: Ferredoxin I, chloroplast precursor (Fd I)
  misc_feature (1)..(96): Homolog of NCBI NO: 3023743 NR Description: Ferredoxin I, chloroplast precursor
  misc_feature (1)..(67): Homolog of NCBI NO: 16604416 NR Description: At1g10960/T19D16_12 [Arabidopsis thaliana]
  misc_feature (1)..(97): Homolog of NCBI NO: 15220256 NR Description: ferredoxin precusor isolog
  misc_feature (1)..(97): Homolog of NCBI NO: 15219837 NR Description: ferrodoxin precursor

SEQ ID NO: 43787 - DNA, 715 bp, Arabidopsis thaliana; identical to SEQ ID NO: 35383
  misc_feature (1)..(715): Ceres Seq. ID no. 12322680
  misc_feature: MA Experiment ID: 108434 Result: Up-regulated in Transcription
  misc_feature: MA Experiment 108434 PARAMETER Experiment Name: At_Root_Tips_cDNA_P Parameter: Tissue Value: Root Tips
  misc_feature: MA Experiment ID: 108462 Result: Down-regulated in Transcription
  misc_feature: MA Experiment 108462 PARAMETER Experiment Name: At_Germinating_Seeds_cDNA_P Parameter: Age (day) Value: 2 vs. 0
  misc_feature: MA Experiment 108462 PARAMETER Experiment Name: At_Germinating_Seeds_cDNA_P Parameter: Tissue Value: Germinating Seeds
  misc_feature: MA Experiment ID: 108463 Result: Down-regulated in Transcription
  misc_feature: MA Experiment 108463 PARAMETER Experiment Name: At_Germinating_Seeds_cDNA_P Parameter: Age (day) Value: 3 vs. 0
  misc_feature: MA Experiment 108463 PARAMETER Experiment Name: At_Germinating_Seeds_cDNA_P Parameter: Tissue Value: Germinating Seeds
  misc_feature: MA Experiment ID: 108488 Result: Up-regulated in Transcription
  misc_feature: MA Experiment ID: 108489 Result: Up-regulated in Transcription
  misc_feature: MA Experiment ID: 108573 Result: Down-regulated in Transcription
  misc_feature: MA Experiment 108573 PARAMETER Experiment Name: At_Drought_cDNA_P Parameter: Timepoint (hr) Value: 6
  misc_feature: MA Experiment 108573 PARAMETER Experiment Name: At_Drought_cDNA_P Parameter: Tissue Value: Aerial
  misc_feature: MA Experiment 108573 PARAMETER Experiment Name: At_Drought_cDNA_P Parameter: Treatment Value: Drought vs. No Drought
  misc_feature: MA Experiment ID: 108595 Result: Down-regulated in Transcription
  misc_feature: MA Experiment 108595 PARAMETER Experiment Name: At_Ler-pi_Ovule_cDNA_P Parameter: Plant Line Value: null
  misc_feature: MA Experiment ID: 20000227 Result: Up-regulated in Transcription
  misc_feature: MA Experiment 20000227 PARAMETER Experiment Name: At_Root-Tips-vs-Tops_P Parameter: Tissue Value: Root Tips vs. Root Tops
  misc_feature: MA Experiment ID: 20000437 Result: Down-regulated in Transcription
  misc_feature: MA Experiment 20000437 PARAMETER Experiment Name: At_Drought_P Parameter: Age (day) Value: 8
  misc_feature: MA Experiment 20000437 PARAMETER Experiment Name: At_Drought_P Parameter: Organism Value: A. thaliana
  misc_feature: MA Experiment 20000437 PARAMETER Experiment Name: At_Drought_P Parameter: Plant Line Value: WS
  misc_feature: MA Experiment 20000437 PARAMETER Experiment Name: At_Drought_P Parameter: Timepoint (hr) Value: 24
  misc_feature: MA Experiment 20000437 PARAMETER Experiment Name: At_Drought_P Parameter: Tissue Value: Whole Plant
  misc_feature: MA Experiment 20000437 PARAMETER Experiment Name: At_Drought_P Parameter: Treatment Value: Drought vs. No Drought
  misc_feature: MA Experiment ID: 20000573 Result: Down-regulated in Transcription
  misc_feature: MA Experiment 20000573 PARAMETER Experiment Name: At_100uM_ABA_Mutants__P Parameter: Organism Value: A. thaliana
  misc_feature: MA Experiment 20000573 PARAMETER Experiment Name: At_100uM_ABA_Mutants__P Parameter: Plant Line Value: CS22 vs. Ler wt
  misc_feature: MA Experiment 20000573 PARAMETER Experiment Name: At_100uM_ABA_Mutants__P Parameter: Timepoint (hr) Value: N/A
  misc_feature: MA Experiment 20000573 PARAMETER Experiment Name: At_100uM_ABA_Mutants__P Parameter: Tissue Value: Whole Plant
  misc_feature: MA Experiment 20000573 PARAMETER Experiment Name: At_100uM_ABA_Mutants__P Parameter: Treatment Value: None
  misc_feature: MA Experiment ID: 20000574 Result: Down-regulated in Transcription
  misc_feature: MA Experiment 20000574 PARAMETER Experiment Name: At_100uM_ABA_Mutants__P Parameter: Organism Value: A. thaliana
  misc_feature: MA Experiment 20000574 PARAMETER Experiment Name: At_100uM_ABA_Mutants__P Parameter: Plant Line Value: CS23 vs. Ler wt
  misc_feature: MA Experiment 20000574 PARAMETER Experiment Name: At_100uM_ABA_Mutants__P Parameter: Timepoint (hr) Value: N/A
  misc_feature: MA Experiment 20000574 PARAMETER Experiment Name: At_100uM_ABA_Mutants__P Parameter: Tissue Value: Whole Plant
  misc_feature: MA Experiment 20000574 PARAMETER Experiment Name: At_100uM_ABA_Mutants__P Parameter: Treatment Value: None
  misc_feature: MA Experiment ID: 20000794 Result: Down-regulated in Transcription
  misc_feature: MA Experiment 20000794 PARAMETER Experiment Name: At_Petals_P Parameter: Age (day) Value: 23-25 days
  misc_feature: MA Experiment 20000794 PARAMETER Experiment Name: At_Petals_P Parameter: Plant Line Value: WS
  misc_feature: MA Experiment 20000794 PARAMETER Experiment Name: At_Petals_P Parameter: Tissue Value: Petals vs. Whole plant
  misc_feature: MA Experiment ID: 20001557 Result: Up-regulated in Transcription
  misc_feature: MA Experiment 20001557 PARAMETER Experiment Name: At_Drought_Soil_Dry_P Parameter: Age (day) Value: 27
  misc_feature: MA Experiment 20001557 PARAMETER Experiment Name: At_Drought_Soil_Dry_P Parameter: Organism Value: A. thaliana
  misc_feature: MA Experiment 20001557 PARAMETER Experiment Name: At_Drought_Soil_Dry_P Parameter: Plant Line Value: WS
  misc_feature: MA Experiment 20001557 PARAMETER Experiment Name: At_Drought_Soil_Dry_P Parameter: Post Timepoint (hr) Value: 3
  misc_feature: MA Experiment 20001557 PARAMETER Experiment Name: At_Drought_Soil_Dry_P Parameter: Post-Treatment Value: Re-Water vs. No Drought
  misc_feature: MA Experiment 20001557 PARAMETER Experiment Name: At_Drought_Soil_Dry_P Parameter: Timepoint (day) Value: 13
  misc_feature: MA Experiment 20001557 PARAMETER Experiment Name: At_Drought_Soil_Dry_P Parameter: Treatment Value: Drought vs. No Drought
  misc_feature: MA Experiment ID: 20001558 Result: Up-regulated in Transcription
  misc_feature: MA Experiment 20001558 PARAMETER Experiment Name: At_Drought_Soil_Dry_P Parameter: Age (day) Value: 27
  misc_feature: MA Experiment 20001558 PARAMETER Experiment Name: At_Drought_Soil_Dry_P Parameter: Organism Value: A. thaliana
  misc_feature: MA Experiment 20001558 PARAMETER Experiment Name: At_Drought_Soil_Dry_P Parameter: Plant Line Value: WS
  misc_feature: MA Experiment 20001558 PARAMETER Experiment Name: At_Drought_Soil_Dry_P Parameter: Post Timepoint (hr) Value: 6
  misc_feature: MA Experiment 20001558 PARAMETER Experiment Name: At_Drought_Soil_Dry_P Parameter: Post-Treatment Value: Re-Water vs. No Drought
  misc_feature: MA Experiment 20001558 PARAMETER Experiment Name: At_Drought_Soil_Dry_P Parameter: Timepoint (day) Value: 13
  misc_feature: MA Experiment 20001558 PARAMETER Experiment Name: At_Drought_Soil_Dry_P Parameter: Treatment Value: Drought vs. No Drought
  misc_feature: MA Experiment ID: 20001560 Result: Up-regulated in Transcription
  misc_feature: MA Experiment 20001560 PARAMETER Experiment Name: At_Drought_Soil_Dry_P Parameter: Age (day) Value: 28
  misc_feature: MA Experiment 20001560 PARAMETER Experiment Name: At_Drought_Soil_Dry_P Parameter: Organism Value: A. thaliana
  misc_feature: MA Experiment 20001560 PARAMETER Experiment Name: At_Drought_Soil_Dry_P Parameter: Plant Line Value: WS
  misc_feature: MA Experiment 20001560 PARAMETER Experiment Name: At_Drought_Soil_Dry_P Parameter: Post Timepoint (hr) Value: None
  misc_feature: MA Experiment 20001560 PARAMETER Experiment Name: At_Drought_Soil_Dry_P Parameter: Post-Treatment Value: None
  misc_feature: MA Experiment 20001560 PARAMETER Experiment Name: At_Drought_Soil_Dry_P Parameter: Timepoint (day) Value: 14
  misc_feature: MA Experiment 20001560 PARAMETER Experiment Name: At_Drought_Soil_Dry_P Parameter: Treatment Value: Drought vs. No Drought
  misc_feature: MA Experiment ID: 20001757 Result: Up-regulated in Transcription
  misc_feature: MA Experiment 20001757 PARAMETER Experiment Name: At_50mM_NH4NO3_L-to-H_P Parameter: Timepoint (hr) Value: 6
  misc_feature: MA Experiment 20001757 PARAMETER Experiment Name: At_50mM_NH4NO3_L-to-H_P Parameter: Tissue Value: Leaf
  misc_feature: MA Experiment 20001757 PARAMETER Experiment Name: At_50mM_NH4NO3_L-to-H_P Parameter: Treatment Value: 50mM NH4NO3 vs 100mM Mannitol

SEQ ID NO: 43788 - protein, 146 aa, Arabidopsis thaliana; identical to SEQ ID NO: 35384
  peptide (1)..(146): Ceres Seq. ID no. 12322681
  misc_feature (1)..(141): Homolog of NCBI NO: 27729769 NR Description: similar to ribosomal protein L26 - mouse [Rattus
  misc_feature (1)..(139): Homolog of NCBI NO: 31207009 NR Description: ENSANGP00000022122 [Anopheles gambiae]
  misc_feature (1)..(139): Homolog of NCBI NO: 7705813 NR Description: ribosomal protein L26-like 1
  misc_feature (1)..(141): Homolog of NCBI NO: 4506621 NR Description: ribosomal protein L26; 60S ribosomal protein L26
  misc_feature (1)..(141): Homolog of NCBI NO: 132827 NR Description: 60S RIBOSOMAL PROTEIN L26
  misc_feature (1)..(119): Homolog of NCBI NO: 3747050 NR Description: ribosomal protein L26 [Zea mays]
  misc_feature (1)..(141): Homolog of NCBI NO: 34895672 NR Description: putative ribosomal protein L26
  misc_feature (1)..(146): Homolog of NCBI NO: 15240766 NR Description: 60S ribosomal protein L26
  misc_feature (1)..(145): Homolog of NCBI NO: 3914740 NR Description: 60S ribosomal protein L26
  misc_feature (1)..(146): Homolog of NCBI NO: 15229631 NR Description: 60S RIBOSOMAL PROTEIN - like
  misc_feature (1)..(141): Homolog of NCBI NO: 27729769 NR Description: similar to ribosomal protein L26 - mouse [Rattus
  misc_feature (1)..(139): Homolog of NCBI NO: 31207009 NR Description: ENSANGP00000022122 [Anopheles gambiae]
  misc_feature (1)..(139): Homolog of NCBI NO: 7705813 NR Description: ribosomal protein L26-like 1
  misc_feature (1)..(141): Homolog of NCBI NO: 4506621 NR Description: ribosomal protein L26; 60S ribosomal protein L26
  misc_feature (1)..(141): Homolog of NCBI NO: 132827 NR Description: 60S RIBOSOMAL PROTEIN L26
  misc_feature (1)..(119): Homolog of NCBI NO: 3747050 NR Description: ribosomal protein L26 [Zea mays]
  misc_feature (1)..(141): Homolog of NCBI NO: 34895672 NR Description: putative ribosomal protein L26
  misc_feature (1)..(146): Homolog of NCBI NO: 15240766 NR Description: 60S ribosomal protein L26
  misc_feature (1)..(145): Homolog of NCBI NO: 3914740 NR Description: 60S ribosomal protein L26
  misc_feature (1)..(146): Homolog of NCBI NO: 15229631 NR Description: 60S RIBOSOMAL PROTEIN - like

SEQ ID NO: 43789 - protein, 117 aa, Arabidopsis thaliana; identical to SEQ ID NO: 35385
  peptide (1)..(117): Ceres Seq. ID no. 12322682
  misc_feature (1)..(112): Homolog of NCBI NO: 27729769 NR Description: similar to ribosomal protein L26 - mouse [Rattus
  misc_feature (1)..(110): Homolog of NCBI NO: 31207009 NR Description: ENSANGP00000022122 [Anopheles gambiae]
  misc_feature (1)..(110): Homolog of NCBI NO: 7705813 NR Description: ribosomal protein L26-like 1
  misc_feature (1)..(112): Homolog of NCBI NO: 4506621 NR Description: ribosomal protein L26; 60S ribosomal protein L26
  misc_feature (1)..(112): Homolog of NCBI NO: 132827 NR Description: 60S RIBOSOMAL PROTEIN L26
  misc_feature (1)..(90): Homolog of NCBI NO: 3747050 NR Description: ribosomal protein L26 [Zea mays]
  misc_feature (1)..(112): Homolog of NCBI NO: 34895672 NR Description: putative ribosomal protein L26
  misc_feature (1)..(117): Homolog of NCBI NO: 15240766 NR Description: 60S ribosomal protein L26
  misc_feature (1)..(116): Homolog of NCBI NO: 3914740 NR Description: 60S ribosomal protein L26
  misc_feature (1)..(117): Homolog of NCBI NO: 15229631 NR Description: 60S RIBOSOMAL PROTEIN - like
  misc_feature (1)..(112): Homolog of NCBI NO: 27729769 NR Description: similar to ribosomal protein L26 - mouse [Rattus
  misc_feature (1)..(110): Homolog of NCBI NO: 31207009 NR Description: ENSANGP00000022122 [Anopheles gambiae]
  misc_feature (1)..(110): Homolog of NCBI NO: 7705813 NR Description: ribosomal protein L26-like 1
  misc_feature (1)..(112): Homolog of NCBI NO: 4506621 NR Description: ribosomal protein L26; 60S ribosomal protein L26
  misc_feature (1)..(112): Homolog of NCBI NO: 132827 NR Description: 60S RIBOSOMAL PROTEIN L26
  misc_feature (1)..(90): Homolog of NCBI NO: 3747050 NR Description: ribosomal protein L26 [Zea mays]
  misc_feature (1)..(112): Homolog of NCBI NO: 34895672 NR Description: putative ribosomal protein L26
  misc_feature (1)..(117): Homolog of NCBI NO: 15240766 NR Description: 60S ribosomal protein L26
  misc_feature (1)..(116): Homolog of NCBI NO: 3914740 NR Description: 60S ribosomal protein L26
  misc_feature (1)..(117): Homolog of NCBI NO: 15229631 NR Description: 60S RIBOSOMAL PROTEIN - like

SEQ ID NO: 43790 - protein, 100 aa, Arabidopsis thaliana; identical to SEQ ID NO: 35386
  peptide (1)..(100): Ceres Seq. ID no. 12322683
  misc_feature (1)..(95): Homolog of NCBI NO: 27729769 NR Description: similar to ribosomal protein L26 - mouse [Rattus
  misc_feature (1)..(93): Homolog of NCBI NO: 31207009 NR Description: ENSANGP00000022122 [Anopheles gambiae]
  misc_feature (1)..(93): Homolog of NCBI NO: 7705813 NR Description: ribosomal protein L26-like 1
  misc_feature (1)..(95): Homolog of NCBI NO: 4506621 NR Description: ribosomal protein L26; 60S ribosomal protein L26
  misc_feature (1)..(95): Homolog of NCBI NO: 132827 NR Description: 60S RIBOSOMAL PROTEIN L26
  misc_feature (1)..(73): Homolog of NCBI NO: 3747050 NR Description: ribosomal protein L26 [Zea mays]
  misc_feature (1)..(95): Homolog of NCBI NO: 34895672 NR Description: putative ribosomal protein L26
  misc_feature (1)..(100): Homolog of NCBI NO: 15240766 NR Description: 60S ribosomal protein L26
  misc_feature (1)..(99): Homolog of NCBI NO: 3914740 NR Description: 60S ribosomal protein L26
  misc_feature (1)..(100): Homolog of NCBI NO: 15229631 NR Description: 60S RIBOSOMAL PROTEIN - like
  misc_feature (1)..(95): Homolog of NCBI NO: 27729769 NR Description: similar to ribosomal protein L26 - mouse [Rattus
  misc_feature (1)..(93): Homolog of NCBI NO: 31207009 NR Description: ENSANGP00000022122 [Anopheles gambiae]
  misc_feature (1)..(93): Homolog of NCBI NO: 7705813 NR Description: ribosomal protein L26-like 1
  misc_feature (1)..(95): Homolog of NCBI NO: 4506621 NR Description: ribosomal protein L26; 60S ribosomal protein L26
  misc_feature (1)..(95): Homolog of NCBI NO: 132827 NR Description: 60S RIBOSOMAL PROTEIN L26
  misc_feature (1)..(73): Homolog of NCBI NO: 3747050 NR Description: ribosomal protein L26 [Zea mays]
  misc_feature (1)..(95): Homolog of NCBI NO: 34895672 NR Description: putative ribosomal protein L26
  misc_feature (1)..(100): Homolog of NCBI NO: 15240766 NR Description: 60S ribosomal protein L26
  misc_feature (1)..(99): Homolog of NCBI NO: 3914740 NR Description: 60S ribosomal protein L26
  misc_feature (1)..(100): Homolog of NCBI NO: 15229631 NR Description: 60S RIBOSOMAL PROTEIN - like

SEQ ID NO: 43791 - DNA, 690 bp, Arabidopsis thaliana
  misc_feature (1)..(690): Ceres Seq. ID no. 13575241
  misc_feature: MA Experiment ID: 20000184 Result: Up-regulated in Transcription
  misc_feature: MA Experiment 20000184 PARAMETER Experiment Name: At_Shoots__P Parameter: Age (day) Value: 7
  misc_feature: MA Experiment 20000184 PARAMETER Experiment Name: At_Shoots__P Parameter: Tissue Value: Shoots vs. Whole Plant
  misc_feature: MA Experiment ID: 20000185 Result: Up-regulated in Transcription
  misc_feature: MA Experiment 20000185 PARAMETER Experiment Name: At_Roots__P Parameter: Age (day) Value: 7 vs. 21
  misc_feature: MA Experiment 20000185 PARAMETER Experiment Name: At_Roots__P Parameter: Organism Value: A. thaliana
  misc_feature: MA Experiment 20000185 PARAMETER Experiment Name: At_Roots__P Parameter: Tissue Value: Roots vs. Whole Plant
  misc_feature: MA Experiment ID: 20000437 Result: Down-regulated in Transcription
  misc_feature: MA Experiment 20000437 PARAMETER Experiment Name: At_Drought_P Parameter: Age (day) Value: 8
  misc_feature: MA Experiment 20000437 PARAMETER Experiment Name: At_Drought_P Parameter: Organism Value: A. thaliana
  misc_feature: MA Experiment 20000437 PARAMETER Experiment Name: At_Drought_P Parameter: Plant Line Value: WS
  misc_feature: MA Experiment 20000437 PARAMETER Experiment Name: At_Drought_P Parameter: Timepoint (hr) Value: 24
  misc_feature: MA Experiment 20000437 PARAMETER Experiment Name: At_Drought_P Parameter: Tissue Value: Whole Plant
  misc_feature: MA Experiment 20000437 PARAMETER Experiment Name: At_Drought_P Parameter: Treatment Value: Drought vs. No Drought
  misc_feature: MA Experiment ID: 20000438 Result: Up-regulated in Transcription
  misc_feature: MA Experiment 20000438 PARAMETER Experiment Name: At_Shoots__P Parameter: Age (day) Value: 14
  misc_feature: MA Experiment 20000438 PARAMETER Experiment Name: At_Shoots__P Parameter: Tissue Value: Shoots vs. Whole Plant
  misc_feature: MA Experiment ID: 20000495 Result: Down-regulated in Transcription
  misc_feature: MA Experiment 20000495 PARAMETER Experiment Name: At_Guard_Cells_P Parameter: Harvest Date Value: 8/2/2002
  misc_feature: MA Experiment 20000495 PARAMETER Experiment Name: At_Guard_Cells_P Parameter: Organism Value: A. thaliana
  misc_feature: MA Experiment 20000495 PARAMETER Experiment Name: At_Guard_Cells_P Parameter: Tissue Value: Guard Cells vs. Leaves
  misc_feature: MA Experiment ID: 20001247 Result: Down-regulated in Transcription
  misc_feature: MA Experiment 20001247 PARAMETER Experiment Name: At_Far-red-induction_P Parameter: Age (day) Value: 7
  misc_feature: MA Experiment 20001247 PARAMETER Experiment Name: At_Far-red-induction_P Parameter: Light Value: Far-red vs. White
  misc_feature: MA Experiment 20001247 PARAMETER Experiment Name: At_Far-red-induction_P Parameter: Organism Value: A. thaliana
  misc_feature: MA Experiment 20001247 PARAMETER Experiment Name: At_Far-red-induction_P Parameter: Plant Line Value: Columbia
  misc_feature: MA Experiment 20001247 PARAMETER Experiment Name: At_Far-red-induction_P Parameter: Timepoint (hr) Value: 1
  misc_feature: MA Experiment 20001247 PARAMETER Experiment Name: At_Far-red-induction_P Parameter: Tissue Value: Whole Plant
  misc_feature: MA Experiment ID: 20001248 Result: Down-regulated in Transcription
  misc_feature: MA Experiment 20001248 PARAMETER Experiment Name: At_Far-red-induction_P Parameter: Age (day) Value: 7
  misc_feature: MA Experiment 20001248 PARAMETER Experiment Name: At_Far-red-induction_P Parameter: Light Value: Far-red vs. White
  misc_feature: MA Experiment 20001248 PARAMETER Experiment Name: At_Far-red-induction_P Parameter: Organism Value: A. thaliana
  misc_feature: MA Experiment 20001248 PARAMETER Experiment Name: At_Far-red-induction_P Parameter: Plant Line Value: Columbia
  misc_feature: MA Experiment 20001248 PARAMETER Experiment Name: At_Far-red-induction_P Parameter: Timepoint (hr) Value: 4
  misc_feature: MA Experiment 20001248 PARAMETER Experiment Name: At_Far-red-induction_P Parameter: Tissue Value: Whole Plant
  misc_feature: MA Experiment ID: 20001450 Result: Down-regulated in Transcription
  misc_feature: MA Experiment 20001450 PARAMETER Experiment Name: At_Far-red-induction_P Parameter: Age (day) Value: 7
  misc_feature: MA Experiment 20001450 PARAMETER Experiment Name: At_Far-red-induction_P Parameter: Light Value: Far-red vs. White
  misc_feature: MA Experiment 20001450 PARAMETER Experiment Name: At_Far-red-induction_P Parameter: Organism Value: A. thaliana
  misc_feature: MA Experiment 20001450 PARAMETER Experiment Name: At_Far-red-induction_P Parameter: Plant Line Value: Columbia
  misc_feature: MA Experiment 20001450 PARAMETER Experiment Name: At_Far-red-induction_P Parameter: Timepoint (hr) Value: 8
  misc_feature: MA Experiment 20001450 PARAMETER Experiment Name: At_Far-red-induction_P Parameter: Tissue Value: Whole Plant
  misc_feature: MA Experiment ID: 20001451 Result: Down-regulated in Transcription
  misc_feature: MA Experiment 20001451 PARAMETER Experiment Name: At_Far-red-induction_P Parameter: Age (day) Value: 7
  misc_feature: MA Experiment 20001451 PARAMETER Experiment Name: At_Far-red-induction_P Parameter: Light Value: Far-red vs. White
  misc_feature: MA Experiment 20001451 PARAMETER Experiment Name: At_Far-red-induction_P Parameter: Organism Value: A. thaliana
  misc_feature: MA Experiment 20001451 PARAMETER Experiment Name: At_Far-red-induction_P Parameter: Plant Line Value: Columbia
  misc_feature: MA Experiment 20001451 PARAMETER Experiment Name: At_Far-red-induction_P Parameter: Timepoint (hr) Value: 24
  misc_feature: MA Experiment 20001451 PARAMETER Experiment Name: At_Far-red-induction_P Parameter: Tissue Value: Whole Plant
atgtcggaagaaatacgagagaaagatctcaccgactctaaaccatctccaccgcaaccaccaccgaaacgtggtctcatcagccgcaaaagacagcttgtgtttctctctttcatgattttattagccgcaaaaggactcgttgggatcggagaaatagcgtttgtaatcttgtgttatatctacttgtatgagtttctctcaagatttgccttccctcgcaagcaaacagaacagaagaagagactctcaaaccctaaaaacaaactctttcaagcttacttcctcgccactgcaattataggcctactcttccctctttgttacatcggagatggaatataccgtggagacattcacggtgctggagccgccgcaccacatctatttctcctctcaggtcaagctttcacagaacctattggtttctctgacaagtattcgatgccaataggtattcttggaccggttttctacaacgctcgtaggattttcgctcttttggattgggttaaagcagaattctccgacactcaacgtcctggtggtccgttgagattgtacggaggaagagtgattgcatcggttaacacggtgatgtggttttataatctgtttggtctcttgttgcctgtgtttcttcctaggtcttgtgagatttacttctccggtgataacaaagatgattga

SEQ ID NO: 43792 - protein, 229 aa, Arabidopsis thaliana
  peptide (1)..(229): Ceres Seq. ID no. 13575242
  misc_feature (25)..(222): Homolog of NCBI NO: 15217782 NR Description: expressed protein [Arabidopsis thaliana]
  misc_feature (9)..(222): Homolog of NCBI NO: 38347228 NR Description: OSJNBa0044M19.10 [Oryza sativa (japonica
  misc_feature (15)..(229): Homolog of NCBI NO: 37536624 NR Description: unknown protein [Oryza sativa (japonica
  misc_feature (1)..(228): Homolog of NCBI NO: 18423389 NR Description: expressed protein [Arabidopsis thaliana]
  misc_feature (1)..(228): Homolog of NCBI NO: 15146256 NR Description: AT5g52420/K24M7_17 [Arabidopsis thaliana]
  misc_feature (1)..(229): Homolog of NCBI NO: 15237854 NR Description: expressed protein [Arabidopsis thaliana]
MSEEIREKDLTDSKPSPPQPPPKRGLISRKRQLVFLSFMILLAAKGLVGIGEIAFVILCYIYLYEFLSRFAFPRKQTEQKKRLSNPKNKLFQAYFLATAIIGLLFPLCYIGDGIYRGDIHGAGAAAPHLFLLSGQAFTEPIGFSDKYSMPIGILGPVFYNARRIFALLDWVKAEFSDTQRPGGPLRLYGGRVIASVNTVMWFYNLFGLLLPVFLPRSCEIYFSGDNKDD

SEQ ID NO: 43793 - protein, 191 aa, Arabidopsis thaliana
  peptide (1)..(191): Ceres Seq. ID no. 13575243
  misc_feature (1)..(184): Homolog of NCBI NO: 15217782 NR Description: expressed protein [Arabidopsis thaliana]
  misc_feature (1)..(184): Homolog of NCBI NO: 38347228 NR Description: OSJNBa0044M19.10 [Oryza sativa (japonica
  misc_feature (1)..(191): Homolog of NCBI NO: 37536624 NR Description: unknown protein [Oryza sativa (japonica
  misc_feature (1)..(190): Homolog of NCBI NO: 18423389 NR Description: expressed protein [Arabidopsis thaliana]
  misc_feature (1)..(190): Homolog of NCBI NO: 15146256 NR Description: AT5g52420/K24M7_17 [Arabidopsis thaliana]
  misc_feature (1)..(191): Homolog of NCBI NO: 15237854 NR Description: expressed protein [Arabidopsis thaliana]
MILLAAKGLVGIGEIAFVILCYIYLYEFLSRFAFPRKQTEQKKRLSNPKNKLFQAYFLATAIIGLLFPLCYIGDGIYRGDIHGAGAAAPHLFLLSGQAFTEPIGFSDKYSMPIGILGPVFYNARRIFALLDWVKAEFSDTQRPGGPLRLYGGRVIASVNTVMWFYNLFGLLLPVFLPRSCEIYFSGDNKDD

SEQ ID NO: 43794 - DNA, 1108 bp, Arabidopsis thaliana
  misc_feature (1)..(1108): Ceres Seq. ID no. 12558765
  misc_feature: MA Experiment ID: 20000184 Result: Up-regulated in Transcription
  misc_feature: MA Experiment 20000184 PARAMETER Experiment Name: At_Shoots__P Parameter: Age (day) Value: 7
  misc_feature: MA Experiment 20000184 PARAMETER Experiment Name: At_Shoots__P Parameter: Tissue Value: Shoots vs. Whole Plant
  misc_feature: MA Experiment ID: 20000185 Result: Up-regulated in Transcription
  misc_feature: MA Experiment 20000185 PARAMETER Experiment Name: At_Roots__P Parameter: Age (day) Value: 7 vs. 21
  misc_feature: MA Experiment 20000185 PARAMETER Experiment Name: At_Roots__P Parameter: Organism Value: A. thaliana
  misc_feature: MA Experiment 20000185 PARAMETER Experiment Name: At_Roots__P Parameter: Tissue Value: Roots vs. Whole Plant
  misc_feature: MA Experiment ID: 20000227 Result: Down-regulated in Transcription
  misc_feature: MA Experiment 20000227 PARAMETER Experiment Name: At_Root-Tips-vs-Tops_P Parameter: Tissue Value: Root Tips vs. Root Tops
  misc_feature: MA Experiment ID: 20000264 Result: Up-regulated in Transcription
  misc_feature: MA Experiment 20000264 PARAMETER Experiment Name: At_Open_Flower_P Parameter: Age (day) Value: 21
  misc_feature: MA Experiment 20000264 PARAMETER Experiment Name: At_Open_Flower_P Parameter: Plant Line Value: WS
  misc_feature: MA Experiment 20000264 PARAMETER Experiment Name: At_Open_Flower_P Parameter: Tissue Value: Open Flower vs. Whole Plant
  misc_feature: MA Experiment ID: 20000438 Result: Up-regulated in Transcription
  misc_feature: MA Experiment 20000438 PARAMETER Experiment Name: At_Shoots__P Parameter: Age (day) Value: 14
  misc_feature: MA Experiment 20000438 PARAMETER Experiment Name: At_Shoots__P Parameter: Tissue Value: Shoots vs. Whole Plant
  misc_feature: MA Experiment ID: 20000439 Result: Up-regulated in Transcription
  misc_feature: MA Experiment 20000439 PARAMETER Experiment Name: At_Roots__P Parameter: Age (day) Value: 14 vs. 21
  misc_feature: MA Experiment 20000439 PARAMETER Experiment Name: At_Roots__P Parameter: Organism Value: A. thaliana
  misc_feature: MA Experiment 20000439 PARAMETER Experiment Name: At_Roots__P Parameter: Tissue Value: Roots vs. Whole Plant
  misc_feature: MA Experiment ID: 20000573 Result: Down-regulated in Transcription
  misc_feature: MA Experiment 20000573 PARAMETER Experiment Name: At_100uM_ABA_Mutants__P Parameter: Organism Value: A. thaliana
  misc_feature: MA Experiment 20000573 PARAMETER Experiment Name: At_100uM_ABA_Mutants__P Parameter: Plant Line Value: CS22 vs. Ler wt
  misc_feature: MA Experiment 20000573 PARAMETER Experiment Name: At_100uM_ABA_Mutants__P Parameter: Timepoint (hr) Value: N/A
  misc_feature: MA Experiment 20000573 PARAMETER Experiment Name: At_100uM_ABA_Mutants__P Parameter: Tissue Value: Whole Plant
  misc_feature: MA Experiment 20000573 PARAMETER Experiment Name: At_100uM_ABA_Mutants__P Parameter: Treatment Value: None
  misc_feature: MA Experiment ID: 20000794 Result: Up-regulated in Transcription
  misc_feature: MA Experiment 20000794 PARAMETER Experiment Name: At_Petals_P Parameter: Age (day) Value: 23-25 days
  misc_feature: MA Experiment 20000794 PARAMETER Experiment Name: At_Petals_P Parameter: Plant Line Value: WS
  misc_feature: MA Experiment 20000794 PARAMETER Experiment Name: At_Petals_P Parameter: Tissue Value: Petals vs. Whole plant
  misc_feature: MA Experiment ID: 20001247 Result: Up-regulated in Transcription
  misc_feature: MA Experiment 20001247 PARAMETER Experiment Name: At_Far-red-induction_P Parameter: Age (day) Value: 7
  misc_feature: MA Experiment 20001247 PARAMETER Experiment Name: At_Far-red-induction_P Parameter: Light Value: Far-red vs. White
  misc_feature: MA Experiment 20001247 PARAMETER Experiment Name: At_Far-red-induction_P Parameter: Organism Value: A. thaliana
  misc_feature: MA Experiment 20001247 PARAMETER Experiment Name: At_Far-red-induction_P Parameter: Plant Line Value: Columbia
  misc_feature: MA Experiment 20001247 PARAMETER Experiment Name: At_Far-red-induction_P Parameter: Timepoint (hr) Value: 1
  misc_feature: MA Experiment 20001247 PARAMETER Experiment Name: At_Far-red-induction_P Parameter: Tissue Value: Whole Plant
  misc_feature: MA Experiment ID: 20001248 Result: Down-regulated in Transcription
  misc_feature: MA Experiment 20001248 PARAMETER Experiment Name: At_Far-red-induction_P Parameter: Age (day) Value: 7
  misc_feature: MA Experiment 20001248 PARAMETER Experiment Name: At_Far-red-induction_P Parameter: Light Value: Far-red vs. White
  misc_feature: MA Experiment 20001248 PARAMETER Experiment Name: At_Far-red-induction_P Parameter: Organism Value: A. thaliana
  misc_feature: MA Experiment 20001248 PARAMETER Experiment Name: At_Far-red-induction_P Parameter: Plant Line Value: Columbia
  misc_feature: MA Experiment 20001248 PARAMETER Experiment Name: At_Far-red-induction_P Parameter: Timepoint (hr) Value: 4
  misc_feature: MA Experiment 20001248 PARAMETER Experiment Name: At_Far-red-induction_P Parameter: Tissue Value: Whole Plant
aatttcttccctttcttcttcttcttctagttccttgataccaacgcgtaatcctaacccttaatctacttcctccttaattaatcagaggtttctacttattatttccacttctcatctctttcaatcgcaatctgagttctggctaaagattttgtcttgaaggtgagattcattgttccgaatagagtgagaaaaagacttataagattgaaaaagcaagatgcggattttgtgcgatgcttgcgagaacgcagccgcaatcatcttttgcgccgccgatgaagctgccctttgtcgcccctgcgatgaaaaagttcatatgtgcaacaagctagctagtcggcatgtacgtgttggtttagctgaaccaagcaatgccccatgctgtgatatatgcgaaaatgcacctgccttcttttactgtgagatagacggtagttctctttgtctgcaatgtgacatggtagtacatgttggtggcaagagaacacacggtcggtttcttttgctgagacagagaatcgagtttccaggggataagcctaaagaaaacaatacgagggacaatttgcagaaccaaagagtctctacaaatggaaatggtgaagccaatgggaagattgatgacgaaatgattgatctaaatgctaatccacaaagagtacatgagccatcatcaaataacaacgggattgatgtaaataacgagaacaatcacgagcctgcaggccttgtaccagttggaccctttaaacgagagtctgagaagtgataaggtgagagagagagagaaagagactctttaccctgattcaaaaaatcagtttaagaagaagattgtaaaaagtttcaagaactggagatttcatggccgtttttttnanaaccttctgattncttagatcgttgcgggtgtaaccgagctttgttgttgaagagggaaggtttatgttgtttgtgcattatncttagttttaaggaattagcttaagtgctcacatgaacgtaagctatgncctgaaattcctaaataattttattngtttcctgttaaaaaaaaaaaaaaaaggaaattaaacncgcacgggaaaaacccgggttttct

SEQ ID NO: 43795 - protein, 183 aa, Arabidopsis thaliana
  peptide (1)..(183): Ceres Seq. ID no. 12558766
  misc_feature (1)..(47): Pfam Name: B-box zinc finger Pfam Description: B-box zinc finger
  misc_feature (1)..(124): Homolog of NCBI NO: 22329252 NR Description: CONSTANS B-box zinc finger family protein
  misc_feature (1)..(116): Homolog of NCBI NO: 18412037 NR Description: CONSTANS B-box zinc finger family protein
  misc_feature (1)..(116): Homolog of NCBI NO: 17433085 NR Description: Zinc finger protein constans-like 7
  misc_feature (1)..(136): Homolog of NCBI NO: 38344979 NR Description: OSJNBa0011L07.9 [Oryza sativa (japonica
  misc_feature (1)..(161): Homolog of NCBI NO: 15222289 NR Description: CONSTANS B-box zinc finger family protein
  misc_feature (1)..(102): Homolog of NCBI NO: 25412029 NR Description: hypothetical protein At2g21320 [imported] -
  misc_feature (1)..(167): Homolog of NCBI NO: 18399657 NR Description: CONSTANS B-box zinc finger family protein
  misc_feature (34)..(183): Homolog of NCBI NO: 38603920 NR Description: At4g38960 [Arabidopsis thaliana]
  misc_feature (1)..(183): Homolog of NCBI NO: 7485798 NR Description: hypothetical protein F19H22.60 - Arabidopsis
  misc_feature (1)..(183): Homolog of NCBI NO: 22329245 NR Description: CONSTANS B-box zinc finger family protein
MRILCDACENAAAIIFCAADEAALCRPCDEKVHMCNKLASRHVRVGLAEPSNAPCCDICENAPAFFYCEIDGSSLCLQCDMVVHVGGKRTHGRFLLLRQRIEFPGDKPKENNTRDNLQNQRVSTNGNGEANGKIDDEMIDLNANPQRVHEPSSNNNGIDVNNENNHEPAGLVPVGPFKRESEK

SEQ ID NO: 43796 - protein, 150 aa, Arabidopsis thaliana
  peptide (1)..(150): Ceres Seq. ID no. 12558767
  misc_feature (1)..(91): Homolog of NCBI NO: 22329252 NR Description: CONSTANS B-box zinc finger family protein
  misc_feature (1)..(83): Homolog of NCBI NO: 18412037 NR Description: CONSTANS B-box zinc finger family protein
  misc_feature (1)..(83): Homolog of NCBI NO: 17433085 NR Description: Zinc finger protein constans-like 7
  misc_feature (1)..(103): Homolog of NCBI NO: 38344979 NR Description: OSJNBa0011L07.9 [Oryza sativa (japonica
  misc_feature (1)..(128): Homolog of NCBI NO: 15222289 NR Description: CONSTANS B-box zinc finger family protein
  misc_feature (1)..(69): Homolog of NCBI NO: 25412029 NR Description: hypothetical protein At2g21320 [imported] -
  misc_feature (1)..(134): Homolog of NCBI NO: 18399657 NR Description: CONSTANS B-box zinc finger family protein
  misc_feature (1)..(150): Homolog of NCBI NO: 38603920 NR Description: At4g38960 [Arabidopsis thaliana]
  misc_feature (1)..(150): Homolog of NCBI NO: 7485798 NR Description: hypothetical protein F19H22.60 - Arabidopsis
  misc_feature (1)..(150): Homolog of NCBI NO: 22329245 NR Description: CONSTANS B-box zinc finger family protein
MCNKLASRHVRVGLAEPSNAPCCDICENAPAFFYCEIDGSSLCLQCDMVVHVGGKRTHGRFLLLRQRIEFPGDKPKENNTRDNLQNQRVSTNGNGEANGKIDDEMIDLNANPQRVHEPSSNNNGIDVNNENNHEPAGLVPVGPFKRESEK

SEQ ID NO: 43797 - protein, 103 aa, Arabidopsis thaliana
  peptide (1)..(103): Ceres Seq. ID no. 12558768
  misc_feature (1)..(44): Homolog of NCBI NO: 22329252 NR Description: CONSTANS B-box zinc finger family protein
  misc_feature (1)..(36): Homolog of NCBI NO: 18412037 NR Description: CONSTANS B-box zinc finger family protein
  misc_feature (1)..(36): Homolog of NCBI NO: 17433085 NR Description: Zinc finger protein constans-like 7
  misc_feature (1)..(56): Homolog of NCBI NO: 38344979 NR Description: OSJNBa0011L07.9 [Oryza sativa (japonica
  misc_feature (1)..(81): Homolog of NCBI NO: 15222289 NR Description: CONSTANS B-box zinc finger family protein
  misc_feature (1)..(22): Homolog of NCBI NO: 25412029 NR Description: hypothetical protein At2g21320 [imported] -
  misc_feature (1)..(87): Homolog of NCBI NO: 18399657 NR Description: CONSTANS B-box zinc finger family protein
  misc_feature (1)..(103): Homolog of NCBI NO: 38603920 NR Description: At4g38960 [Arabidopsis thaliana]
  misc_feature (1)..(103): Homolog of NCBI NO: 7485798 NR Description: hypothetical protein F19H22.60 - Arabidopsis
  misc_feature (1)..(103): Homolog of NCBI NO: 22329245 NR Description: CONSTANS B-box zinc finger family protein
MVVHVGGKRTHGRFLLLRQRIEFPGDKPKENNTRDNLQNQRVSTNGNGEANGKIDDEMIDLNANPQRVHEPSSNNNGIDVNNENNHEPAGLVPVGPFKRESEK

SEQ ID NO: 43798 - DNA, 611 bp, Arabidopsis thaliana; identical to SEQ ID NO: 39806
  misc_feature (1)..(611): Ceres Seq. ID no. 12338945
  misc_feature: MA Experiment ID: 108434 Result: Down-regulated in Transcription
  misc_feature: MA Experiment 108434 PARAMETER Experiment Name: At_Root_Tips_cDNA_P Parameter: Tissue Value: Root Tips
  misc_feature: MA Experiment ID: 108435 Result: Down-regulated in Transcription
  misc_feature: MA Experiment 108435 PARAMETER Experiment Name: At_stm_Mutants_cDNA_P Parameter: Plant Line Value: wt Landsburg vs stm
  misc_feature: MA Experiment 108435 PARAMETER Experiment Name: At_stm_Mutants_cDNA_P Parameter: Tissue Value: Shoot Apical Meristem Region
  misc_feature: MA Experiment ID: 108462 Result: Up-regulated in Transcription
  misc_feature: MA Experiment 108462 PARAMETER Experiment Name: At_Germinating_Seeds_cDNA_P Parameter: Age (day) Value: 2 vs. 0
  misc_feature: MA Experiment 108462 PARAMETER Experiment Name: At_Germinating_Seeds_cDNA_P Parameter: Tissue Value: Germinating Seeds
  misc_feature: MA Experiment ID: 108464 Result: Up-regulated in Transcription
  misc_feature: MA Experiment 108464 PARAMETER Experiment Name: At_Germinating_Seeds_cDNA_P Parameter: Age (day) Value: 4 vs. 0
  misc_feature: MA Experiment 108464 PARAMETER Experiment Name: At_Germinating_Seeds_cDNA_P Parameter: Tissue Value: Germinating Seeds
  misc_feature: MA Experiment ID: 108488 Result: Up-regulated in Transcription
  misc_feature: MA Experiment ID: 108489 Result: Down-regulated in Transcription
  misc_feature: MA Experiment ID: 108595 Result: Down-regulated in Transcription
  misc_feature: MA Experiment 108595 PARAMETER Experiment Name: At_Ler-pi_Ovule_cDNA_P Parameter: Plant Line Value: null
  misc_feature: MA Experiment ID: 20000180 Result: Up-regulated in Transcription
  misc_feature: MA Experiment 20000180 PARAMETER Experiment Name: At_Germinating_Seeds_P Parameter: Age (hr) Value: 24 vs. 0
  misc_feature: MA Experiment 20000180 PARAMETER Experiment Name: At_Germinating_Seeds_P Parameter: Tissue Value: Germinating Seeds
  misc_feature: MA Experiment ID: 20000185 Result: Down-regulated in Transcription
  misc_feature: MA Experiment 20000185 PARAMETER Experiment Name: At_Roots__P Parameter: Age (day) Value: 7 vs. 21
  misc_feature: MA Experiment 20000185 PARAMETER Experiment Name: At_Roots__P Parameter: Organism Value: A. thaliana
  misc_feature: MA Experiment 20000185 PARAMETER Experiment Name: At_Roots__P Parameter: Tissue Value: Roots vs. Whole Plant
  misc_feature: MA Experiment ID: 20000439 Result: Down-regulated in Transcription
  misc_feature: MA Experiment 20000439 PARAMETER Experiment Name: At_Roots__P Parameter: Age (day) Value: 14 vs. 21
  misc_feature: MA Experiment 20000439 PARAMETER Experiment Name: At_Roots__P Parameter: Organism Value: A. thaliana
  misc_feature: MA Experiment 20000439 PARAMETER Experiment Name: At_Roots__P Parameter: Tissue Value: Roots vs. Whole Plant

SEQ ID NO: 43799 - protein, 140 aa, Arabidopsis thaliana; identical to SEQ ID NO: 39807
  peptide (1)..(140): Ceres Seq. ID no. 12338947
  misc_feature (42)..(140): Pfam Name: Photosystem II 10 kDa polypeptide PsbR Pfam Description: Photosystem II 10 kDa polypeptide PsbR
  misc_feature (42)..(140): Pfam Name: Photosystem II 10 kDa polypeptide PsbR Pfam Description: Photosystem II 10 kDa polypeptide PsbR
  misc_feature (1)..(140): Homolog of NCBI NO: 33694227 NR Description: 10 kDa photosystem II polypeptide [Trifolium
  misc_feature (1)..(140): Homolog of NCBI NO: 131400 NR Description: Photosystem II 10 kDa polypeptide, chloroplast
  misc_feature (10)..(140): Homolog of NCBI NO: 1418984 NR Description: photosystem II 10 kD polypeptide [Lycopersicon
  misc_feature (1)..(140): Homolog of NCBI NO: 3914472 NR Description: Photosystem II 10 kDa polypeptide, chloroplast
  misc_feature (3)..(140): Homolog of NCBI NO: 21491 NR Description: ST-LS1 protein (AA 1-138) [Solanum tuberosum]
  misc_feature (1)..(140): Homolog of NCBI NO: 33694227 NR Description: 10 kDa photosystem II polypeptide [Trifolium
  misc_feature (10)..(140): Homolog of NCBI NO: 1418984 NR Description: photosystem II 10 kD polypeptide [Lycopersicon
  misc_feature (3)..(140): Homolog of NCBI NO: 21491 NR Description: ST-LS1 protein (AA 1-138) [Solanum tuberosum]
  misc_feature (1)..(140): Homolog of NCBI NO: 15219268 NR Description: photosystem II polypeptide, putative
  misc_feature (1)..(140): Homolog of NCBI NO: 1346871 NR Description: Photosystem II 10 kDa polypeptide, chloroplast
  misc_feature (4)..(140): Homolog of NCBI NO: 28207611 NR Description: photosystem II 10kDa polypeptide [Brassica rapa
  misc_feature (3)..(140): Homolog of NCBI NO: 131399 NR Description: Photosystem II 10 kDa polypeptide, chloroplast
  misc_feature (3)..(140): Homolog of NCBI NO: 3914471 NR Description: Photosystem II 10 kDa polypeptide, chloroplast
  misc_feature (1)..(140): Homolog of NCBI NO: 3914472 NR Description: Photosystem II 10 kDa polypeptide, chloroplast
  misc_feature (1)..(140): Homolog of NCBI NO: 131400 NR Description: Photosystem II 10 kDa polypeptide, chloroplast
  misc_feature (3)..(140): Homolog of NCBI NO: 3914471 NR Description: Photosystem II 10 kDa polypeptide, chloroplast
  misc_feature (3)..(140): Homolog of NCBI NO: 131399 NR Description: Photosystem II 10 kDa polypeptide, chloroplast
  misc_feature (4)..(140): Homolog of NCBI NO: 28207611 NR Description: photosystem II 10kDa polypeptide [Brassica rapa
  misc_feature (1)..(140): Homolog of NCBI NO: 1346871 NR Description: Photosystem II 10 kDa polypeptide, chloroplast
  misc_feature (1)..(140): Homolog of NCBI NO: 15219268 NR Description: photosystem II polypeptide, putative

SEQ ID NO: 43800 - protein, 135 aa, Arabidopsis thaliana; identical to SEQ ID NO: 39808
  peptide (1)..(135): Ceres Seq. ID no. 12338948
  misc_feature (37)..(135): Pfam Name: Photosystem II 10 kDa polypeptide PsbR Pfam Description: Photosystem II 10 kDa polypeptide PsbR
  misc_feature (37)..(135): Pfam Name: Photosystem II 10 kDa polypeptide PsbR Pfam Description: Photosystem II 10 kDa polypeptide PsbR
  misc_feature (1)..(135): Homolog of NCBI NO: 33694227 NR Description: 10 kDa photosystem II polypeptide [Trifolium
  misc_feature (1)..(135): Homolog of NCBI NO: 131400 NR Description: Photosystem II 10 kDa polypeptide, chloroplast
  misc_feature (5)..(135): Homolog of NCBI NO: 1418984 NR Description: photosystem II 10 kD polypeptide [Lycopersicon
  misc_feature (1)..(135): Homolog of NCBI NO: 3914472 NR Description: Photosystem II 10 kDa polypeptide, chloroplast
  misc_feature (1)..(135): Homolog of NCBI NO: 21491 NR Description: ST-LS1 protein (AA 1-138) [Solanum tuberosum]
  misc_feature (1)..(135): Homolog of NCBI NO: 33694227 NR Description: 10 kDa photosystem II polypeptide [Trifolium
  misc_feature (5)..(135): Homolog of NCBI NO: 1418984 NR Description: photosystem II 10 kD polypeptide [Lycopersicon
  misc_feature (1)..(135): Homolog of NCBI NO: 21491 NR Description: ST-LS1 protein (AA 1-138) [Solanum tuberosum]
  misc_feature (1)..(135): Homolog of NCBI NO: 15219268 NR Description: photosystem II polypeptide, putative
  misc_feature (1)..(135): Homolog of NCBI NO: 1346871 NR Description: Photosystem II 10 kDa polypeptide, chloroplast
  misc_feature (1)..(135): Homolog of NCBI NO: 28207611 NR Description: photosystem II 10kDa polypeptide [Brassica rapa
  misc_feature (1)..(135): Homolog of NCBI NO: 131399 NR Description: Photosystem II 10 kDa polypeptide, chloroplast
  misc_feature (1)..(135): Homolog of NCBI NO: 3914471 NR Description: Photosystem II 10 kDa polypeptide, chloroplast
  misc_feature (1)..(135): Homolog of NCBI NO: 3914472 NR Description: Photosystem II 10 kDa polypeptide, chloroplast
  misc_feature (1)..(135): Homolog of NCBI NO: 131400 NR Description: Photosystem II 10 kDa polypeptide, chloroplast
  misc_feature (1)..(135): Homolog of NCBI NO: 3914471 NR Description: Photosystem II 10 kDa polypeptide, chloroplast
  misc_feature (1)..(135): Homolog of NCBI NO: 131399 NR Description: Photosystem II 10 kDa polypeptide, chloroplast
  misc_feature (1)..(135): Homolog of NCBI NO: 28207611 NR Description: photosystem II 10kDa polypeptide [Brassica rapa
  misc_feature (1)..(135): Homolog of NCBI NO: 1346871 NR Description: Photosystem II 10 kDa polypeptide, chloroplast
  misc_feature (1)..(135): Homolog of NCBI NO: 15219268 NR Description: photosystem II polypeptide, putative

SEQ ID NO: 43801 - protein, 82 aa, Arabidopsis thaliana; identical to SEQ ID NO: 39809
  peptide (1)..(82): Ceres Seq. ID no. 12338949
  misc_feature (1)..(82): Pfam Name: Photosystem II 10 kDa polypeptide PsbR Pfam Description: Photosystem II 10 kDa polypeptide PsbR
  misc_feature (1)..(82): Pfam Name: Photosystem II 10 kDa polypeptide PsbR Pfam Description: Photosystem II 10 kDa polypeptide PsbR
  misc_feature (1)..(82): Homolog of NCBI NO: 33694227 NR Description: 10 kDa photosystem II polypeptide [Trifolium
  misc_feature (1)..(82): Homolog of NCBI NO: 131400 NR Description: Photosystem II 10 kDa polypeptide, chloroplast
  misc_feature (1)..(82): Homolog of NCBI NO: 1418984 NR Description: photosystem II 10 kD polypeptide [Lycopersicon
  misc_feature (1)..(82): Homolog of NCBI NO: 3914472 NR Description: Photosystem II 10 kDa polypeptide, chloroplast
  misc_feature (1)..(82): Homolog of NCBI NO: 21491 NR Description: ST-LS1 protein (AA 1-138) [Solanum tuberosum]
  misc_feature (1)..(82): Homolog of NCBI NO: 33694227 NR Description: 10 kDa photosystem II polypeptide [Trifolium
  misc_feature (1)..(82): Homolog of NCBI NO: 1418984 NR Description: photosystem II 10 kD polypeptide [Lycopersicon
  misc_feature (1)..(82): Homolog of NCBI NO: 21491 NR Description: ST-LS1 protein (AA 1-138) [Solanum tuberosum]
  misc_feature (1)..(82): Homolog of NCBI NO: 15219268 NR Description: photosystem II polypeptide, putative
  misc_feature (1)..(82): Homolog of NCBI NO: 1346871 NR Description: Photosystem II 10 kDa polypeptide, chloroplast
  misc_feature (1)..(82): Homolog of NCBI NO: 28207611 NR Description: photosystem II 10kDa polypeptide [Brassica rapa
  misc_feature (1)..(82): Homolog of NCBI NO: 131399 NR Description: Photosystem II 10 kDa polypeptide, chloroplast
  misc_feature (1)..(82): Homolog of NCBI NO: 3914471 NR Description: Photosystem II 10 kDa polypeptide, chloroplast
  misc_feature (1)..(82): Homolog of NCBI NO: 3914472 NR Description: Photosystem II 10 kDa polypeptide, chloroplast
  misc_feature (1)..(82): Homolog of NCBI NO: 131400 NR Description: Photosystem II 10 kDa polypeptide, chloroplast
  misc_feature (1)..(82): Homolog of NCBI NO: 3914471 NR Description: Photosystem II 10 kDa polypeptide, chloroplast
  misc_feature (1)..(82): Homolog of NCBI NO: 131399 NR Description: Photosystem II 10 kDa polypeptide, chloroplast
  misc_feature (1)..(82): Homolog of NCBI NO: 28207611 NR Description: photosystem II 10kDa polypeptide [Brassica rapa
  misc_feature (1)..(82): Homolog of NCBI NO: 1346871 NR Description: Photosystem II 10 kDa polypeptide, chloroplast
  misc_feature (1)..(82): Homolog of NCBI NO: 15219268 NR Description: photosystem II polypeptide, putative

SEQ ID NO: 43802 - DNA, 1837 bp, Arabidopsis thaliana
  misc_feature (1)..(1837): Ceres Seq. ID no. 12558769
  misc_feature: MA Experiment ID: 20000355 Result: Down-regulated in Transcription
  misc_feature: MA Experiment 20000355 PARAMETER Experiment Name: At_Siliques_Sub_P Parameter: Age (day) Value: 21
  misc_feature: MA Experiment 20000355 PARAMETER Experiment Name: At_Siliques_Sub_P Parameter: Organism Value: A. thaliana
  misc_feature: MA Experiment 20000355 PARAMETER Experiment Name: At_Siliques_Sub_P Parameter: Plant Line Value: WS
  misc_feature: MA Experiment 20000355 PARAMETER Experiment Name: At_Siliques_Sub_P Parameter: Tissue Value: Less Than 5mm Siliques vs. Whole Plant
gttaattttggggatcgatgtcggaaaaggaagaagctccgtcgacatcgaagtccaccggagctccgtcgcgtccgactttatctcttcctccacggccgtttagtgagatgttctttaacggtggcgttggattcagtcctggtccgatgactctggtctctaatatgttccctgattccgatgagtttaggtctttctctcagcttctcgctggagccatgtcttctccagcgactgcagctgctgctgctgctgctgcgacggctagtgattaccagagacttggtgaagggactaatagctctagtggtgatgttgacccgagattcaagcaaaacagaccaaccggtttgatgatttctcaatctcaatcgccgtcgatgttcaccgtaccgcctggtttaagtccagctatgttgctcgattcaccaagctttttgggtcttttctctcccgttcagggatcatatggaatgacacatcagcaagctctagctcaagtcactgctcaagcagttcaagccaatgccaatatgcaaccacaaacagagtaccctcctccctctcaagttcaatcattttcatcgggtcaagcgcagatcccgacctcggctccactaccagctcaaagagaaacctcagatgtaaccatcatagagcacaggtcacaacagcctctaaatgttgacaaaccagctgatgatggctataactggcgaaaatatgggcaaaagcaagttaaaggtagcgagtttccacgaagctattacaagtgtactaatccaggatgtcctgtcaagaagaaggttgagagatctcttgatggacaagtaacggagattatctacaaaggtcagcacaatcatgaacctcctcaaaacactaagcgaggtaacaaagataacaccgcgaatataaatgggagttcgataaataacaatcgcgggagttctgaattgggggcatcacagtttcaaactaatagctccaacaagactaagagagagcaacatgaagcagtaagtcaagctacgacaacagagcacttgtctgaggcaagtgacggtgaagaagttggtaatggagaaactgatgtgagagagaaagatgagaatgagcctgatcccaagagaagaagtacagaagttcggatttcagaaccagctcctgctgcttcacatagaactgtgacagagcctagaattattgtccaaacgacgagtgaagttgatcttctagatgatggatataggtggcgtaaatatggacagaaagttgtcaaagggaatccttatccgaggagctactacaagtgcacaacaccaggatgtggtgtgaggaaacatgtagagagagcagcaacagatccaaaagctgtagtaacaacatatgaaggaaaacataaccatgaccttcccgctgctaaatcaagcagccatgccgctgcagcggcacagttaaggccagataatcgacctggcggtttggctaacttaaatcaacagcagcagcaacagcccgttgcgcggctaaggcttaaagaagagcaaacaacttgagagaagaaaactcttgaccgtttttcattacaaaagctttcaaattccactcacacacttgtctgaaaaatctagcagtttgcaggaaagaaacagcttcaagaggttgtagttcttctatgttctggtgtaaaacttaaaagctttttagggttttcagatttctgtttactaatactgtatgtgaattcttttgtacatgaggaagaaaattacagggggatattttgtgttgtatcttttgtgttattgtttcagtaaaagataggtcttac

SEQ ID NO: 43803 - protein, 514 aa, Arabidopsis thaliana
  peptide (1)..(514): Ceres Seq. ID no. 12558770
  misc_feature (135)..(429): Homolog of NCBI NO: 29839687 NR Description: Probable WRKY transcription factor 19 (WRKY
  misc_feature (72)..(142): Homolog of NCBI NO: 30681996 NR Description: disease resistance protein -related [Arabidopsis
  misc_feature (135)..(429): Homolog of NCBI NO: 30681996 NR Description: disease resistance protein -related [Arabidopsis
  misc_feature (7)..(514): Homolog of NCBI NO: 25348323 NR Description: DNA-binding protein WRKY2 [imported] - common
  misc_feature (1)..(514): Homolog of NCBI NO: 15227612 NR Description: WRKY family transcription factor
  misc_feature (1)..(114): Homolog of NCBI NO: 30683544 NR Description: WRKY family transcription factor [Arabidopsis
  misc_feature (148)..(514): Homolog of NCBI NO: 30683544 NR Description: WRKY family transcription factor [Arabidopsis
  misc_feature (1)..(149): Homolog of NCBI NO: 8778394 NR Description: F16A14.18 [Arabidopsis thaliana]
  misc_feature (127)..(514): Homolog of NCBI NO: 8778394 NR Description: F16A14.18 [Arabidopsis thaliana]
  misc_feature (1)..(514): Homolog of NCBI NO: 15223004 NR Description: WRKY family transcription factor
MSEKEEAPSTSKSTGAPSRPTLSLPPRPFSEMFFNGGVGFSPGPMTLVSNMFPDSDEFRSFSQLLAGAMSSPATAAAAAAAATASDYQRLGEGTNSSSGDVDPRFKQNRPTGLMISQSQSPSMFTVPPGLSPAMLLDSPSFLGLFSPVQGSYGMTHQQALAQVTAQAVQANANMQPQTEYPPPSQVQSFSSGQAQIPTSAPLPAQRETSDVTIIEHRSQQPLNVDKPADDGYNWRKYGQKQVKGSEFPRSYYKCTNPGCPVKKKVERSLDGQVTEIIYKGQHNHEPPQNTKRGNKDNTANINGSSINNNRGSSELGASQFQTNSSNKTKREQHEAVSQATTTEHLSEASDGEEVGNGETDVREKDENEPDPKRRSTEVRISEPAPAASHRTVTEPRIIVQTTSEVDLLDDGYRWRKYGQKVVKGNPYPRSYYKCTTPGCGVRKHVERAATDPKAVVTTYEGKHNHDLPAAKSSSHAAAAAQLRPDNRPGGLANLNQQQQQQPVARLRLKEEQTT

SEQ ID NO: 43804 - protein, 483 aa, Arabidopsis thaliana
  peptide (1)..(483): Ceres Seq. ID no. 12558771
  misc_feature (104)..(398): Homolog of NCBI NO: 29839687 NR Description: Probable WRKY transcription factor 19 (WRKY
  misc_feature (41)..(111): Homolog of NCBI NO: 30681996 NR Description: disease resistance protein -related [Arabidopsis
  misc_feature (104)..(398): Homolog of NCBI NO: 30681996 NR Description: disease resistance protein -related [Arabidopsis
  misc_feature (1)..(483): Homolog of NCBI NO: 25348323 NR Description: DNA-binding protein WRKY2 [imported] - common
  misc_feature (1)..(483): Homolog of NCBI NO: 15227612 NR Description: WRKY family transcription factor
  misc_feature (1)..(83): Homolog of NCBI NO: 30683544 NR Description: WRKY family transcription factor [Arabidopsis
  misc_feature (117)..(483): Homolog of NCBI NO: 30683544 NR Description: WRKY family transcription factor [Arabidopsis
  misc_feature (1)..(118): Homolog of NCBI NO: 8778394 NR Description: F16A14.18 [Arabidopsis thaliana]
  misc_feature (96)..(483): Homolog of NCBI NO: 8778394 NR Description: F16A14.18 [Arabidopsis thaliana]
  misc_feature (1)..(483): Homolog of NCBI NO: 15223004 NR Description: WRKY family transcription factor
MFFNGGVGFSPGPMTLVSNMFPDSDEFRSFSQLLAGAMSSPATAAAAAAAATASDYQRLGEGTNSSSGDVDPRFKQNRPTGLMISQSQSPSMFTVPPGLSPAMLLDSPSFLGLFSPVQGSYGMTHQQALAQVTAQAVQANANMQPQTEYPPPSQVQSFSSGQAQIPTSAPLPAQRETSDVTIIEHRSQQPLNVDKPADDGYNWRKYGQKQVKGSEFPRSYYKCTNPGCPVKKKVERSLDGQVTEIIYKGQHNHEPPQNTKRGNKDNTANINGSSINNNRGSSELGASQFQTNSSNKTKREQHEAVSQATTTEHLSEASDGEEVGNGETDVREKDENEPDPKRRSTEVRISEPAPAASHRTVTEPRIIVQTTSEVDLLDDGYRWRKYGQKVVKGNPYPRSYYKCTTPGCGVRKHVERAATDPKAVVTTYEGKHNHDLPAAKSSSHAAAAAQLRPDNRPGGLANLNQQQQQQPVARLRLKEEQTT

SEQ ID NO: 43805 - protein, 470 aa, Arabidopsis thaliana
  peptide (1)..(470): Ceres Seq. ID no. 12558772
  misc_feature (91)..(385): Homolog of NCBI NO: 29839687 NR Description: Probable WRKY transcription factor 19 (WRKY
  misc_feature (28)..(98): Homolog of NCBI NO: 30681996 NR Description: disease resistance protein -related [Arabidopsis
  misc_feature (91)..(385): Homolog of NCBI NO: 30681996 NR Description: disease resistance protein -related [Arabidopsis
  misc_feature (1)..(470): Homolog of NCBI NO: 25348323 NR Description: DNA-binding protein WRKY2 [imported] - common
  misc_feature (1)..(470): Homolog of NCBI NO: 15227612 NR Description: WRKY family transcription factor
  misc_feature (1)..(70): Homolog of NCBI NO: 30683544 NR Description: WRKY family transcription factor [Arabidopsis
  misc_feature (104)..(470): Homolog of NCBI NO: 30683544 NR Description: WRKY family transcription factor [Arabidopsis
  misc_feature (1)..(105): Homolog of NCBI NO: 8778394 NR Description: F16A14.18 [Arabidopsis thaliana]
  misc_feature (83)..(470): Homolog of NCBI NO: 8778394 NR Description: F16A14.18 [Arabidopsis thaliana]
  misc_feature (1)..(470): Homolog of NCBI NO: 15223004 NR Description: WRKY family transcription factor
MTLVSNMFPDSDEFRSFSQLLAGAMSSPATAAAAAAAATASDYQRLGEGTNSSSGDVDPRFKQNRPTGLMISQSQSPSMFTVPPGLSPAMLLDSPSFLGLFSPVQGSYGMTHQQALAQVTAQAVQANANMQPQTEYPPPSQVQSFSSGQAQIPTSAPLPAQRETSDVTIIEHRSQQPLNVDKPADDGYNWRKYGQKQVKGSEFPRSYYKCTNPGCPVKKKVERSLDGQVTEIIYKGQHNHEPPQNTKRGNKDNTANINGSSINNNRGSSELGASQFQTNSSNKTKREQHEAVSQATTTEHLSEASDGEEVGNGETDVREKDENEPDPKRRSTEVRISEPAPAASHRTVTEPRIIVQTTSEVDLLDDGYRWRKYGQKVVKGNPYPRSYYKCTTPGCGVRKHVERAATDPKAVVTTYEGKHNHDLPAAKSSSHAAAAAQLRPDNRPGGLANLNQQQQQQPVARLRLKEEQTT

SEQ ID NO: 43806 - DNA, 804 bp, Arabidopsis thaliana
  misc_feature (1)..(804): Ceres Seq. ID no. 12601213
  misc_feature: MA Experiment ID: 20000227 Result: Up-regulated in Transcription
  misc_feature: MA Experiment 20000227 PARAMETER Experiment Name: At_Root-Tips-vs-Tops_P Parameter: Tissue Value: Root Tips vs. Root Tops
  misc_feature: MA Experiment ID: 20000794 Result: Down-regulated in Transcription
  misc_feature: MA Experiment 20000794 PARAMETER Experiment Name: At_Petals_P Parameter: Age (day) Value: 23-25 days
  misc_feature: MA Experiment 20000794 PARAMETER Experiment Name: At_Petals_P Parameter: Plant Line Value: WS
  misc_feature: MA Experiment 20000794 PARAMETER Experiment Name: At_Petals_P Parameter: Tissue Value: Petals vs. Whole plant
cttcgccaaaatcagggagaggctaaaatggtttcgttgaagctccagaagcgtctcgcatcctcagtactcaagtgcgggaagagaaaagtatggctcgacccgaacgaaggaagtgatatctccatggccaattcgcgtcaaaacatcaggaagcttgtgaaggatggattcatcatcaggaagccaacgaagatccactcacgatccagggcacgtcaattgaatatagccaagagaaagggacgtcactctggttatggtaagaggaagggtacccgagaggcaaggttgccaacaaaagttttgtggatgaggaggatgagagtgctgaggcgtctgttgaagaagtatagggagaccaagaagattgacagacatatgtaccatgacatgtacatgaaagtcaagggaaacgtcttcaagaacaagcgtgtgttgatggaaagtattcacaaatccaaggctgagaaggctagagagaagacattgtctgaccagtttgaggctaagagggctaagaacaaggctagccgagagaggaaacatgctcgacgagaggagcgtcttgccaagggtcctggaggagacatacctgccgctgcaccacctgcacaaaccgctgaggtacctgcgaaaaagtctaagaagtgagaagcttgctcggtagtgaattctcttataagcagtgattttgaatggtttatgtgatatagctttgtgaaaactctttatttgtcacaaatatgagaacctttgtcagtagttcgtactgtttcaggagacttaattctatcttcaagt

SEQ ID NO: 43807 - protein, 217 aa, Arabidopsis thaliana
  peptide (1)..(217): Ceres Seq. ID no. 12601214
  misc_feature (11)..(158): Pfam Name: Ribosomal protein L19e Pfam Description: Ribosomal protein L19e
  misc_feature (11)..(158): Pfam Name: Ribosomal protein L19e Pfam Description: Ribosomal protein L19e
  misc_feature (10)..(191): Homolog of NCBI NO: 28630352 NR Description: ribosomal protein L19 [Branchiostoma lanceolatum]
  misc_feature (10)..(191): Homolog of NCBI NO: 28200276 NR Description: ribosomal protein L19 [Branchiostoma belcheri
  misc_feature (10)..(194): Homolog of NCBI NO: 32401377 NR Description: ribosomal protein L19 [Triticum aestivum]
  misc_feature (10)..(217): Homolog of NCBI NO: 29837764 NR Description: putative ribosomal protein L19
  misc_feature (10)..(217): Homolog of NCBI NO: 40287526 NR Description: 60S ribosomal protein L19 [Capsicum annuum]
  misc_feature (10)..(191): Homolog of NCBI NO: 28630352 NR Description: ribosomal protein L19 [Branchiostoma lanceolatum]
  misc_feature (10)..(194): Homolog of NCBI NO: 32401377 NR Description: ribosomal protein L19 [Triticum aestivum]
  misc_feature (10)..(217): Homolog of NCBI NO: 40287526 NR Description: 60S ribosomal protein L19 [Capsicum annuum]
  misc_feature (10)..(217): Homolog of NCBI NO: 15235290 NR Description: putative ribosomal protein L19
  misc_feature (10)..(209): Homolog of NCBI NO: 7440943 NR Description: ribosomal protein L19.T2H3.3 - Arabidopsis
  misc_feature (10)..(217): Homolog of NCBI NO: 15218602 NR Description: ribosomal protein L19, putative
  misc_feature (10)..(217): Homolog of NCBI NO: 18087585 NR Description: At1g02780/T14P4_3 [Arabidopsis thaliana]
  misc_feature (10)..(217): Homolog of NCBI NO: 15228314 NR Description: putative ribosomal protein
  misc_feature (10)..(217): Homolog of NCBI NO: 29837764 NR Description: putative ribosomal protein L19
  misc_feature (10)..(191): Homolog of NCBI NO: 28200276 NR Description: ribosomal protein L19 [Branchiostoma belcheri
  misc_feature (10)..(217): Homolog of NCBI NO: 15228314 NR Description: putative ribosomal protein
  misc_feature (10)..(217): Homolog of NCBI NO: 18087585 NR Description: At1g02780/T14P4_3 [Arabidopsis thaliana]
  misc_feature (10)..(217): Homolog of NCBI NO: 15218602 NR Description: ribosomal protein L19, putative
  misc_feature (10)..(209): Homolog of NCBI NO: 7440943 NR Description: ribosomal protein L19.T2H3.3 - Arabidopsis
  misc_feature (10)..(217): Homolog of NCBI NO: 15235290 NR Description: putative ribosomal protein L19
LRQNQGEAKMVSLKLQKRLASSVLKCGKRKVWLDPNEGSDISMANSRQNIRKLVKDGFIIRKPTKIHSRSRARQLNIAKRKGRHSGYGKRKGTREARLPTKVLWMRRMRVLRRLLKKYRETKKIDRHMYHDMYMKVKGNVFKNKRVLMESIHKSKAEKAREKTLSDQFEAKRAKNKASRERKHARREERLAKGPGGDIPAAAPPAQTAEVPAKKSKK

SEQ ID NO: 43808 - protein, 208 aa, Arabidopsis thaliana
  peptide (1)..(208): Ceres Seq. ID no. 12601215
  misc_feature (2)..(149): Pfam Name: Ribosomal protein L19e Pfam Description: Ribosomal protein L19e
  misc_feature (2)..(149): Pfam Name: Ribosomal protein L19e Pfam Description: Ribosomal protein L19e
  misc_feature (1)..(182): Homolog of NCBI NO: 28630352 NR Description: ribosomal protein L19 [Branchiostoma lanceolatum]
  misc_feature (1)..(182): Homolog of NCBI NO: 28200276 NR Description: ribosomal protein L19 [Branchiostoma belcheri
  misc_feature (1)..(185): Homolog of NCBI NO: 32401377 NR Description: ribosomal protein L19 [Triticum aestivum]
  misc_feature (1)..(208): Homolog of NCBI NO: 29837764 NR Description: putative ribosomal protein L19
  misc_feature (1)..(208): Homolog of NCBI NO: 40287526 NR Description: 60S ribosomal protein L19 [Capsicum annuum]
  misc_feature (1)..(182): Homolog of NCBI NO: 28630352 NR Description: ribosomal protein L19 [Branchiostoma lanceolatum]
  misc_feature (1)..(185): Homolog of NCBI NO: 32401377 NR Description: ribosomal protein L19 [Triticum aestivum]
  misc_feature (1)..(208): Homolog of NCBI NO: 40287526 NR Description: 60S ribosomal protein L19 [Capsicum annuum]
  misc_feature (1)..(208): Homolog of NCBI NO: 15235290 NR Description: putative ribosomal protein L19
  misc_feature (1)..(200): Homolog of NCBI NO: 7440943 NR Description: ribosomal protein L19.T2H3.3 - Arabidopsis
  misc_feature (1)..(208): Homolog of NCBI NO: 15218602 NR Description: ribosomal protein L19, putative
  misc_feature (1)..(208): Homolog of NCBI NO: 18087585 NR Description: At1g02780/T14P4_3 [Arabidopsis thaliana]
  misc_feature (1)..(208): Homolog of NCBI NO: 15228314 NR Description: putative ribosomal protein
  misc_feature (1)..(208): Homolog of NCBI NO: 29837764 NR Description: putative ribosomal protein L19
  misc_feature (1)..(182): Homolog of NCBI NO: 28200276 NR Description: ribosomal protein L19 [Branchiostoma belcheri
  misc_feature (1)..(208): Homolog of NCBI NO: 15228314 NR Description: putative ribosomal protein
  misc_feature (1)..(208): Homolog of NCBI NO: 18087585 NR Description: At1g02780/T14P4_3 [Arabidopsis thaliana]
  misc_feature (1)..(208): Homolog of NCBI NO: 15218602 NR Description: ribosomal protein L19, putative
  misc_feature (1)..(200): Homolog of NCBI NO: 7440943 NR Description: ribosomal protein L19.T2H3.3 - Arabidopsis
  misc_feature (1)..(208): Homolog of NCBI NO: 15235290 NR Description: putative ribosomal protein L19
MVSLKLQKRLASSVLKCGKRKVWLDPNEGSDISMANSRQNIRKLVKDGFIIRKPTKIHSRSRARQLNIAKRKGRHSGYGKRKGTREARLPTKVLWMRRMRVLRRLLKKYRETKKIDRHMYHDMYMKVKGNVFKNKRVLMESIHKSKAEKAREKTLSDQFEAKRAKNKASRERKHARREERLAKGPGGDIPAAAPPAQTAEVPAKKSKK

SEQ ID NO: 43809 - protein, 175 aa, Arabidopsis thaliana
  peptide (1)..(175): Ceres Seq. ID no. 12601216
  misc_feature (1)..(116): Pfam Name: Ribosomal protein L19e Pfam Description: Ribosomal protein L19e
  misc_feature (1)..(116): Pfam Name: Ribosomal protein L19e Pfam Description: Ribosomal protein L19e
  misc_feature (1)..(149): Homolog of NCBI NO: 28630352 NR Description: ribosomal protein L19 [Branchiostoma lanceolatum]
  misc_feature (1)..(149): Homolog of NCBI NO: 28200276 NR Description: ribosomal protein L19 [Branchiostoma belcheri
  misc_feature (1)..(152): Homolog of NCBI NO: 32401377 NR Description: ribosomal protein L19 [Triticum aestivum]
  misc_feature (1)..(175): Homolog of NCBI NO: 29837764 NR Description: putative ribosomal protein L19
  misc_feature (1)..(175): Homolog of NCBI NO: 40287526 NR Description: 60S ribosomal protein L19 [Capsicum annuum]
  misc_feature (1)..(149): Homolog of NCBI NO: 28630352 NR Description: ribosomal protein L19 [Branchiostoma lanceolatum]
  misc_feature (1)..(152): Homolog of NCBI NO: 32401377 NR Description: ribosomal protein L19 [Triticum aestivum]
  misc_feature (1)..(175): Homolog of NCBI NO: 40287526 NR Description: 60S ribosomal protein L19 [Capsicum annuum]
  misc_feature (1)..(175): Homolog of NCBI NO: 15235290 NR Description: putative ribosomal protein L19
  misc_feature (1)..(167): Homolog of NCBI NO: 7440943 NR Description: ribosomal protein L19.T2H3.3 - Arabidopsis
  misc_feature (1)..(175): Homolog of NCBI NO: 15218602 NR Description: ribosomal protein L19, putative
  misc_feature (1)..(175): Homolog of NCBI NO: 18087585 NR Description: At1g02780/T14P4_3 [Arabidopsis thaliana]
  misc_feature (1)..(175): Homolog of NCBI NO: 15228314 NR Description: putative ribosomal protein
  misc_feature (1)..(175): Homolog of NCBI NO: 29837764 NR Description: putative ribosomal protein L19
  misc_feature (1)..(149): Homolog of NCBI NO: 28200276 NR Description: ribosomal protein L19 [Branchiostoma belcheri
  misc_feature (1)..(175): Homolog of NCBI NO: 15228314 NR Description: putative ribosomal protein
  misc_feature (1)..(175): Homolog of NCBI NO: 18087585 NR Description: At1g02780/T14P4_3 [Arabidopsis thaliana]
  misc_feature (1)..(175): Homolog of NCBI NO: 15218602 NR Description: ribosomal protein L19, putative
  misc_feature (1)..(167): Homolog of NCBI NO: 7440943 NR Description: ribosomal protein L19.T2H3.3 - Arabidopsis
  misc_feature (1)..(175): Homolog of NCBI NO: 15235290 NR Description: putative ribosomal protein L19
MANSRQNIRKLVKDGFIIRKPTKIHSRSRARQLNIAKRKGRHSGYGKRKGTREARLPTKVLWMRRMRVLRRLLKKYRETKKIDRHMYHDMYMKVKGNVFKNKRVLMESIHKSKAEKAREKTLSDQFEAKRAKNKASRERKHARREERLAKGPGGDIPAAAPPAQTAEVPAKKSKK

SEQ ID NO: 43810 - DNA, 1452 bp, Arabidopsis thaliana
  misc_feature (1)..(1452): Ceres Seq. ID no. 13575593
  misc_feature: MA Experiment ID: 20000180 Result: Up-regulated in Transcription
  misc_feature: MA Experiment 20000180 PARAMETER Experiment Name: At_Germinating_Seeds_P Parameter: Age (hr) Value: 24 vs. 0
  misc_feature: MA Experiment 20000180 PARAMETER Experiment Name: At_Germinating_Seeds_P Parameter: Tissue Value: Germinating Seeds
  misc_feature: MA Experiment ID: 20000794 Result: Up-regulated in Transcription
  misc_feature: MA Experiment 20000794 PARAMETER Experiment Name: At_Petals_P Parameter: Age (day) Value: 23-25 days
  misc_feature: MA Experiment 20000794 PARAMETER Experiment Name: At_Petals_P Parameter: Plant Line Value: WS
  misc_feature: MA Experiment 20000794 PARAMETER Experiment Name: At_Petals_P Parameter: Tissue Value: Petals vs. Whole plant
  misc_feature: MA Experiment ID: 20001904 Result: Up-regulated in Transcription
  misc_feature: MA Experiment 20001904 PARAMETER Experiment Name: At_Drought_Reproduction_P Parameter: Age (day) Value: 37
  misc_feature: MA Experiment 20001904 PARAMETER Experiment Name: At_Drought_Reproduction_P Parameter: Organism Value: A. thaliana
  misc_feature: MA Experiment 20001904 PARAMETER Experiment Name: At_Drought_Reproduction_P Parameter: Plant Line Value: WS
  misc_feature: MA Experiment 20001904 PARAMETER Experiment Name: At_Drought_Reproduction_P Parameter: Timepoint (day) Value: 7
  misc_feature: MA Experiment 20001904 PARAMETER Experiment Name: At_Drought_Reproduction_P Parameter: Tissue Value: Rosettes
  misc_feature: MA Experiment 20001904 PARAMETER Experiment Name: At_Drought_Reproduction_P Parameter: Treatment Value: Drought vs. No Drought
  misc_feature: MA Experiment ID: 20001905 Result: Up-regulated in Transcription
  misc_feature: MA Experiment 20001905 PARAMETER Experiment Name: At_Drought_Reproduction_P Parameter: Age (day) Value: 40
  misc_feature: MA Experiment 20001905 PARAMETER Experiment Name: At_Drought_Reproduction_P Parameter: Organism Value: A. thaliana
  misc_feature: MA Experiment 20001905 PARAMETER Experiment Name: At_Drought_Reproduction_P Parameter: Plant Line Value: WS
  misc_feature: MA Experiment 20001905 PARAMETER Experiment Name: At_Drought_Reproduction_P Parameter: Timepoint (day) Value: 10
  misc_feature: MA Experiment 20001905 PARAMETER Experiment Name: At_Drought_Reproduction_P Parameter: Tissue Value: Rosettes
  misc_feature: MA Experiment 20001905 PARAMETER Experiment Name: At_Drought_Reproduction_P Parameter: Treatment Value: Drought vs. No Drought
  misc_feature: MA Experiment ID: 20001911 Result: Up-regulated in Transcription
  misc_feature: MA Experiment 20001911 PARAMETER Experiment Name: At_Drought_Reproduction_P Parameter: Age (day) Value: 40
  misc_feature: MA Experiment 20001911 PARAMETER Experiment Name: At_Drought_Reproduction_P Parameter: Organism Value: A. thaliana
  misc_feature: MA Experiment 20001911 PARAMETER Experiment Name: At_Drought_Reproduction_P Parameter: Plant Line Value: WS
  misc_feature: MA Experiment 20001911 PARAMETER Experiment Name: At_Drought_Reproduction_P Parameter: Timepoint (day) Value: 10
  misc_feature: MA Experiment 20001911 PARAMETER Experiment Name: At_Drought_Reproduction_P Parameter: Tissue Value: Flowers
  misc_feature: MA Experiment 20001911 PARAMETER Experiment Name: At_Drought_Reproduction_P Parameter: Treatment Value: Drought vs. No Drought
gagtctaatcaaatgtgccttaatttacaaaaatgacttctcacgactcacgccattaaactccacgtacacctttccctttcactttcatcttcttcttccctcgattcaatgggttatctctcctgcaaagctggatccgccgtcgcaatcgccgtttcatctgccgcatcaacctccggatccacctccagcaaagcttctgctcctcccgaatctcccattgaagaccgtcctagacttcgtcgtttcctccatcgcgatctcgaatcagccacaggaggtttcgacatcaacaatctcctcggacgtggaagccatggaagcgtttacaaagctgtcatcggttcacgtcacatcgcggtcaagagaccttcgaaatctcgagaaatcagccgtgagttccacaacgaattcgagattctctccagaatccgtagccctaggtttgtgaatctcttaggttttagcgccgataactccaaagaaccacttctcgttgttgaattcatgggaaacggaagcttatacgacgtgattcactcagataccgttttaaactccggtgcgatttcgagctggagtaagagaatcaaaatcgctcttcagattgcaaaagccgtacatcttctacattctcaagagacaccgatcatacacagagatataaaatcagcaaacgtattgatggataagaatctaaacgcgaagctaggcgatttcggattagcgatcagatgcaatgttgatgatcaaaaagtgaaatcaacaccacctgcaggaacaatgggttacttagatccagattacgtaacggctgatagattaagcacgaaaactgatgtgtttagcttcgggatcttgttgttagagataatcagcggaagaaaagcaatcgacgttagatattcgccgtcgtttatagtagattgggcgattccgatgataaaaagaggcaaaatcggtgggatttatgatccgagaatcggaccaccgattgatgtaagtgtgaggaatcatttggggttagtggcggctaagtgtgtgagaacgtgtagagagaaacggccggggatggaggaagtggttgggtggctcacggggttgactaagtcggttaggtcacgacggtgggatgagttaagcattggaaacccgtgtatgatggtcgagacggtgggtggtcgacccgtggaatgattttttatttgtttaaaatcaagtgcttcgctttgaagccattgttttttctcttatgggttggtcaatttattcatttaacataataaagcatatactgtaacatcatggttgcatatggtatttgactggatcatcatattcataactaccgcttgttctaaaaacatgccatgtaaagccttttgcactagtgcataactttctcatatcacaagttttttagcatctctttgtagagttggaactttc

SEQ ID NO: 43811 - protein, 362 aa, Arabidopsis thaliana
  peptide (1)..(362): Ceres Seq. ID no. 13575594
  misc_feature (43)..(348): Homolog of NCBI NO: 15238823 NR Description: protein kinase, putative [Arabidopsis thaliana]
  misc_feature (44)..(335): Homolog of NCBI NO: 10998537 NR Description: cytokinin-regulated kinase 1 [Nicotiana tabacum]
  misc_feature (1)..(341): Homolog of NCBI NO: 34902334 NR Description: Putative serine/threonine protein kinase
  misc_feature (44)..(338): Homolog of NCBI NO: 15237244 NR Description: protein kinase family [Arabidopsis thaliana]
  misc_feature (1)..(338): Homolog of NCBI NO: 11358842 NR Description: serine/threonine-specific protein kinase-like
  misc_feature (19)..(358): Homolog of NCBI NO: 15231681 NR Description: protein kinase family [Arabidopsis thaliana]
  misc_feature (43)..(351): Homolog of NCBI NO: 15721862 NR Description: CR4 [Oryza sativa]
  misc_feature (1)..(351): Homolog of NCBI NO: 3913366 NR Description: Putative receptor protein kinase CRINKLY4
  misc_feature (1)..(344): Homolog of NCBI NO: 15218652 NR Description: protein kinase family [Arabidopsis thaliana]
  misc_feature (1)..(362): Homolog of NCBI NO: 15231097 NR Description: protein kinase family [Arabidopsis thaliana]
MGYLSCKAGSAVAIAVSSAASTSGSTSSKASAPPESPIEDRPRLRRFLHRDLESATGGFDINNLLGRGSHGSVYKAVIGSRHIAVKRPSKSREISREFHNEFEILSRIRSPRFVNLLGFSADNSKEPLLVVEFMGNGSLYDVIHSDTVLNSGAISSWSKRIKIALQIAKAVHLLHSQETPIIHRDIKSANVLMDKNLNAKLGDFGLAIRCNVDDQKVKSTPPAGTMGYLDPDYVTADRLSTKTDVFSFGILLLEIISGRKAIDVRYSPSFIVDWAIPMIKRGKIGGIYDPRIGPPIDVSVRNHLGLVAAKCVRTCREKRPGMEEVVGWLTGLTKSVRSRRWDELSIGNPCMMVETVGGRPVE

SEQ ID NO: 43812 - protein, 229 aa, Arabidopsis thaliana
  peptide (1)..(229): Ceres Seq. ID no. 13575595
  misc_feature (1)..(215): Homolog of NCBI NO: 15238823 NR Description: protein kinase, putative [Arabidopsis thaliana]
  misc_feature (1)..(202): Homolog of NCBI NO: 10998537 NR Description: cytokinin-regulated kinase 1 [Nicotiana tabacum]
  misc_feature (1)..(208): Homolog of NCBI NO: 34902334 NR Description: Putative serine/threonine protein kinase
  misc_feature (1)..(205): Homolog of NCBI NO: 15237244 NR Description: protein kinase family [Arabidopsis thaliana]
  misc_feature (1)..(205): Homolog of NCBI NO: 11358842 NR Description: serine/threonine-specific protein kinase-like
  misc_feature (1)..(225): Homolog of NCBI NO: 15231681 NR Description: protein kinase family [Arabidopsis thaliana]
  misc_feature (1)..(218): Homolog of NCBI NO: 15721862 NR Description: CR4 [Oryza sativa]
  misc_feature (1)..(218): Homolog of NCBI NO: 3913366 NR Description: Putative receptor protein kinase CRINKLY4
  misc_feature (1)..(211): Homolog of NCBI NO: 15218652 NR Description: protein kinase family [Arabidopsis thaliana]
  misc_feature (1)..(229): Homolog of NCBI NO: 15231097 NR Description: protein kinase family [Arabidopsis thaliana]
MGNGSLYDVIHSDTVLNSGAISSWSKRIKIALQIAKAVHLLHSQETPIIHRDIKSANVLMDKNLNAKLGDFGLAIRCNVDDQKVKSTPPAGTMGYLDPDYVTADRLSTKTDVFSFGILLLEIISGRKAIDVRYSPSFIVDWAIPMIKRGKIGGIYDPRIGPPIDVSVRNHLGLVAAKCVRTCREKRPGMEEVVGWLTGLTKSVRSRRWDELSIGNPCMMVETVGGRPVE

SEQ ID NO: 43813 - DNA, 944 bp, Arabidopsis thaliana
  misc_feature (1)..(944): Ceres Seq. ID no. 13575244
  misc_feature: MA Experiment ID: 20000171 Result: Down-regulated in Transcription
  misc_feature: MA Experiment 20000171 PARAMETER Experiment Name: At_42deg_Heat_P Parameter: Age (day) Value: 14
  misc_feature: MA Experiment 20000171 PARAMETER Experiment Name: At_42deg_Heat_P Parameter: Organism Value: A. thaliana
  misc_feature: MA Experiment 20000171 PARAMETER Experiment Name: At_42deg_Heat_P Parameter: Plant Line Value: WS
  misc_feature: MA Experiment 20000171 PARAMETER Experiment Name: At_42deg_Heat_P Parameter: Temperature (deg C) Value: 42 vs. 22
  misc_feature: MA Experiment 20000171 PARAMETER Experiment Name: At_42deg_Heat_P Parameter: Timepoint (hr) Value: 1
  misc_feature: MA Experiment 20000171 PARAMETER Experiment Name: At_42deg_Heat_P Parameter: Tissue Value: Aerial
  misc_feature: MA Experiment ID: 20000173 Result: Down-regulated in Transcription
  misc_feature: MA Experiment 20000173 PARAMETER Experiment Name: At_42deg_Heat_P Parameter: Age (day) Value: 14
  misc_feature: MA Experiment 20000173 PARAMETER Experiment Name: At_42deg_Heat_P Parameter: Organism Value: A. thaliana
  misc_feature: MA Experiment 20000173 PARAMETER Experiment Name: At_42deg_Heat_P Parameter: Plant Line Value: WS
  misc_feature: MA Experiment 20000173 PARAMETER Experiment Name: At_42deg_Heat_P Parameter: Temperature (deg C) Value: 42 vs. 22
  misc_feature: MA Experiment 20000173 PARAMETER Experiment Name: At_42deg_Heat_P Parameter: Timepoint (hr) Value: 6
  misc_feature: MA Experiment 20000173 PARAMETER Experiment Name: At_42deg_Heat_P Parameter: Tissue Value: Aerial
  misc_feature: MA Experiment ID: 20000182 Result: Up-regulated in Transcription
  misc_feature: MA Experiment 20000182 PARAMETER Experiment Name: At_2mM_SA_P Parameter: Age (day) Value: 14
  misc_feature: MA Experiment 20000182 PARAMETER Experiment Name: At_2mM_SA_P Parameter: Organism Value: A. thaliana
  misc_feature: MA Experiment 20000182 PARAMETER Experiment Name: At_2mM_SA_P Parameter: Plant Line Value: WS
  misc_feature: MA Experiment 20000182 PARAMETER Experiment Name: At_2mM_SA_P Parameter: Timepoint (hr) Value: 6
  misc_feature: MA Experiment 20000182 PARAMETER Experiment Name: At_2mM_SA_P Parameter: Tissue Value: Aerial
  misc_feature: MA Experiment 20000182 PARAMETER Experiment Name: At_2mM_SA_P Parameter: Treatment Value: 2mM SA vs. No Treatment
  misc_feature: MA Experiment ID: 20000184 Result: Down-regulated in Transcription
  misc_feature: MA Experiment 20000184 PARAMETER Experiment Name: At_Shoots__P Parameter: Age (day) Value: 7
  misc_feature: MA Experiment 20000184 PARAMETER Experiment Name: At_Shoots__P Parameter: Tissue Value: Shoots vs. Whole Plant
  misc_feature: MA Experiment ID: 20000185 Result: Down-regulated in Transcription
  misc_feature: MA Experiment 20000185 PARAMETER Experiment Name: At_Roots__P Parameter: Age (day) Value: 7 vs. 21
  misc_feature: MA Experiment 20000185 PARAMETER Experiment Name: At_Roots__P Parameter: Organism Value: A. thaliana
  misc_feature: MA Experiment 20000185 PARAMETER Experiment Name: At_Roots__P Parameter: Tissue Value: Roots vs. Whole Plant
  misc_feature: MA Experiment ID: 20000234 Result: Down-regulated in Transcription
  misc_feature: MA Experiment 20000234 PARAMETER Experiment Name: At_Siliques_P Parameter: Age (day) Value: 21
  misc_feature: MA Experiment 20000234 PARAMETER Experiment Name: At_Siliques_P Parameter: Organism Value: A. thaliana
  misc_feature: MA Experiment 20000234 PARAMETER Experiment Name: At_Siliques_P Parameter: Plant Line Value: WS
  misc_feature: MA Experiment 20000234 PARAMETER Experiment Name: At_Siliques_P Parameter: Tissue Value: Less Than 5mm Siliques vs. Whole Plant
  misc_feature: MA Experiment ID: 20000264 Result: Down-regulated in Transcription
  misc_feature: MA Experiment 20000264 PARAMETER Experiment Name: At_Open_Flower_P Parameter: Age (day) Value: 21
  misc_feature: MA Experiment 20000264 PARAMETER Experiment Name: At_Open_Flower_P Parameter: Plant Line Value: WS
  misc_feature: MA Experiment 20000264 PARAMETER Experiment Name: At_Open_Flower_P Parameter: Tissue Value: Open Flower vs. Whole Plant
  misc_feature: MA Experiment ID: 20000265 Result: Down-regulated in Transcription
  misc_feature: MA Experiment 20000265 PARAMETER Experiment Name: At_Open_Flower_P Parameter: Age (day) Value: 21
  misc_feature: MA Experiment 20000265 PARAMETER Experiment Name: At_Open_Flower_P Parameter: Plant Line Value: WS
  misc_feature: MA Experiment 20000265 PARAMETER Experiment Name: At_Open_Flower_P Parameter: Tissue Value: Closed Flower vs. Whole Plant
  misc_feature: MA Experiment ID: 20000286 Result: Down-regulated in Transcription
  misc_feature: MA Experiment 20000286 PARAMETER Experiment Name: At_Open_Flower_P Parameter: Age (day) Value: 21
  misc_feature: MA Experiment 20000286 PARAMETER Experiment Name: At_Open_Flower_P Parameter: Plant Line Value: WS
  misc_feature: MA Experiment 20000286 PARAMETER Experiment Name: At_Open_Flower_P Parameter: Tissue Value: Half Open vs. Whole Plant
  misc_feature: MA Experiment ID: 20000438 Result: Down-regulated in Transcription
  misc_feature: MA Experiment 20000438 PARAMETER Experiment Name: At_Shoots__P Parameter: Age (day) Value: 14
  misc_feature: MA Experiment 20000438 PARAMETER Experiment Name: At_Shoots__P Parameter: Tissue Value: Shoots vs. Whole Plant
  misc_feature: MA Experiment ID: 20000439 Result: Down-regulated in Transcription
  misc_feature: MA Experiment 20000439 PARAMETER Experiment Name: At_Roots__P Parameter: Age (day) Value: 14 vs. 21
  misc_feature: MA Experiment 20000439 PARAMETER Experiment Name: At_Roots__P Parameter: Organism Value: A. thaliana
  misc_feature: MA Experiment 20000439 PARAMETER Experiment Name: At_Roots__P Parameter: Tissue Value: Roots vs. Whole Plant
  misc_feature: MA Experiment ID: 20000453 Result: Down-regulated in Transcription
  misc_feature: MA Experiment 20000453 PARAMETER Experiment Name: At_100uM_ABA_P Parameter: Age (day) Value: 15
  misc_feature: MA Experiment 20000453 PARAMETER Experiment Name: At_100uM_ABA_P Parameter: Organism Value: A. thaliana
  misc_feature: MA Experiment 20000453 PARAMETER Experiment Name: At_100uM_ABA_P Parameter: Plant Line Value: WS
  misc_feature: MA Experiment 20000453 PARAMETER Experiment Name: At_100uM_ABA_P Parameter: Timepoint (hr) Value: 24
  misc_feature: MA Experiment 20000453 PARAMETER Experiment Name: At_100uM_ABA_P Parameter: Tissue Value: Aerial
  misc_feature: MA Experiment 20000453 PARAMETER Experiment Name: At_100uM_ABA_P Parameter: Treatment Value: 100uM ABA vs. No Treatment
  misc_feature: MA Experiment ID: 20000455 Result: Down-regulated in Transcription
  misc_feature: MA Experiment 20000455 PARAMETER Experiment Name: At_100uM_ABA_P Parameter: Age (day) Value: 16
  misc_feature: MA Experiment 20000455 PARAMETER Experiment Name: At_100uM_ABA_P Parameter: Organism Value: A. thaliana
  misc_feature: MA Experiment 20000455 PARAMETER Experiment Name: At_100uM_ABA_P Parameter: Plant Line Value: WS
  misc_feature: MA Experiment 20000455 PARAMETER Experiment Name: At_100uM_ABA_P Parameter: Timepoint (hr) Value: 48
  misc_feature: MA Experiment 20000455 PARAMETER Experiment Name: At_100uM_ABA_P Parameter: Tissue Value: Aerial
  misc_feature: MA Experiment 20000455 PARAMETER Experiment Name: At_100uM_ABA_P Parameter: Treatment Value: 100uM ABA vs. No Treatment
  misc_feature: MA Experiment ID: 20000527 Result: Down-regulated in Transcription
  misc_feature: MA Experiment 20000527 PARAMETER Experiment Name: At_10percent_PEG_P Parameter: Age (day) Value: 20
  misc_feature: MA Experiment 20000527 PARAMETER Experiment Name: At_10percent_PEG_P Parameter: Organism Value: A. thaliana
  misc_feature: MA Experiment 20000527 PARAMETER Experiment Name: At_10percent_PEG_P Parameter: Plant Line Value: WS
  misc_feature: MA Experiment 20000527 PARAMETER Experiment Name: At_10percent_PEG_P Parameter: Timepoint (day) Value: 20
  misc_feature: MA Experiment 20000527 PARAMETER Experiment Name: At_10percent_PEG_P Parameter: Tissue Value: Whole Plant
  misc_feature: MA Experiment 20000527 PARAMETER Experiment Name: At_10percent_PEG_P Parameter: Treatment Value: 10percent PEG vs. No Treatment
  misc_feature: MA Experiment ID: 20000573 Result: Up-regulated in Transcription
  misc_feature: MA Experiment 20000573 PARAMETER Experiment Name: At_100uM_ABA_Mutants__P Parameter: Organism Value: A. thaliana
  misc_feature: MA Experiment 20000573 PARAMETER Experiment Name: At_100uM_ABA_Mutants__P Parameter: Plant Line Value: CS22 vs. Ler wt
  misc_feature: MA Experiment 20000573 PARAMETER Experiment Name: At_100uM_ABA_Mutants__P Parameter: Timepoint (hr) Value: N/A
  misc_feature: MA Experiment 20000573 PARAMETER Experiment Name: At_100uM_ABA_Mutants__P Parameter: Tissue Value: Whole Plant
  misc_feature: MA Experiment 20000573 PARAMETER Experiment Name: At_100uM_ABA_Mutants__P Parameter: Treatment Value: None
  misc_feature: MA Experiment ID: 20000574 Result: Up-regulated in Transcription
  misc_feature: MA Experiment 20000574 PARAMETER Experiment Name: At_100uM_ABA_Mutants__P Parameter: Organism Value: A. thaliana
  misc_feature: MA Experiment 20000574 PARAMETER Experiment Name: At_100uM_ABA_Mutants__P Parameter: Plant Line Value: CS23 vs. Ler wt
  misc_feature: MA Experiment 20000574 PARAMETER Experiment Name: At_100uM_ABA_Mutants__P Parameter: Timepoint (hr) Value: N/A
  misc_feature: MA Experiment 20000574 PARAMETER Experiment Name: At_100uM_ABA_Mutants__P Parameter: Tissue Value: Whole Plant
  misc_feature: MA Experiment 20000574 PARAMETER Experiment Name: At_100uM_ABA_Mutants__P Parameter: Treatment Value: None
  misc_feature: MA Experiment ID: 20000576 Result: Down-regulated in Transcription
  misc_feature: MA Experiment 20000576 PARAMETER Experiment Name: At_100uM_ABA_Mutants__P Parameter: Organism Value: A. thaliana
  misc_feature: MA Experiment 20000576 PARAMETER Experiment Name: At_100uM_ABA_Mutants__P Parameter: Plant Line Value: CS23
  misc_feature: MA Experiment 20000576 PARAMETER Experiment Name: At_100uM_ABA_Mutants__P Parameter: Timepoint (hr) Value: 6
  misc_feature: MA Experiment 20000576 PARAMETER Experiment Name: At_100uM_ABA_Mutants__P Parameter: Tissue Value: Whole Plant
  misc_feature: MA Experiment 20000576 PARAMETER Experiment Name: At_100uM_ABA_Mutants__P Parameter: Treatment Value: 1uM ABA vs. No Treatment
  misc_feature: MA Experiment ID: 20000606 Result: Up-regulated in Transcription
  misc_feature: MA Experiment 20000606 PARAMETER Experiment Name: At_CS8548_Mutant_P Parameter: Age (day) Value: 14
  misc_feature: MA Experiment 20000606 PARAMETER Experiment Name: At_CS8548_Mutant_P Parameter: Plant Line Value: CS8548 vs. wt
  misc_feature: MA Experiment 20000606 PARAMETER Experiment Name: At_CS8548_Mutant_P Parameter: Tissue Value: Whole Plant
  misc_feature: MA Experiment ID: 20000709 Result: Down-regulated in Transcription
  misc_feature: MA Experiment 20000709 PARAMETER Experiment Name: At_15mM_NH4NO3_L-to-H_P Parameter: Age (hr) Value: 14
  misc_feature: MA Experiment 20000709 PARAMETER Experiment Name: At_15mM_NH4NO3_L-to-H_P Parameter: Organism Value: A. thaliana
  misc_feature: MA Experiment 20000709 PARAMETER Experiment Name: At_15mM_NH4NO3_L-to-H_P Parameter: Plant Line Value: WS
  misc_feature: MA Experiment 20000709 PARAMETER Experiment Name: At_15mM_NH4NO3_L-to-H_P Parameter: Timepoint (hr) Value: 4
  misc_feature: MA Experiment 20000709 PARAMETER Experiment Name: At_15mM_NH4NO3_L-to-H_P Parameter: Tissue Value: Aerial
  misc_feature: MA Experiment 20000709 PARAMETER Experiment Name: At_15mM_NH4NO3_L-to-H_P Parameter: Treatment Value: 15mM NH4NO3 vs. 30mM Mannitol
  misc_feature: MA Experiment ID: 20000794 Result: Down-regulated in Transcription
  misc_feature: MA Experiment 20000794 PARAMETER Experiment Name: At_Petals_P Parameter: Age (day) Value: 23-25 days
  misc_feature: MA Experiment 20000794 PARAMETER Experiment Name: At_Petals_P Parameter: Plant Line Value: WS
  misc_feature: MA Experiment 20000794 PARAMETER Experiment Name: At_Petals_P Parameter: Tissue Value: Petals vs. Whole plant
  misc_feature: MA Experiment ID: 20001554 Result: Down-regulated in Transcription
  misc_feature: MA Experiment 20001554 PARAMETER Experiment Name: At_Drought_Soil_Dry_P Parameter: Age (day) Value: 21
  misc_feature: MA Experiment 20001554 PARAMETER Experiment Name: At_Drought_Soil_Dry_P Parameter: Organism Value: A. thaliana
  misc_feature: MA Experiment 20001554 PARAMETER Experiment Name: At_Drought_Soil_Dry_P Parameter: Plant Line Value: WS
  misc_feature: MA Experiment 20001554 PARAMETER Experiment Name: At_Drought_Soil_Dry_P Parameter: Post Timepoint (hr) Value: None
  misc_feature: MA Experiment 20001554 PARAMETER Experiment Name: At_Drought_Soil_Dry_P Parameter: Post-Treatment Value: None
  misc_feature: MA Experiment 20001554 PARAMETER Experiment Name: At_Drought_Soil_Dry_P Parameter: Timepoint (day) Value: 7
  misc_feature: MA Experiment 20001554 PARAMETER Experiment Name: At_Drought_Soil_Dry_P Parameter: Treatment Value: Drought vs. No Drought
  misc_feature: MA Experiment ID: 20001555 Result: Down-regulated in Transcription
  misc_feature: MA Experiment 20001555 PARAMETER Experiment Name: At_Drought_Soil_Dry_P Parameter: Age (day) Value: 24
  misc_feature: MA Experiment 20001555 PARAMETER Experiment Name: At_Drought_Soil_Dry_P Parameter: Organism Value: A. thaliana
  misc_feature: MA Experiment 20001555 PARAMETER Experiment Name: At_Drought_Soil_Dry_P Parameter: Plant Line Value: WS
  misc_feature: MA Experiment 20001555 PARAMETER Experiment Name: At_Drought_Soil_Dry_P Parameter: Post Timepoint (hr) Value: None
  misc_feature: MA Experiment 20001555 PARAMETER Experiment Name: At_Drought_Soil_Dry_P Parameter: Post-Treatment Value: None
  misc_feature: MA Experiment 20001555 PARAMETER Experiment Name: At_Drought_Soil_Dry_P Parameter: Timepoint (day) Value: 10
  misc_feature: MA Experiment 20001555 PARAMETER Experiment Name: At_Drought_Soil_Dry_P Parameter: Treatment Value: Drought vs. No Drought
  misc_feature: MA Experiment ID: 20001556 Result: Down-regulated in Transcription
  misc_feature: MA Experiment 20001556 PARAMETER Experiment Name: At_Drought_Soil_Dry_P Parameter: Age (day) Value: 26
  misc_feature: MA Experiment 20001556 PARAMETER Experiment Name: At_Drought_Soil_Dry_P Parameter: Organism Value: A. thaliana
  misc_feature: MA Experiment 20001556 PARAMETER Experiment Name: At_Drought_Soil_Dry_P Parameter: Plant Line Value: WS
  misc_feature: MA Experiment 20001556 PARAMETER Experiment Name: At_Drought_Soil_Dry_P Parameter: Post Timepoint (hr) Value: None
  misc_feature: MA Experiment 20001556 PARAMETER Experiment Name: At_Drought_Soil_Dry_P Parameter: Post-Treatment Value: None
  misc_feature: MA Experiment 20001556 PARAMETER Experiment Name: At_Drought_Soil_Dry_P Parameter: Timepoint (day) Value: 12
  misc_feature: MA Experiment 20001556 PARAMETER Experiment Name: At_Drought_Soil_Dry_P Parameter: Treatment Value: Drought vs. No Drought
  misc_feature: MA Experiment ID: 20001557 Result: Down-regulated in Transcription
  misc_feature: MA Experiment 20001557 PARAMETER Experiment Name: At_Drought_Soil_Dry_P Parameter: Age (day) Value: 27
  misc_feature: MA Experiment 20001557 PARAMETER Experiment Name: At_Drought_Soil_Dry_P Parameter: Organism Value: A. thaliana
  misc_feature: MA Experiment 20001557 PARAMETER Experiment Name: At_Drought_Soil_Dry_P Parameter: Plant Line Value: WS
  misc_feature: MA Experiment 20001557 PARAMETER Experiment Name: At_Drought_Soil_Dry_P Parameter: Post Timepoint (hr) Value: 3
  misc_feature: MA Experiment 20001557 PARAMETER Experiment Name: At_Drought_Soil_Dry_P Parameter: Post-Treatment Value: Re-Water vs. No Drought
  misc_feature: MA Experiment 20001557 PARAMETER Experiment Name: At_Drought_Soil_Dry_P Parameter: Timepoint (day) Value: 13
  misc_feature: MA Experiment 20001557 PARAMETER Experiment Name: At_Drought_Soil_Dry_P Parameter: Treatment Value: Drought vs. No Drought
  misc_feature: MA Experiment ID: 20001558 Result: Down-regulated in Transcription
  misc_feature: MA Experiment 20001558 PARAMETER Experiment Name: At_Drought_Soil_Dry_P Parameter: Age (day) Value: 27
  misc_feature: MA Experiment 20001558 PARAMETER Experiment Name: At_Drought_Soil_Dry_P Parameter: Organism Value: A. thaliana
  misc_feature: MA Experiment 20001558 PARAMETER Experiment Name: At_Drought_Soil_Dry_P Parameter: Plant Line Value: WS
  misc_feature: MA Experiment 20001558 PARAMETER Experiment Name: At_Drought_Soil_Dry_P Parameter: Post Timepoint (hr) Value: 6
  misc_feature: MA Experiment 20001558 PARAMETER Experiment Name: At_Drought_Soil_Dry_P Parameter: Post-Treatment Value: Re-Water vs. No Drought
  misc_feature: MA Experiment 20001558 PARAMETER Experiment Name: At_Drought_Soil_Dry_P Parameter: Timepoint (day) Value: 13
  misc_feature: MA Experiment 20001558 PARAMETER Experiment Name: At_Drought_Soil_Dry_P Parameter: Treatment Value: Drought vs. No Drought
  misc_feature: MA Experiment ID: 20001560 Result: Down-regulated in Transcription
  misc_feature: MA Experiment 20001560 PARAMETER Experiment Name: At_Drought_Soil_Dry_P Parameter: Age (day) Value: 28
  misc_feature: MA Experiment 20001560 PARAMETER Experiment Name: At_Drought_Soil_Dry_P Parameter: Organism Value: A. thaliana
  misc_feature: MA Experiment 20001560 PARAMETER Experiment Name: At_Drought_Soil_Dry_P Parameter: Plant Line Value: WS
  misc_feature: MA Experiment 20001560 PARAMETER Experiment Name: At_Drought_Soil_Dry_P Parameter: Post Timepoint (hr) Value: None
  misc_feature: MA Experiment 20001560 PARAMETER Experiment Name: At_Drought_Soil_Dry_P Parameter: Post-Treatment Value: None
  misc_feature: MA Experiment 20001560 PARAMETER Experiment Name: At_Drought_Soil_Dry_P Parameter: Timepoint (day) Value: 14
  misc_feature: MA Experiment 20001560 PARAMETER Experiment Name: At_Drought_Soil_Dry_P Parameter: Treatment Value: Drought vs. No Drought
  misc_feature: MA Experiment ID: 20001773 Result: Down-regulated in Transcription
  misc_feature: MA Experiment 20001773 PARAMETER Experiment Name: At_Far-red-enriched-adult_P Parameter: Age (day) Value: 30
  misc_feature: MA Experiment 20001773 PARAMETER Experiment Name: At_Far-red-enriched-adult_P Parameter: Light Value: Far-red enriched vs. White
  misc_feature: MA Experiment 20001773 PARAMETER Experiment Name: At_Far-red-enriched-adult_P Parameter: Organism Value: A. thaliana
  misc_feature: MA Experiment 20001773 PARAMETER Experiment Name: At_Far-red-enriched-adult_P Parameter: Plant Line Value: Columbia
  misc_feature: MA Experiment 20001773 PARAMETER Experiment Name: At_Far-red-enriched-adult_P Parameter: Timepoint (hr) Value: 48
  misc_feature: MA Experiment 20001773 PARAMETER Experiment Name: At_Far-red-enriched-adult_P Parameter: Tissue Value: Aerial
  misc_feature: MA Experiment ID: 20001904 Result: Down-regulated in Transcription
  misc_feature: MA Experiment 20001904 PARAMETER Experiment Name: At_Drought_Reproduction_P Parameter: Age (day) Value: 37
  misc_feature: MA Experiment 20001904 PARAMETER Experiment Name: At_Drought_Reproduction_P Parameter: Organism Value: A. thaliana
  misc_feature: MA Experiment 20001904 PARAMETER Experiment Name: At_Drought_Reproduction_P Parameter: Plant Line Value: WS
  misc_feature: MA Experiment 20001904 PARAMETER Experiment Name: At_Drought_Reproduction_P Parameter: Timepoint (day) Value: 7
  misc_feature: MA Experiment 20001904 PARAMETER Experiment Name: At_Drought_Reproduction_P Parameter: Tissue Value: Rosettes
  misc_feature: MA Experiment 20001904 PARAMETER Experiment Name: At_Drought_Reproduction_P Parameter: Treatment Value: Drought vs. No Drought
  misc_feature: MA Experiment ID: 20001905 Result: Down-regulated in Transcription
  misc_feature: MA Experiment 20001905 PARAMETER Experiment Name: At_Drought_Reproduction_P Parameter: Age (day) Value: 40
  misc_feature: MA Experiment 20001905 PARAMETER Experiment Name: At_Drought_Reproduction_P Parameter: Organism Value: A. thaliana
  misc_feature: MA Experiment 20001905 PARAMETER Experiment Name: At_Drought_Reproduction_P Parameter: Plant Line Value: WS
  misc_feature: MA Experiment 20001905 PARAMETER Experiment Name: At_Drought_Reproduction_P Parameter: Timepoint (day) Value: 10
  misc_feature: MA Experiment 20001905 PARAMETER Experiment Name: At_Drought_Reproduction_P Parameter: Tissue Value: Rosettes
  misc_feature: MA Experiment 20001905 PARAMETER Experiment Name: At_Drought_Reproduction_P Parameter: Treatment Value: Drought vs. No Drought
atcatcatcacccacagcacagagacacacacaaaaaacccataaaaaaatatggcaaatatctccagtattcacattctcttcctcgtgttcatcacaagcggcattgctgttatggccacagacttcactctaaggaacaattgccctaccaccgtctgggccggaactctcgccggtcaaggacccaagctcggcgatggaggatttgaattgactccaggtgcttcccgacagctcacggctcctgcaggatggtcaggccggttctgggctcgtacaggctgcaactttgacgcctccggaaacggtagatgtgtaaccggagactgtggcggtctaagatgtaacggcggcggagttcctcccgtcactctggctgaattcactctagtaggcgatggcggcaaagatttctacgatgtgagcctcgtagatggttacaatgtcaagctggggataagaccatccggaggatcgggagattgcaaatacgcaggctgtgtctctgacctcaacgcggcttgccccgacatgcttaaggtcatggatcagaacaatgtcgtggcctgcaagagtgcctgtgagaggtttaatacggatcaatattgctgccgtggagctaacgataagccggaaacttgtcctcccacggactactcgaggattttcaagaacgcttgccctgacgcctatagctacgcttatgacgacgaaacgagcaccttcacttgtaccggagctaactacgaaatcactttctgcccttaaaaaccgaagcttcgagttagatacagtcgggtttaattatctctcacgtttcttttgcttattatgtacggaaagataaataaggaaagctgatgactatgaatcatcgtcttccacttttaagcttttttagtgagtattagtcagttgttacactcagctgatttgtttac

SEQ ID NO: 43814 - protein, 239 aa, Arabidopsis thaliana
  peptide (1)..(239): Ceres Seq. ID no. 13575245
  misc_feature (30)..(239): Pfam Name: Thaumatin family Pfam Description: Thaumatin family
  misc_feature (10)..(239): Homolog of NCBI NO: 1729981 NR Description: Thaumatin-like protein precursor
  misc_feature (20)..(239): Homolog of NCBI NO: 20330768 NR Description: Putative thaumatin-like protein
  misc_feature (10)..(239): Homolog of NCBI NO: 25091401 NR Description: Thaumatin-like protein 1 precursor
  misc_feature (1)..(238): Homolog of NCBI NO: 28973703 NR Description: putative pathogenesis-related protein 5 precursor
  misc_feature (1)..(238): Homolog of NCBI NO: 30686314 NR Description: thaumatin family [Arabidopsis thaliana]
  misc_feature (21)..(239): Homolog of NCBI NO: 6273385 NR Description: SCUTL2 [Vitis vinifera]
  misc_feature (1)..(239): Homolog of NCBI NO: 2435406 NR Description: thaumatin-like protein [Arabidopsis thaliana]
  misc_feature (1)..(239): Homolog of NCBI NO: 15222088 NR Description: thaumatin-like protein [Arabidopsis thaliana]
  misc_feature (1)..(239): Homolog of NCBI NO: 15222090 NR Description: thaumatin-like protein (pathogenesis-related
  misc_feature (1)..(239): Homolog of NCBI NO: 15222089 NR Description: pathogenesis-related protein 5 (PR-5)
MANISSIHILFLVFITSGIAVMATDFTLRNNCPTTVWAGTLAGQGPKLGDGGFELTPGASRQLTAPAGWSGRFWARTGCNFDASGNGRCVTGDCGGLRCNGGGVPPVTLAEFTLVGDGGKDFYDVSLVDGYNVKLGIRPSGGSGDCKYAGCVSDLNAACPDMLKVMDQNNVVACKSACERFNTDQYCCRGANDKPETCPPTDYSRIFKNACPDAYSYAYDDETSTFTCTGANYEITFCP

SEQ ID NO: 43815 - protein, 218 aa, Arabidopsis thaliana
  peptide (1)..(218): Ceres Seq. ID no. 13575246
  misc_feature (9)..(218): Pfam Name: Thaumatin family Pfam Description: Thaumatin family
  misc_feature (1)..(218): Homolog of NCBI NO: 1729981 NR Description: Thaumatin-like protein precursor
  misc_feature (1)..(218): Homolog of NCBI NO: 20330768 NR Description: Putative thaumatin-like protein
  misc_feature (1)..(218): Homolog of NCBI NO: 25091401 NR Description: Thaumatin-like protein 1 precursor
  misc_feature (1)..(217): Homolog of NCBI NO: 28973703 NR Description: putative pathogenesis-related protein 5 precursor
  misc_feature (1)..(217): Homolog of NCBI NO: 30686314 NR Description: thaumatin family [Arabidopsis thaliana]
  misc_feature (1)..(218): Homolog of NCBI NO: 6273385 NR Description: SCUTL2 [Vitis vinifera]
  misc_feature (1)..(218): Homolog of NCBI NO: 2435406 NR Description: thaumatin-like protein [Arabidopsis thaliana]
  misc_feature (1)..(218): Homolog of NCBI NO: 15222088 NR Description: thaumatin-like protein [Arabidopsis thaliana]
  misc_feature (1)..(218): Homolog of NCBI NO: 15222090 NR Description: thaumatin-like protein (pathogenesis-related
  misc_feature (1)..(218): Homolog of NCBI NO: 15222089 NR Description: pathogenesis-related protein 5 (PR-5)
MATDFTLRNNCPTTVWAGTLAGQGPKLGDGGFELTPGASRQLTAPAGWSGRFWARTGCNFDASGNGRCVTGDCGGLRCNGGGVPPVTLAEFTLVGDGGKDFYDVSLVDGYNVKLGIRPSGGSGDCKYAGCVSDLNAACPDMLKVMDQNNVVACKSACERFNTDQYCCRGANDKPETCPPTDYSRIFKNACPDAYSYAYDDETSTFTCTGANYEITFCP

SEQ ID NO: 43816 - DNA, 1211 bp, Arabidopsis thaliana
  misc_feature (1)..(1211): Ceres Seq. ID no. 13576059
  misc_feature: MA Experiment ID: 20000307 Result: Up-regulated in Transcription
  misc_feature: MA Experiment 20000307 PARAMETER Experiment Name: At_Germinating_Seeds_Sub_P Parameter: Age (hr) Value: 24 vs. 0
  misc_feature: MA Experiment 20000307 PARAMETER Experiment Name: At_Germinating_Seeds_Sub_P Parameter: Organism Value: A. thaliana
  misc_feature: MA Experiment 20000307 PARAMETER Experiment Name: At_Germinating_Seeds_Sub_P Parameter: Plant Line Value: WS
  misc_feature: MA Experiment 20000307 PARAMETER Experiment Name: At_Germinating_Seeds_Sub_P Parameter: Tissue Value: Germinating Seeds
  misc_feature: MA Experiment ID: 20000328 Result: Up-regulated in Transcription
  misc_feature: MA Experiment 20000328 PARAMETER Experiment Name: At_42deg_Heat_Sub_P Parameter: Age (day) Value: 14
  misc_feature: MA Experiment 20000328 PARAMETER Experiment Name: At_42deg_Heat_Sub_P Parameter: Organism Value: A. thaliana
  misc_feature: MA Experiment 20000328 PARAMETER Experiment Name: At_42deg_Heat_Sub_P Parameter: Plant Line Value: WS
  misc_feature: MA Experiment 20000328 PARAMETER Experiment Name: At_42deg_Heat_Sub_P Parameter: Temperature (deg C) Value: 42 vs. 22
  misc_feature: MA Experiment 20000328 PARAMETER Experiment Name: At_42deg_Heat_Sub_P Parameter: Timepoint (hr) Value: 6
  misc_feature: MA Experiment 20000328 PARAMETER Experiment Name: At_42deg_Heat_Sub_P Parameter: Tissue Value: Aerial
  misc_feature: MA Experiment ID: 20000355 Result: Down-regulated in Transcription
  misc_feature: MA Experiment 20000355 PARAMETER Experiment Name: At_Siliques_Sub_P Parameter: Age (day) Value: 21
  misc_feature: MA Experiment 20000355 PARAMETER Experiment Name: At_Siliques_Sub_P Parameter: Organism Value: A. thaliana
  misc_feature: MA Experiment 20000355 PARAMETER Experiment Name: At_Siliques_Sub_P Parameter: Plant Line Value: WS
  misc_feature: MA Experiment 20000355 PARAMETER Experiment Name: At_Siliques_Sub_P Parameter: Tissue Value: Less Than 5mm Siliques vs. Whole Plant
  misc_feature: MA Experiment ID: 20000440 Result: Down-regulated in Transcription
  misc_feature: MA Experiment 20000440 PARAMETER Experiment Name: At_Closed-Flower__Sub_P Parameter: Tissue Value: Closed Flower vs. Whole Plant
  misc_feature: MA Experiment ID: 20001807 Result: Up-regulated in Transcription
  misc_feature: MA Experiment 20001807 PARAMETER Experiment Name: At_50mM_NH4NO3_L-to-H_Sub_P Parameter: Timepoint (hr) Value: 6
  misc_feature: MA Experiment 20001807 PARAMETER Experiment Name: At_50mM_NH4NO3_L-to-H_Sub_P Parameter: Tissue Value: Leaf
  misc_feature: MA Experiment 20001807 PARAMETER Experiment Name: At_50mM_NH4NO3_L-to-H_Sub_P Parameter: Treatment Value: 50mM NH4NO3 vs 100mM Mannitol
acccacatcttctaacagtctctcactttctctcttctctctctctctttcttttttgagtccgtgaaggctaagtctgaaagaatgacgaaggatgagttgacggaggaagagtcgctctccggcaaggactacttagacccaccgcctgtgaagacgttcgaggtgagagagctcaagaagtggtccttctacagagctgtcatcgctgagttcatagctactttgctctttctatacgtgactgttttgacagtcatcggctttaagagccagactgatatcaacgccggcggcggagcttgtgccagtgtcggcctcctaggcatctcttgggcctttggtggcatgatattcatcctcgtctactgcactgccggcatctctggtggacacatcaatcccgcggtgacgtttgggctattcctagctagcaaggtatcattggttagagctgtgtcgtacatggtggctcagtgtctcggagccacttgtggagttggtttggtgaaagtcttccagtcgacttattacaaccgctacggtggtggagccaacatgctctccgacggatacaatgttggcgttggggttggtgctgagattatcggcacttttgtcctcgtctacaccgtcttctccgctaccgaccctaagcgaaatgcccgtgactctcacattcctgtattagcaccattgccaattggattttccgtgttcatggttcatttagccacaattccaattactggcaccggaataaacccggctaggagttttggagctgccgtcatctacaacaatcaaaaggcttgggatgatcagtggatcttctgggtcggtccatttgtgggtgcagccattgcagcattttaccatcagtttgtgttgagagctggtgcaatgaaggcctatgggtcagtcaggagccagcttcatgagctccatgcttaaatttgttatttcgaactagcgaagaggtgaagaattctttgggccaggaagggaggaaggaaaaaaaaaagggacccaaatcatataaaagaaaaaacgaatattatttaagatggtcggtgagtgacatttactgtgtcttatttgtggctttgtgggggaggtttgtgtgtaacaatttgtaacgtacaagcaatgtatgtgttatttgatgcatatgatatttatatatctacttattgatgattctatctttg

SEQ ID NO: 43817 - protein, 289 aa, Arabidopsis thaliana
  peptide (1)..(289): Ceres Seq. ID no. 13576060
  misc_feature (30)..(265): Pfam Name: Major intrinsic protein Pfam Description: Major intrinsic protein
  misc_feature (30)..(265): Pfam Name: Major intrinsic protein Pfam Description: Major intrinsic protein
  misc_feature (30)..(265): Pfam Name: Major intrinsic protein Pfam Description: Major intrinsic protein
  misc_feature (1)..(282): Homolog of NCBI NO: 5081423 NR Description: plasma membrane intrinsic protein 2 [Brassica
  misc_feature (1)..(282): Homolog of NCBI NO: 15228095 NR Description: plasma membrane intrinsic protein 2B, putative
  misc_feature (1)..(285): Homolog of NCBI NO: 28395420 NR Description: plasma intrinsic protein 2,2 [Juglans regia]
  misc_feature (1)..(285): Homolog of NCBI NO: 13486942 NR Description: plasma membrane intrinsic protein 2-2 [Pyrus
  misc_feature (1)..(285): Homolog of NCBI NO: 15233102 NR Description: plasma membrane aquaporin, putative [Arabidopsis
  misc_feature (1)..(282): Homolog of NCBI NO: 5081423 NR Description: plasma membrane intrinsic protein 2 [Brassica
  misc_feature (1)..(285): Homolog of NCBI NO: 28395420 NR Description: plasma intrinsic protein 2,2 [Juglans regia]
  misc_feature (1)..(285): Homolog of NCBI NO: 15233102 NR Description: plasma membrane aquaporin, putative [Arabidopsis
  misc_feature (1)..(285): Homolog of NCBI NO: 13486942 NR Description: plasma membrane intrinsic protein 2-2 [Pyrus
  misc_feature (1)..(285): Homolog of NCBI NO: 28395420 NR Description: plasma intrinsic protein 2,2 [Juglans regia]
  misc_feature (1)..(282): Homolog of NCBI NO: 15228095 NR Description: plasma membrane intrinsic protein 2B, putative
  misc_feature (1)..(282): Homolog of NCBI NO: 5081423 NR Description: plasma membrane intrinsic protein 2 [Brassica
  misc_feature (1)..(289): Homolog of NCBI NO: 15224999 NR Description: major intrinsic protein aquaporin, putative
  misc_feature (1)..(282): Homolog of NCBI NO: 3158476 NR Description: aquaporin 2 [Samanea saman]
  misc_feature (1)..(282): Homolog of NCBI NO: 8071620 NR Description: putative aquaporin PIP2-1 [Vitis berlandieri x
  misc_feature (1)..(282): Homolog of NCBI NO: 7441275 NR Description: mipC protein - common ice plant
  misc_feature (1)..(282): Homolog of NCBI NO: 7441251 NR Description: plasma membrane intrinsic protein 1 - soybean
  misc_feature (1)..(289): Homolog of NCBI NO: 15224999 NR Description: major intrinsic protein aquaporin, putative
  misc_feature (1)..(282): Homolog of NCBI NO: 3158476 NR Description: aquaporin 2 [Samanea saman]
  misc_feature (1)..(282): Homolog of NCBI NO: 8071620 NR Description: putative aquaporin PIP2-1 [Vitis berlandieri x
  misc_feature (1)..(282): Homolog of NCBI NO: 7441275 NR Description: mipC protein - common ice plant
  misc_feature (1)..(282): Homolog of NCBI NO: 7441251 NR Description: plasma membrane intrinsic protein 1 - soybean
  misc_feature (1)..(285): Homolog of NCBI NO: 15233102 NR Description: plasma membrane aquaporin, putative [Arabidopsis
  misc_feature (1)..(285): Homolog of NCBI NO: 13486942 NR Description: plasma membrane intrinsic protein 2-2 [Pyrus
  misc_feature (1)..(282): Homolog of NCBI NO: 15228095 NR Description: plasma membrane intrinsic protein 2B, putative
  misc_feature (1)..(282): Homolog of NCBI NO: 7441251 NR Description: plasma membrane intrinsic protein 1 - soybean
  misc_feature (1)..(282): Homolog of NCBI NO: 7441275 NR Description: mipC protein - common ice plant
  misc_feature (1)..(282): Homolog of NCBI NO: 8071620 NR Description: putative aquaporin PIP2-1 [Vitis berlandieri x
  misc_feature (1)..(282): Homolog of NCBI NO: 3158476 NR Description: aquaporin 2 [Samanea saman]
  misc_feature (1)..(289): Homolog of NCBI NO: 15224999 NR Description: major intrinsic protein aquaporin, putative
MTKDELTEEESLSGKDYLDPPPVKTFEVRELKKWSFYRAVIAEFIATLLFLYVTVLTVIGFKSQTDINAGGGACASVGLLGISWAFGGMIFILVYCTAGISGGHINPAVTFGLFLASKVSLVRAVSYMVAQCLGATCGVGLVKVFQSTYYNRYGGGANMLSDGYNVGVGVGAEIIGTFVLVYTVFSATDPKRNARDSHIPVLAPLPIGFSVFMVHLATIPITGTGINPARSFGAAVIYNNQKAWDDQWIFWVGPFVGAAIAAFYHQFVLRAGAMKAYGSVRSQLHELHA

SEQ ID NO: 43818 - protein, 201 aa, Arabidopsis thaliana
  peptide (1)..(201): Ceres Seq. ID no. 13576061
  misc_feature (1)..(177): Pfam Name: Major intrinsic protein Pfam Description: Major intrinsic protein
  misc_feature (1)..(177): Pfam Name: Major intrinsic protein Pfam Description: Major intrinsic protein
  misc_feature (1)..(177): Pfam Name: Major intrinsic protein Pfam Description: Major intrinsic protein
  misc_feature (1)..(194): Homolog of NCBI NO: 5081423 NR Description: plasma membrane intrinsic protein 2 [Brassica
  misc_feature (1)..(194): Homolog of NCBI NO: 15228095 NR Description: plasma membrane intrinsic protein 2B, putative
  misc_feature (1)..(197): Homolog of NCBI NO: 28395420 NR Description: plasma intrinsic protein 2,2 [Juglans regia]
  misc_feature (1)..(197): Homolog of NCBI NO: 13486942 NR Description: plasma membrane intrinsic protein 2-2 [Pyrus
  misc_feature (1)..(197): Homolog of NCBI NO: 15233102 NR Description: plasma membrane aquaporin, putative [Arabidopsis
  misc_feature (1)..(194): Homolog of NCBI NO: 5081423 NR Description: plasma membrane intrinsic protein 2 [Brassica
  misc_feature (1)..(197): Homolog of NCBI NO: 28395420 NR Description: plasma intrinsic protein 2,2 [Juglans regia]
  misc_feature (1)..(197): Homolog of NCBI NO: 15233102 NR Description: plasma membrane aquaporin, putative [Arabidopsis
  misc_feature (1)..(197): Homolog of NCBI NO: 13486942 NR Description: plasma membrane intrinsic protein 2-2 [Pyrus
  misc_feature (1)..(197): Homolog of NCBI NO: 28395420 NR Description: plasma intrinsic protein 2,2 [Juglans regia]
  misc_feature (1)..(194): Homolog of NCBI NO: 15228095 NR Description: plasma membrane intrinsic protein 2B, putative
  misc_feature (1)..(194): Homolog of NCBI NO: 5081423 NR Description: plasma membrane intrinsic protein 2 [Brassica
  misc_feature (1)..(201): Homolog of NCBI NO: 15224999 NR Description: major intrinsic protein aquaporin, putative
  misc_feature (1)..(194): Homolog of NCBI NO: 3158476 NR Description: aquaporin 2 [Samanea saman]
  misc_feature (1)..(194): Homolog of NCBI NO: 8071620 NR Description: putative aquaporin PIP2-1 [Vitis berlandieri x
  misc_feature (1)..(194): Homolog of NCBI NO: 7441275 NR Description: mipC protein - common ice plant
  misc_feature (1)..(194): Homolog of NCBI NO: 7441251 NR Description: plasma membrane intrinsic protein 1 - soybean
  misc_feature (1)..(201): Homolog of NCBI NO: 15224999 NR Description: major intrinsic protein aquaporin, putative
  misc_feature (1)..(194): Homolog of NCBI NO: 3158476 NR Description: aquaporin 2 [Samanea saman]
  misc_feature (1)..(194): Homolog of NCBI NO: 8071620 NR Description: putative aquaporin PIP2-1 [Vitis berlandieri x
  misc_feature (1)..(194): Homolog of NCBI NO: 7441275 NR Description: mipC protein - common ice plant
  misc_feature (1)..(194): Homolog of NCBI NO: 7441251 NR Description: plasma membrane intrinsic protein 1 - soybean
  misc_feature (1)..(197): Homolog of NCBI NO: 15233102 NR Description: plasma membrane aquaporin, putative [Arabidopsis
  misc_feature (1)..(197): Homolog of NCBI NO: 13486942 NR Description: plasma membrane intrinsic protein 2-2 [Pyrus
  misc_feature (1)..(194): Homolog of NCBI NO: 15228095 NR Description: plasma membrane intrinsic protein 2B, putative
  misc_feature (1)..(194): Homolog of NCBI NO: 7441251 NR Description: plasma membrane intrinsic protein 1 - soybean
  misc_feature (1)..(194): Homolog of NCBI NO: 7441275 NR Description: mipC protein - common ice plant
  misc_feature (1)..(194): Homolog of NCBI NO: 8071620 NR Description: putative aquaporin PIP2-1 [Vitis berlandieri x
  misc_feature (1)..(194): Homolog of NCBI NO: 3158476 NR Description: aquaporin 2 [Samanea saman]
  misc_feature (1)..(201): Homolog of NCBI NO: 15224999 NR Description: major intrinsic protein aquaporin, putative
MIFILVYCTAGISGGHINPAVTFGLFLASKVSLVRAVSYMVAQCLGATCGVGLVKVFQSTYYNRYGGGANMLSDGYNVGVGVGAEIIGTFVLVYTVFSATDPKRNARDSHIPVLAPLPIGFSVFMVHLATIPITGTGINPARSFGAAVIYNNQKAWDDQWIFWVGPFVGAAIAAFYHQFVLRAGAMKAYGSVRSQLHELHA

SEQ ID NO: 43819 - protein, 162 aa, Arabidopsis thaliana
  peptide (1)..(162): Ceres Seq. ID no. 13576062
  misc_feature (1)..(138): Pfam Name: Major intrinsic protein Pfam Description: Major intrinsic protein
  misc_feature (1)..(138): Pfam Name: Major intrinsic protein Pfam Description: Major intrinsic protein
  misc_feature (1)..(138): Pfam Name: Major intrinsic protein Pfam Description: Major intrinsic protein
  misc_feature (1)..(155): Homolog of NCBI NO: 5081423 NR Description: plasma membrane intrinsic protein 2 [Brassica
  misc_feature (1)..(155): Homolog of NCBI NO: 15228095 NR Description: plasma membrane intrinsic protein 2B, putative
  misc_feature (1)..(158): Homolog of NCBI NO: 28395420 NR Description: plasma intrinsic protein 2,2 [Juglans regia]
  misc_feature (1)..(158): Homolog of NCBI NO: 13486942 NR Description: plasma membrane intrinsic protein 2-2 [Pyrus
  misc_feature (1)..(158): Homolog of NCBI NO: 15233102 NR Description: plasma membrane aquaporin, putative [Arabidopsis
  misc_feature (1)..(155): Homolog of NCBI NO: 5081423 NR Description: plasma membrane intrinsic protein 2 [Brassica
  misc_feature (1)..(158): Homolog of NCBI NO: 28395420 NR Description: plasma intrinsic protein 2,2 [Juglans regia]
  misc_feature (1)..(158): Homolog of NCBI NO: 15233102 NR Description: plasma membrane aquaporin, putative [Arabidopsis
  misc_feature (1)..(158): Homolog of NCBI NO: 13486942 NR Description: plasma membrane intrinsic protein 2-2 [Pyrus
  misc_feature (1)..(158): Homolog of NCBI NO: 28395420 NR Description: plasma intrinsic protein 2,2 [Juglans regia]
  misc_feature (1)..(155): Homolog of NCBI NO: 15228095 NR Description: plasma membrane intrinsic protein 2B, putative
  misc_feature (1)..(155): Homolog of NCBI NO: 5081423 NR Description: plasma membrane intrinsic protein 2 [Brassica
  misc_feature (1)..(162): Homolog of NCBI NO: 15224999 NR Description: major intrinsic protein aquaporin, putative
  misc_feature (1)..(155): Homolog of NCBI NO: 3158476 NR Description: aquaporin 2 [Samanea saman]
  misc_feature (1)..(155): Homolog of NCBI NO: 8071620 NR Description: putative aquaporin PIP2-1 [Vitis berlandieri x
  misc_feature (1)..(155): Homolog of NCBI NO: 7441275 NR Description: mipC protein - common ice plant
  misc_feature (1)..(155): Homolog of NCBI NO: 7441251 NR Description: plasma membrane intrinsic protein 1 - soybean
  misc_feature (1)..(162): Homolog of NCBI NO: 15224999 NR Description: major intrinsic protein aquaporin, putative
  misc_feature (1)..(155): Homolog of NCBI NO: 3158476 NR Description: aquaporin 2 [Samanea saman]
  misc_feature (1)..(155): Homolog of NCBI NO: 8071620 NR Description: putative aquaporin PIP2-1 [Vitis berlandieri x
  misc_feature (1)..(155): Homolog of NCBI NO: 7441275 NR Description: mipC protein - common ice plant
  misc_feature (1)..(155): Homolog of NCBI NO: 7441251 NR Description: plasma membrane intrinsic protein 1 - soybean
  misc_feature (1)..(158): Homolog of NCBI NO: 15233102 NR Description: plasma membrane aquaporin, putative [Arabidopsis
  misc_feature (1)..(158): Homolog of NCBI NO: 13486942 NR Description: plasma membrane intrinsic protein 2-2 [Pyrus
  misc_feature (1)..(155): Homolog of NCBI NO: 15228095 NR Description: plasma membrane intrinsic protein 2B, putative
  misc_feature (1)..(155): Homolog of NCBI NO: 7441251 NR Description: plasma membrane intrinsic protein 1 - soybean
  misc_feature (1)..(155): Homolog of NCBI NO: 7441275 NR Description: mipC protein - common ice plant
  misc_feature (1)..(155): Homolog of NCBI NO: 8071620 NR Description: putative aquaporin PIP2-1 [Vitis berlandieri x
  misc_feature (1)..(155): Homolog of NCBI NO: 3158476 NR Description: aquaporin 2 [Samanea saman]
  misc_feature (1)..(162): Homolog of NCBI NO: 15224999 NR Description: major intrinsic protein aquaporin, putative
MVAQCLGATCGVGLVKVFQSTYYNRYGGGANMLSDGYNVGVGVGAEIIGTFVLVYTVFSATDPKRNARDSHIPVLAPLPIGFSVFMVHLATIPITGTGINPARSFGAAVIYNNQKAWDDQWIFWVGPFVGAAIAAFYHQFVLRAGAMKAYGSVRSQLHELHA

SEQ ID NO: 43820 - DNA, 800 bp, Arabidopsis thaliana
  misc_feature (1)..(800): Ceres Seq. ID no. 12559583
  misc_feature: MA Experiment ID: 108577 Result: Up-regulated in Transcription
  misc_feature: MA Experiment 108577 PARAMETER Experiment Name: At_42deg_Heat_cDNA_P Parameter: Temperature (deg C) Value: 42 vs. 22
  misc_feature: MA Experiment 108577 PARAMETER Experiment Name: At_42deg_Heat_cDNA_P Parameter: Timepoint (hr) Value: 6
  misc_feature: MA Experiment 108577 PARAMETER Experiment Name: At_42deg_Heat_cDNA_P Parameter: Tissue Value: Aerial
  misc_feature: MA Experiment ID: 20000112 Result: Up-regulated in Transcription
  misc_feature: MA Experiment 20000112 PARAMETER Experiment Name: At_42deg_Heat_cDNA_P Parameter: Temperature (deg C) Value: 42 vs. 22
  misc_feature: MA Experiment 20000112 PARAMETER Experiment Name: At_42deg_Heat_cDNA_P Parameter: Timepoint (hr) Value: 2
  misc_feature: MA Experiment 20000112 PARAMETER Experiment Name: At_42deg_Heat_cDNA_P Parameter: Tissue Value: Aerial
  misc_feature: MA Experiment ID: 20000113 Result: Up-regulated in Transcription
  misc_feature: MA Experiment 20000113 PARAMETER Experiment Name: At_42deg_Heat_cDNA_P Parameter: Temperature (deg C) Value: 42 vs. 22
  misc_feature: MA Experiment 20000113 PARAMETER Experiment Name: At_42deg_Heat_cDNA_P Parameter: Timepoint (hr) Value: 8
  misc_feature: MA Experiment 20000113 PARAMETER Experiment Name: At_42deg_Heat_cDNA_P Parameter: Tissue Value: Aerial
  misc_feature: MA Experiment ID: 20000224 Result: Down-regulated in Transcription
  misc_feature: MA Experiment ID: 20001560 Result: Down-regulated in Transcription
  misc_feature: MA Experiment 20001560 PARAMETER Experiment Name: At_Drought_Soil_Dry_P Parameter: Age (day) Value: 28
  misc_feature: MA Experiment 20001560 PARAMETER Experiment Name: At_Drought_Soil_Dry_P Parameter: Organism Value: A. thaliana
  misc_feature: MA Experiment 20001560 PARAMETER Experiment Name: At_Drought_Soil_Dry_P Parameter: Plant Line Value: WS
  misc_feature: MA Experiment 20001560 PARAMETER Experiment Name: At_Drought_Soil_Dry_P Parameter: Post Timepoint (hr) Value: None
  misc_feature: MA Experiment 20001560 PARAMETER Experiment Name: At_Drought_Soil_Dry_P Parameter: Post-Treatment Value: None
  misc_feature: MA Experiment 20001560 PARAMETER Experiment Name: At_Drought_Soil_Dry_P Parameter: Timepoint (day) Value: 14
  misc_feature: MA Experiment 20001560 PARAMETER Experiment Name: At_Drought_Soil_Dry_P Parameter: Treatment Value: Drought vs. No Drought
tcgtcgctgcgtctctctcccgcaaccttcgattttcgtttattcgcatccatcggagagagaaaacaatcaataagcgaccatgttggtgtaccaagatcttctcaccggtgatgagcttctgtctgactctttcccttacaaggagattgagaatggaatcctctgggaagtagaaggaaagtgggttactgtgggagctgtagatgttaacattggtgccaatccatctgctgaagaaggtggtgaggatgaaggtgttaatgactctgctcaaaaggttgttgacattgtcaacaccttcagacttcaggagcaaccaacttatgacaagaagggattcatcgcttacattaagaaatacattaagcttttgacacccaagctcagcgaagaagatcaagctgtcttcaagaagggtattgagggagctaccaagtttttgctccccagctcagtgacttccaattctttgttggggagggtatgcatgatgacagcactttggtctttgcttactacaaggagggttcaactaacccaacatttttgtacttcgctcatggtttgaaggaggtcaagtgctganananaagctctcgttgggttactgtggtcggtcgcagcgactctctaagtttatgtttctttatattgtcctgtgtttcgtcgtcgtcccctattaaaattacctgccagtttacttttctctcttcttgttttctgtgttggaagattctcaagttatttattccgcaaaaaacggtttatcatttacaattagttgaattttggtcgtt

SEQ ID NO: 43821 - protein, 162 aa, Arabidopsis thaliana
  peptide (1)..(162): Ceres Seq. ID no. 12559584
  misc_feature (1)..(123): Pfam Name: Translationally controlled tumour protein Pfam Description: Translationally controlled tumour protein
  misc_feature (1)..(122): Homolog of NCBI NO: 549063 NR Description: Translationally controlled tumor protein homolog
  misc_feature (1)..(122): Homolog of NCBI NO: 2507443 NR Description: Translationally controlled tumor protein homolog
  misc_feature (1)..(122): Homolog of NCBI NO: 1174626 NR Description: TRANSLATIONALLY CONTROLLED TUMOR PROTEIN HOMOLOG
  misc_feature (1)..(122): Homolog of NCBI NO: 9979196 NR Description: Translationally controlled tumor protein homolog
  misc_feature (1)..(123): Homolog of NCBI NO: 20140684 NR Description: Translationally controlled tumor protein homolog
  misc_feature (1)..(123): Homolog of NCBI NO: 15228276 NR Description: translationally controlled tumor protein-like
  misc_feature (1)..(123): Homolog of NCBI NO: 21595816 NR Description: translationally controlled tumor protein-like
MLVYQDLLTGDELLSDSFPYKEIENGILWEVEGKWVTVGAVDVNIGANPSAEEGGEDEGVNDSAQKVVDIVNTFRLQEQPTYDKKGFIAYIKKYIKLLTPKLSEEDQAVFKKGIEGATKFLLPSSVTSNSLLGRVCMMTALWSLLTTRRVQLTQHFCTSLMV

SEQ ID NO: 43822 - DNA, 1681 bp, Arabidopsis thaliana
  misc_feature (1)..(1681): Ceres Seq. ID no. 13591915
  misc_feature: MA Experiment ID: 20000445 Result: Up-regulated in Transcription
  misc_feature: MA Experiment 20000445 PARAMETER Experiment Name: At_100uM_NAA__P Parameter: Age (day) Value: 14
  misc_feature: MA Experiment 20000445 PARAMETER Experiment Name: At_100uM_NAA__P Parameter: Organism Value: A. thaliana
  misc_feature: MA Experiment 20000445 PARAMETER Experiment Name: At_100uM_NAA__P Parameter: Plant Line Value: WS
  misc_feature: MA Experiment 20000445 PARAMETER Experiment Name: At_100uM_NAA__P Parameter: Timepoint (hr) Value: 6
  misc_feature: MA Experiment 20000445 PARAMETER Experiment Name: At_100uM_NAA__P Parameter: Tissue Value: Aerial
  misc_feature: MA Experiment 20000445 PARAMETER Experiment Name: At_100uM_NAA__P Parameter: Treatment Value: 100uM NAA vs. No Treatment
aactaactacttttgcattcaccatcgctcttacgtttgaatctatccagatccaaagctcttcttcttcccggcatttctgagatctcattttcaccggcgacgagctttaatcggagaacgatgaagcagcttcacaagcaaatgagctcgaagcgtgatgaagaaaccattcccatgagccaatccagtccttactctcccaaaactttaaagcatcccagatctcttcccagatcgcttcactatctctttcgtgaacaacgactcctctttatcctcgtcgggatcttgatcggatccactttcttcatcctccagccttctctctctcgtttaggcgccgctgagtccacctcgttaatcaccagatctgtttcctacgccgtcaccgattccccgccttccaggtcgacttttaattccggaggcggcggaggtagaaccggtcgtgttcccgtcggtatcggacggaagagactgaggattgttgtcaccggtggagctggtttcgtcggtagtcatcttgttgataagcttatcggtaggggagatgaagtgatcgtgattgataacttcttcactggtaggaaggagaatttggttcatctattctcgaatcctaggtttgagctaattcgacacgatgttgttgagccaatcctccttgaggtcgatcagatttaccatttagcttgtccagcttcacctgttcattacaagtataatccagtcaagactatcaagacaaatgtaatgggcactctcaatatgttgggtcttgcaaagagagttggggcaaggtttctgctcaccagcacaagtgaagtctatggagatccccttgagcatccacagaaagagacttactggggaaacgtgaatccaatcggtgagaggagttgctatgatgaaggaaagcgtactgcagaaaccctggccatggattatcaccgaggtgcaggtgtggaggttagaattgctcgtattttcaacacatatgggcccagaatgtgccttgatgatgggcgtgttgttagtaactttgttgcccagaccattcgcaaacacccaatgactgtttatggtgatggaaaacagactcgtagctttcaatatgtttctgacttggtggagggacttgtagctttaatggaaaacgatcatgtaggacccttcaaccttggtaaccctggagaattcacaatgcttgaacttgcagaggtggttaaggaggtgatcgacccaagcgcgaccatagagttcaaaccaaacacagcagacgatcctcacaagaggaaaccagacataagcaaagcaaaggaacagttgaactgggaaccaaagatatctctgagggagggactgcctcgcatggttagtgacttccgtaaccgaatcttaaacgaagacgaaggtaaaggtctctaagtcagtcacacagagatatagagtataatccttcttctgctttgatttgatatatgtatagtctctttttcaagagctctgctaagtctttttgttctctctgttttttctttttggttctatctccaagacacagattactacttatattagctaatgtttttgacttgggattttgtcattgggccattcaccactaggctcaatattagtggaaaggtattgatataaaatttcgctcggttcatac

SEQ ID NO: 43823 - protein, 435 aa, Arabidopsis thaliana
  peptide (1)..(435): Ceres Seq. ID no. 13591916
  misc_feature (122)..(426): Pfam Name: NAD dependent epimerase/dehydratase family Pfam Description: NAD dependent epimerase/dehydratase family
  misc_feature (122)..(426): Pfam Name: NAD dependent epimerase/dehydratase family Pfam Description: NAD dependent epimerase/dehydratase family
  misc_feature (6)..(167): Homolog of NCBI NO: 34908082 NR Description: P0506B12.30 [Oryza sativa (japonica
  misc_feature (209)..(429): Homolog of NCBI NO: 34908082 NR Description: P0506B12.30 [Oryza sativa (japonica
  misc_feature (7)..(431): Homolog of NCBI NO: 15227109 NR Description: NAD-dependent epimerase/dehydratase family
  misc_feature (6)..(429): Homolog of NCBI NO: 25396402 NR Description: UDP-glucuronic acid decarboxylase
  misc_feature (7)..(432): Homolog of NCBI NO: 2129578 NR Description: dTDP-glucose 4-6-dehydratase homolog D18 -
  misc_feature (6)..(167): Homolog of NCBI NO: 34908082 NR Description: P0506B12.30 [Oryza sativa (japonica
  misc_feature (7)..(431): Homolog of NCBI NO: 15227109 NR Description: NAD-dependent epimerase/dehydratase family
  misc_feature (7)..(432): Homolog of NCBI NO: 2129578 NR Description: dTDP-glucose 4-6-dehydratase homolog D18 -
  misc_feature (1)..(435): Homolog of NCBI NO: 17473549 NR Description: dTDP-glucose 4-6-dehydratase-like protein
  misc_feature (1)..(435): Homolog of NCBI NO: 11270116 NR Description: dTDP-glucose 4-6-dehydratase-like protein -
  misc_feature (1)..(435): Homolog of NCBI NO: 30693847 NR Description: NAD-dependent epimerase/dehydratase family
  misc_feature (1)..(337): Homolog of NCBI NO: 30693844 NR Description: NAD-dependent epimerase/dehydratase family
  misc_feature (7)..(432): Homolog of NCBI NO: 15229334 NR Description: NAD-dependent epimerase/dehydratase family
  misc_feature (6)..(429): Homolog of NCBI NO: 25396402 NR Description: UDP-glucuronic acid decarboxylase
  misc_feature (209)..(429): Homolog of NCBI NO: 34908082 NR Description: P0506B12.30 [Oryza sativa (japonica
  misc_feature (7)..(432): Homolog of NCBI NO: 15229334 NR Description: NAD-dependent epimerase/dehydratase family
  misc_feature (1)..(337): Homolog of NCBI NO: 30693844 NR Description: NAD-dependent epimerase/dehydratase family
  misc_feature (1)..(435): Homolog of NCBI NO: 30693847 NR Description: NAD-dependent epimerase/dehydratase family
  misc_feature (1)..(435): Homolog of NCBI NO: 11270116 NR Description: dTDP-glucose 4-6-dehydratase-like protein -
  misc_feature (1)..(435): Homolog of NCBI NO: 17473549 NR Description: dTDP-glucose 4-6-dehydratase-like protein
MKQLHKQMSSKRDEETIPMSQSSPYSPKTLKHPRSLPRSLHYLFREQRLLFILVGILIGSTFFILQPSLSRLGAAESTSLITRSVSYAVTDSPPSRSTFNSGGGGGRTGRVPVGIGRKRLRIVVTGGAGFVGSHLVDKLIGRGDEVIVIDNFFTGRKENLVHLFSNPRFELIRHDVVEPILLEVDQIYHLACPASPVHYKYNPVKTIKTNVMGTLNMLGLAKRVGARFLLTSTSEVYGDPLEHPQKETYWGNVNPIGERSCYDEGKRTAETLAMDYHRGAGVEVRIARIFNTYGPRMCLDDGRVVSNFVAQTIRKHPMTVYGDGKQTRSFQYVSDLVEGLVALMENDHVGPFNLGNPGEFTMLELAEVVKEVIDPSATIEFKPNTADDPHKRKPDISKAKEQLNWEPKISLREGLPRMVSDFRNRILNEDEGKGL

SEQ ID NO: 43824 - protein, 428 aa, Arabidopsis thaliana
  peptide (1)..(428): Ceres Seq. ID no. 13591917
  misc_feature (115)..(419): Pfam Name: NAD dependent epimerase/dehydratase family Pfam Description: NAD dependent epimerase/dehydratase family
  misc_feature (115)..(419): Pfam Name: NAD dependent epimerase/dehydratase family Pfam Description: NAD dependent epimerase/dehydratase family
  misc_feature (1)..(160): Homolog of NCBI NO: 34908082 NR Description: P0506B12.30 [Oryza sativa (japonica
  misc_feature (202)..(422): Homolog of NCBI NO: 34908082 NR Description: P0506B12.30 [Oryza sativa (japonica
  misc_feature (1)..(424): Homolog of NCBI NO: 15227109 NR Description: NAD-dependent epimerase/dehydratase family
  misc_feature (1)..(422): Homolog of NCBI NO: 25396402 NR Description: UDP-glucuronic acid decarboxylase
  misc_feature (1)..(425): Homolog of NCBI NO: 2129578 NR Description: dTDP-glucose 4-6-dehydratase homolog D18 -
  misc_feature (1)..(160): Homolog of NCBI NO: 34908082 NR Description: P0506B12.30 [Oryza sativa (japonica
  misc_feature (1)..(424): Homolog of NCBI NO: 15227109 NR Description: NAD-dependent epimerase/dehydratase family
  misc_feature (1)..(425): Homolog of NCBI NO: 2129578 NR Description: dTDP-glucose 4-6-dehydratase homolog D18 -
  misc_feature (1)..(428): Homolog of NCBI NO: 17473549 NR Description: dTDP-glucose 4-6-dehydratase-like protein
  misc_feature (1)..(428): Homolog of NCBI NO: 11270116 NR Description: dTDP-glucose 4-6-dehydratase-like protein -
  misc_feature (1)..(428): Homolog of NCBI NO: 30693847 NR Description: NAD-dependent epimerase/dehydratase family
  misc_feature (1)..(330): Homolog of NCBI NO: 30693844 NR Description: NAD-dependent epimerase/dehydratase family
  misc_feature (1)..(425): Homolog of NCBI NO: 15229334 NR Description: NAD-dependent epimerase/dehydratase family
  misc_feature (1)..(422): Homolog of NCBI NO: 25396402 NR Description: UDP-glucuronic acid decarboxylase
  misc_feature (202)..(422): Homolog of NCBI NO: 34908082 NR Description: P0506B12.30 [Oryza sativa (japonica
  misc_feature (1)..(425): Homolog of NCBI NO: 15229334 NR Description: NAD-dependent epimerase/dehydratase family
  misc_feature (1)..(330): Homolog of NCBI NO: 30693844 NR Description: NAD-dependent epimerase/dehydratase family
  misc_feature (1)..(428): Homolog of NCBI NO: 30693847 NR Description: NAD-dependent epimerase/dehydratase family
  misc_feature (1)..(428): Homolog of NCBI NO: 11270116 NR Description: dTDP-glucose 4-6-dehydratase-like protein -
  misc_feature (1)..(428): Homolog of NCBI NO: 17473549 NR Description: dTDP-glucose 4-6-dehydratase-like protein
MSSKRDEETIPMSQSSPYSPKTLKHPRSLPRSLHYLFREQRLLFILVGILIGSTFFILQPSLSRLGAAESTSLITRSVSYAVTDSPPSRSTFNSGGGGGRTGRVPVGIGRKRLRIVVTGGAGFVGSHLVDKLIGRGDEVIVIDNFFTGRKENLVHLFSNPRFELIRHDVVEPILLEVDQIYHLACPASPVHYKYNPVKTIKTNVMGTLNMLGLAKRVGARFLLTSTSEVYGDPLEHPQKETYWGNVNPIGERSCYDEGKRTAETLAMDYHRGAGVEVRIARIFNTYGPRMCLDDGRVVSNFVAQTIRKHPMTVYGDGKQTRSFQYVSDLVEGLVALMENDHVGPFNLGNPGEFTMLELAEVVKEVIDPSATIEFKPNTADDPHKRKPDISKAKEQLNWEPKISLREGLPRMVSDFRNRILNEDEGKGL

SEQ ID NO: 43825 - protein, 417 aa, Arabidopsis thaliana
  peptide (1)..(417): Ceres Seq. ID no. 13591918
  misc_feature (104)..(408): Pfam Name: NAD dependent epimerase/dehydratase family Pfam Description: NAD dependent epimerase/dehydratase family
  misc_feature (104)..(408): Pfam Name: NAD dependent epimerase/dehydratase family Pfam Description: NAD dependent epimerase/dehydratase family
  misc_feature (1)..(149): Homolog of NCBI NO: 34908082 NR Description: P0506B12.30 [Oryza sativa (japonica
  misc_feature (191)..(411): Homolog of NCBI NO: 34908082 NR Description: P0506B12.30 [Oryza sativa (japonica
  misc_feature (1)..(413): Homolog of NCBI NO: 15227109 NR Description: NAD-dependent epimerase/dehydratase family
  misc_feature (1)..(411): Homolog of NCBI NO: 25396402 NR Description: UDP-glucuronic acid decarboxylase
  misc_feature (1)..(414): Homolog of NCBI NO: 2129578 NR Description: dTDP-glucose 4-6-dehydratase homolog D18 -
  misc_feature (1)..(149): Homolog of NCBI NO: 34908082 NR Description: P0506B12.30 [Oryza sativa (japonica
  misc_feature (1)..(413): Homolog of NCBI NO: 15227109 NR Description: NAD-dependent epimerase/dehydratase family
  misc_feature (1)..(414): Homolog of NCBI NO: 2129578 NR Description: dTDP-glucose 4-6-dehydratase homolog D18 -
  misc_feature (1)..(417): Homolog of NCBI NO: 17473549 NR Description: dTDP-glucose 4-6-dehydratase-like protein
  misc_feature (1)..(417): Homolog of NCBI NO: 11270116 NR Description: dTDP-glucose 4-6-dehydratase-like protein -
  misc_feature (1)..(417): Homolog of NCBI NO: 30693847 NR Description: NAD-dependent epimerase/dehydratase family
  misc_feature (1)..(319): Homolog of NCBI NO: 30693844 NR Description: NAD-dependent epimerase/dehydratase family
  misc_feature (1)..(414): Homolog of NCBI NO: 15229334 NR Description: NAD-dependent epimerase/dehydratase family
  misc_feature (1)..(411): Homolog of NCBI NO: 25396402 NR Description: UDP-glucuronic acid decarboxylase
  misc_feature (191)..(411): Homolog of NCBI NO: 34908082 NR Description: P0506B12.30 [Oryza sativa (japonica
  misc_feature (1)..(414): Homolog of NCBI NO: 15229334 NR Description: NAD-dependent epimerase/dehydratase family
  misc_feature (1)..(319): Homolog of NCBI NO: 30693844 NR Description: NAD-dependent epimerase/dehydratase family
  misc_feature (1)..(417): Homolog of NCBI NO: 30693847 NR Description: NAD-dependent epimerase/dehydratase family
  misc_feature (1)..(417): Homolog of NCBI NO: 11270116 NR Description: dTDP-glucose 4-6-dehydratase-like protein -
  misc_feature (1)..(417): Homolog of NCBI NO: 17473549 NR Description: dTDP-glucose 4-6-dehydratase-like protein
MSQSSPYSPKTLKHPRSLPRSLHYLFREQRLLFILVGILIGSTFFILQPSLSRLGAAESTSLITRSVSYAVTDSPPSRSTFNSGGGGGRTGRVPVGIGRKRLRIVVTGGAGFVGSHLVDKLIGRGDEVIVIDNFFTGRKENLVHLFSNPRFELIRHDVVEPILLEVDQIYHLACPASPVHYKYNPVKTIKTNVMGTLNMLGLAKRVGARFLLTSTSEVYGDPLEHPQKETYWGNVNPIGERSCYDEGKRTAETLAMDYHRGAGVEVRIARIFNTYGPRMCLDDGRVVSNFVAQTIRKHPMTVYGDGKQTRSFQYVSDLVEGLVALMENDHVGPFNLGNPGEFTMLELAEVVKEVIDPSATIEFKPNTADDPHKRKPDISKAKEQLNWEPKISLREGLPRMVSDFRNRILNEDEGKGL

SEQ ID NO: 43826 - DNA, 2262 bp, Arabidopsis thaliana
  misc_feature (1)..(2262): Ceres Seq. ID no. 12558781
  misc_feature: MA Experiment ID: 20000185 Result: Down-regulated in Transcription
  misc_feature: MA Experiment 20000185 PARAMETER Experiment Name: At_Roots__P Parameter: Age (day) Value: 7 vs. 21
  misc_feature: MA Experiment 20000185 PARAMETER Experiment Name: At_Roots__P Parameter: Organism Value: A. thaliana
  misc_feature: MA Experiment 20000185 PARAMETER Experiment Name: At_Roots__P Parameter: Tissue Value: Roots vs. Whole Plant
  misc_feature: MA Experiment ID: 20000227 Result: Up-regulated in Transcription
  misc_feature: MA Experiment 20000227 PARAMETER Experiment Name: At_Root-Tips-vs-Tops_P Parameter: Tissue Value: Root Tips vs. Root Tops
  misc_feature: MA Experiment ID: 20000437 Result: Down-regulated in Transcription
  misc_feature: MA Experiment 20000437 PARAMETER Experiment Name: At_Drought_P Parameter: Age (day) Value: 8
  misc_feature: MA Experiment 20000437 PARAMETER Experiment Name: At_Drought_P Parameter: Organism Value: A. thaliana
  misc_feature: MA Experiment 20000437 PARAMETER Experiment Name: At_Drought_P Parameter: Plant Line Value: WS
  misc_feature: MA Experiment 20000437 PARAMETER Experiment Name: At_Drought_P Parameter: Timepoint (hr) Value: 24
  misc_feature: MA Experiment 20000437 PARAMETER Experiment Name: At_Drought_P Parameter: Tissue Value: Whole Plant
  misc_feature: MA Experiment 20000437 PARAMETER Experiment Name: At_Drought_P Parameter: Treatment Value: Drought vs. No Drought
  misc_feature: MA Experiment ID: 20000439 Result: Down-regulated in Transcription
  misc_feature: MA Experiment 20000439 PARAMETER Experiment Name: At_Roots__P Parameter: Age (day) Value: 14 vs. 21
  misc_feature: MA Experiment 20000439 PARAMETER Experiment Name: At_Roots__P Parameter: Organism Value: A. thaliana
  misc_feature: MA Experiment 20000439 PARAMETER Experiment Name: At_Roots__P Parameter: Tissue Value: Roots vs. Whole Plant
  misc_feature: MA Experiment ID: 20001247 Result: Down-regulated in Transcription
  misc_feature: MA Experiment 20001247 PARAMETER Experiment Name: At_Far-red-induction_P Parameter: Age (day) Value: 7
  misc_feature: MA Experiment 20001247 PARAMETER Experiment Name: At_Far-red-induction_P Parameter: Light Value: Far-red vs. White
  misc_feature: MA Experiment 20001247 PARAMETER Experiment Name: At_Far-red-induction_P Parameter: Organism Value: A. thaliana
  misc_feature: MA Experiment 20001247 PARAMETER Experiment Name: At_Far-red-induction_P Parameter: Plant Line Value: Columbia
  misc_feature: MA Experiment 20001247 PARAMETER Experiment Name: At_Far-red-induction_P Parameter: Timepoint (hr) Value: 1
  misc_feature: MA Experiment 20001247 PARAMETER Experiment Name: At_Far-red-induction_P Parameter: Tissue Value: Whole Plant
  misc_feature: MA Experiment ID: 20001450 Result: Down-regulated in Transcription
  misc_feature: MA Experiment 20001450 PARAMETER Experiment Name: At_Far-red-induction_P Parameter: Age (day) Value: 7
  misc_feature: MA Experiment 20001450 PARAMETER Experiment Name: At_Far-red-induction_P Parameter: Light Value: Far-red vs. White
  misc_feature: MA Experiment 20001450 PARAMETER Experiment Name: At_Far-red-induction_P Parameter: Organism Value: A. thaliana
  misc_feature: MA Experiment 20001450 PARAMETER Experiment Name: At_Far-red-induction_P Parameter: Plant Line Value: Columbia
  misc_feature: MA Experiment 20001450 PARAMETER Experiment Name: At_Far-red-induction_P Parameter: Timepoint (hr) Value: 8
  misc_feature: MA Experiment 20001450 PARAMETER Experiment Name: At_Far-red-induction_P Parameter: Tissue Value: Whole Plant
  misc_feature: MA Experiment ID: 20001556 Result: Up-regulated in Transcription
  misc_feature: MA Experiment 20001556 PARAMETER Experiment Name: At_Drought_Soil_Dry_P Parameter: Age (day) Value: 26
  misc_feature: MA Experiment 20001556 PARAMETER Experiment Name: At_Drought_Soil_Dry_P Parameter: Organism Value: A. thaliana
  misc_feature: MA Experiment 20001556 PARAMETER Experiment Name: At_Drought_Soil_Dry_P Parameter: Plant Line Value: WS
  misc_feature: MA Experiment 20001556 PARAMETER Experiment Name: At_Drought_Soil_Dry_P Parameter: Post Timepoint (hr) Value: None
  misc_feature: MA Experiment 20001556 PARAMETER Experiment Name: At_Drought_Soil_Dry_P Parameter: Post-Treatment Value: None
  misc_feature: MA Experiment 20001556 PARAMETER Experiment Name: At_Drought_Soil_Dry_P Parameter: Timepoint (day) Value: 12
  misc_feature: MA Experiment 20001556 PARAMETER Experiment Name: At_Drought_Soil_Dry_P Parameter: Treatment Value: Drought vs. No Drought
aactgtggatgagtctctctaaaaccttggcttccttcgacttcttctgttttctccggcaatgtcgttaaaactcaacactccttttccaattttcgcgccatctctatttcctaatcataacccaagagcacccagcgagatccgattctctagatggggcaacgctaatgccgaacggttcgagcagcgtcgccggagccaagaagaactcgaggctgagatccgtcgggaccgccgattcgacgccgctactaaaatcgtccatacccatgattccgaagcagcagctgctgagcctaaaacgtcaccgtttagatcaagaggcactccttcacttccctctgctcgttcgattccgggtcgaagatccaaatactccaaacccgattcaggacccaatagacccaagaacaaacctagagtacccgattcgccgccgcaactagacgctaagcctgaggttaagctaagcgaagatggattaacttacgtcatcaatggagctcctttcgaattcaagtacagttacacggagacgccaaaggttaagcctttgaagcttcgtgagcctgcttacgcgccttttggacctacgactatgggaaggccatggactggtcgtgctccgcttcctcagtcgcagaagacgccgagagaattcgattcttttcgattgcctcctgtggggaagaaagggctgaagccggtgcagaaaccgggtccttttcgacccggggtaggtccaaggtatgtttactccaaggaggagattttaggagagccattgacaaaggaagaggtcagagagctggttacttcttgcttgaagacaacaaggcaattgaatatgggcagagatggtttgacgcataacatgttgaacaacatacatgatctatggaagcggcgaagggtttgtaagattaaatgcaaaggagtttgtacagtcgatatggataatgtttgcgagcagttagaggagaaaattggtgggaaggtgatatatagaagaggaggtgtgcttttcctattccgtggcagaaactataaccacaggacaagaccgcggttccctcttatgttgtggaagcctgtagcacctgtttatccaaggctaattcaacaagtgcctgagggtttaactcgtcaggaagctaccaatatgcggaggaaaggacgagagctcatgcccatttgcaagctagggaagaatggtgtgtattgtgatcttgtgaaaaatgttaaagaagcatttgaagtttgtgaattggttcggatcgattgtcaagggatgaaaggcagtgattttaggaaaatcggtgccaaactcaaggatcttgttccatgtgtgctcgtatcttttgaaaacgagcagattcttatctggagaggacgagaatggaaatcgtctctcacaactccagataaaaagggtgatatccttgaagatatcgaagttgatactgccttgccagaagatgacgaaccatcggtgtcaccaaatcagagtcaaactatgacccagaaccctcctctggattctatggaactgcaaaatgatccagatggtcacgatttgagcccttcaactgtagattcctcggaaatggaaggcacaatcaattctttacagagctggtctacaaaagatgtaactgagccaacggtagatagttttcttcgagaccttgaagaacctgaagacgaaccagaaacatcggaagagatcagcaaacaaagcatagagagagttctgattttgatgaaacaagctgtggagagcgggactgcacttgtgttagatgctgctgatctggacgcagacacagtcttttcaaaagctgttgccttttcgagtgtagcttcaccaggaccagttttccagcatggcttgagaaaacaaccaacggttaagaagcaggaaagccaagaattcgggtacggagacttggaggcaaaatcaagtaatgtagtggtttctaggaatgcttccaaatcaagtaatgttgtggtttttgggaaaagagaagttgcagagaggggggaaagagaggagaaggaggagggatcgaagaagaaaatggacgagtttgctgaagattacagagaagtgatgccgcatggaacattgaaggtagatgaactagctaaactacttgcataatgaaattttgtgtatgtatttgttgactagtgtataatgtagtctaatcatcattgtcaaaagtgtaatagctttttagaaattggaaaagttat

SEQ ID NO: 43827 - protein, 701 aa, Arabidopsis thaliana
  peptide (1)..(701): Ceres Seq. ID no. 12558782
  misc_feature (243)..(326): Pfam Name: CRS1 / YhbY domain Pfam Description: CRS1 / YhbY domain
  misc_feature (84)..(553): Homolog of NCBI NO: 34894714 NR Description: P0426D06.23 [Oryza sativa (japonica
  misc_feature (86)..(496): Homolog of NCBI NO: 40253285 NR Description: putative CRS2-associated factor 1
  misc_feature (71)..(455): Homolog of NCBI NO: 30349369 NR Description: CRS2-associated factor 2 [Zea mays]
  misc_feature (82)..(491): Homolog of NCBI NO: 22329751 NR Description: unknown protein
  misc_feature (1)..(307): Homolog of NCBI NO: 25411954 NR Description: hypothetical protein At2g20020 [imported] -
  misc_feature (102)..(538): Homolog of NCBI NO: 30349367 NR Description: CRS2-associated factor 1 [Zea mays]
  misc_feature (655)..(701): Homolog of NCBI NO: 34905354 NR Description: OJ1126_G08.1 [Oryza sativa (japonica
  misc_feature (383)..(460): Homolog of NCBI NO: 34905354 NR Description: OJ1126_G08.1 [Oryza sativa (japonica
  misc_feature (115)..(387): Homolog of NCBI NO: 34905354 NR Description: OJ1126_G08.1 [Oryza sativa (japonica
  misc_feature (328)..(701): Homolog of NCBI NO: 25411954 NR Description: hypothetical protein At2g20020 [imported] -
MSLKLNTPFPIFAPSLFPNHNPRAPSEIRFSRWGNANAERFEQRRRSQEELEAEIRRDRRFDAATKIVHTHDSEAAAAEPKTSPFRSRGTPSLPSARSIPGRRSKYSKPDSGPNRPKNKPRVPDSPPQLDAKPEVKLSEDGLTYVINGAPFEFKYSYTETPKVKPLKLREPAYAPFGPTTMGRPWTGRAPLPQSQKTPREFDSFRLPPVGKKGLKPVQKPGPFRPGVGPRYVYSKEEILGEPLTKEEVRELVTSCLKTTRQLNMGRDGLTHNMLNNIHDLWKRRRVCKIKCKGVCTVDMDNVCEQLEEKIGGKVIYRRGGVLFLFRGRNYNHRTRPRFPLMLWKPVAPVYPRLIQQVPEGLTRQEATNMRRKGRELMPICKLGKNGVYCDLVKNVKEAFEVCELVRIDCQGMKGSDFRKIGAKLKDLVPCVLVSFENEQILIWRGREWKSSLTTPDKKGDILEDIEVDTALPEDDEPSVSPNQSQTMTQNPPLDSMELQNDPDGHDLSPSTVDSSEMEGTINSLQSWSTKDVTEPTVDSFLRDLEEPEDEPETSEEISKQSIERVLILMKQAVESGTALVLDAADLDADTVFSKAVAFSSVASPGPVFQHGLRKQPTVKKQESQEFGYGDLEAKSSNVVVSRNASKSSNVVVFGKREVAERGEREEKEEGSKKKMDEFAEDYREVMPHGTLKVDELAKLLA

SEQ ID NO: 43828 - protein, 521 aa, Arabidopsis thaliana
  peptide (1)..(521): Ceres Seq. ID no. 12558783
  misc_feature (63)..(146): Pfam Name: CRS1 / YhbY domain Pfam Description: CRS1 / YhbY domain
  misc_feature (1)..(373): Homolog of NCBI NO: 34894714 NR Description: P0426D06.23 [Oryza sativa (japonica
  misc_feature (1)..(316): Homolog of NCBI NO: 40253285 NR Description: putative CRS2-associated factor 1
  misc_feature (1)..(275): Homolog of NCBI NO: 30349369 NR Description: CRS2-associated factor 2 [Zea mays]
  misc_feature (1)..(311): Homolog of NCBI NO: 22329751 NR Description: unknown protein
  misc_feature (1)..(127): Homolog of NCBI NO: 25411954 NR Description: hypothetical protein At2g20020 [imported] -
  misc_feature (1)..(358): Homolog of NCBI NO: 30349367 NR Description: CRS2-associated factor 1 [Zea mays]
  misc_feature (475)..(521): Homolog of NCBI NO: 34905354 NR Description: OJ1126_G08.1 [Oryza sativa (japonica
  misc_feature (203)..(280): Homolog of NCBI NO: 34905354 NR Description: OJ1126_G08.1 [Oryza sativa (japonica
  misc_feature (1)..(207): Homolog of NCBI NO: 34905354 NR Description: OJ1126_G08.1 [Oryza sativa (japonica
  misc_feature (148)..(521): Homolog of NCBI NO: 25411954 NR Description: hypothetical protein At2g20020 [imported] -
MGRPWTGRAPLPQSQKTPREFDSFRLPPVGKKGLKPVQKPGPFRPGVGPRYVYSKEEILGEPLTKEEVRELVTSCLKTTRQLNMGRDGLTHNMLNNIHDLWKRRRVCKIKCKGVCTVDMDNVCEQLEEKIGGKVIYRRGGVLFLFRGRNYNHRTRPRFPLMLWKPVAPVYPRLIQQVPEGLTRQEATNMRRKGRELMPICKLGKNGVYCDLVKNVKEAFEVCELVRIDCQGMKGSDFRKIGAKLKDLVPCVLVSFENEQILIWRGREWKSSLTTPDKKGDILEDIEVDTALPEDDEPSVSPNQSQTMTQNPPLDSMELQNDPDGHDLSPSTVDSSEMEGTINSLQSWSTKDVTEPTVDSFLRDLEEPEDEPETSEEISKQSIERVLILMKQAVESGTALVLDAADLDADTVFSKAVAFSSVASPGPVFQHGLRKQPTVKKQESQEFGYGDLEAKSSNVVVSRNASKSSNVVVFGKREVAERGEREEKEEGSKKKMDEFAEDYREVMPHGTLKVDELAKLLA

SEQ ID NO: 43829 - protein, 438 aa, Arabidopsis thaliana
  peptide (1)..(438): Ceres Seq. ID no. 12558784
  misc_feature (1)..(63): Pfam Name: CRS1 / YhbY domain Pfam Description: CRS1 / YhbY domain
  misc_feature (1)..(290): Homolog of NCBI NO: 34894714 NR Description: P0426D06.23 [Oryza sativa (japonica
  misc_feature (1)..(233): Homolog of NCBI NO: 40253285 NR Description: putative CRS2-associated factor 1
  misc_feature (1)..(192): Homolog of NCBI NO: 30349369 NR Description: CRS2-associated factor 2 [Zea mays]
  misc_feature (1)..(228): Homolog of NCBI NO: 22329751 NR Description: unknown protein
  misc_feature (1)..(44): Homolog of NCBI NO: 25411954 NR Description: hypothetical protein At2g20020 [imported] -
  misc_feature (1)..(275): Homolog of NCBI NO: 30349367 NR Description: CRS2-associated factor 1 [Zea mays]
  misc_feature (392)..(438): Homolog of NCBI NO: 34905354 NR Description: OJ1126_G08.1 [Oryza sativa (japonica
  misc_feature (120)..(197): Homolog of NCBI NO: 34905354 NR Description: OJ1126_G08.1 [Oryza sativa (japonica
  misc_feature (1)..(124): Homolog of NCBI NO: 34905354 NR Description: OJ1126_G08.1 [Oryza sativa (japonica
  misc_feature (65)..(438): Homolog of NCBI NO: 25411954 NR Description: hypothetical protein At2g20020 [imported] -
MGRDGLTHNMLNNIHDLWKRRRVCKIKCKGVCTVDMDNVCEQLEEKIGGKVIYRRGGVLFLFRGRNYNHRTRPRFPLMLWKPVAPVYPRLIQQVPEGLTRQEATNMRRKGRELMPICKLGKNGVYCDLVKNVKEAFEVCELVRIDCQGMKGSDFRKIGAKLKDLVPCVLVSFENEQILIWRGREWKSSLTTPDKKGDILEDIEVDTALPEDDEPSVSPNQSQTMTQNPPLDSMELQNDPDGHDLSPSTVDSSEMEGTINSLQSWSTKDVTEPTVDSFLRDLEEPEDEPETSEEISKQSIERVLILMKQAVESGTALVLDAADLDADTVFSKAVAFSSVASPGPVFQHGLRKQPTVKKQESQEFGYGDLEAKSSNVVVSRNASKSSNVVVFGKREVAERGEREEKEEGSKKKMDEFAEDYREVMPHGTLKVDELAKLLA

SEQ ID NO: 43830 - DNA, 1776 bp, Arabidopsis thaliana
  misc_feature (1)..(1776): Ceres Seq. ID no. 13576533
  misc_feature: MA Experiment ID: 20000184 Result: Down-regulated in Transcription
  misc_feature: MA Experiment 20000184 PARAMETER Experiment Name: At_Shoots__P Parameter: Age (day) Value: 7
  misc_feature: MA Experiment 20000184 PARAMETER Experiment Name: At_Shoots__P Parameter: Tissue Value: Shoots vs. Whole Plant
  misc_feature: MA Experiment ID: 20000495 Result: Up-regulated in Transcription
  misc_feature: MA Experiment 20000495 PARAMETER Experiment Name: At_Guard_Cells_P Parameter: Harvest Date Value: 8/2/2002
  misc_feature: MA Experiment 20000495 PARAMETER Experiment Name: At_Guard_Cells_P Parameter: Organism Value: A. thaliana
  misc_feature: MA Experiment 20000495 PARAMETER Experiment Name: At_Guard_Cells_P Parameter: Tissue Value: Guard Cells vs. Leaves
  misc_feature: MA Experiment ID: 20001451 Result: Up-regulated in Transcription
  misc_feature: MA Experiment 20001451 PARAMETER Experiment Name: At_Far-red-induction_P Parameter: Age (day) Value: 7
  misc_feature: MA Experiment 20001451 PARAMETER Experiment Name: At_Far-red-induction_P Parameter: Light Value: Far-red vs. White
  misc_feature: MA Experiment 20001451 PARAMETER Experiment Name: At_Far-red-induction_P Parameter: Organism Value: A. thaliana
  misc_feature: MA Experiment 20001451 PARAMETER Experiment Name: At_Far-red-induction_P Parameter: Plant Line Value: Columbia
  misc_feature: MA Experiment 20001451 PARAMETER Experiment Name: At_Far-red-induction_P Parameter: Timepoint (hr) Value: 24
  misc_feature: MA Experiment 20001451 PARAMETER Experiment Name: At_Far-red-induction_P Parameter: Tissue Value: Whole Plant
gaagactttggttcctccctaatctctctctctctctctctttttcacttcactctcttcttccccatcgaaggctcgtcttcttctgcttcaatggccgaatttccagaaccgggcactgtaaaccctgactcggatctatcgaatggtcgagctgagaagcctgagatagacacttcggctccgttcgagtcagtgagagaagcagccactcgttttggcggttttggtttctggagaccttctctcaataaactcccagatgcttctcaggaaaatatccaagaacctgatatcatgggactcaaagcacaagctttcgagctacaaagagaactaattgttaaagaacgcgaaacgctagaggtgttgaaggagcttgaggcgactaaagccacagtcttaaagctgcagcagaggaatgaagcttatgaggaggacacgttgagagaagaagttgacagtcatatcaagccagcgggtgtggttctaaaggatttaagccaggcgaagatgaatttgtgcaagattgcaagtatacgcgaatctgtggagcagttgaagaataaactgaatgaggaaagagctgcacttgagaagacacgcgagagacttatggagaaatctctcaaggtgttttctttagaggaagaagaagtgagagtaagatttgccaaggagggtcaaaccggcgagaaagatcttggaatgttgaatgaggttcaaagattgagccgtcaagctcaagaggtgaagaaaaccggagagaatgcagagttggaagttgtgaaagcaatggctgagactgaaagcacaagagataagattagaacagctaagataaggttggtggctgctagaaagatgaaggaagcggccagagaggctgaggcggttgcaatcgcagagattgaggctgttactggaagtatgaatgttggtaaggccgaggctgtgactatctctgctgaagagtattctgtgcttgctcgtagtgctagagacgcagaggaagaggcgagaaagcgagtggaagatgcaatgtcgagagttgaagaagctaatgtttcaaagaaggatgttctgaagaaagttgacgaagcggctcaagaaattgaaaccagcaagagagtattggaggaagctgtggagagagttgacgctgcaaatgcttcgaagatcgaagcagaagaggcgctgcgaaaatggcggtcagagaatggacagaggagaagattatcttcttcggtgaacaacacttccaagttcaagagcagaagagagacaacaacacgtctgatggatgtaaacggtctgcatctgacatacgatgttgttgacgggtcatcatcttcttcaacggtcccagtcttgaaaccaacaatgtcaataggacaaatactgagcaagaagctacttcttgcagaggattcagatatgaatgttgctaatgagtgaagaaaaatgtcgttgggtcagatgcttgcaaagaatagcagtagtgataaaactgtaagcaagagaagtgaagggaaagagaatgagaaaaggacgaagactcgaaagagaaagagtttcggatttgctaagatctctgtgttgttgaacaaagagagcaagaacaagaagaagaagaaaaagatagctttgaacttaaggtgatattttgaatctgttgatgacttctttctgttttgtacgtgaaccagtagtttaagaaaacaaagtgtatcatcaagtgctttattataatgctaatctaggctaattaatccc

SEQ ID NO: 43831 - protein, 485 aa, Arabidopsis thaliana
  peptide (1)..(485): Ceres Seq. ID no. 13576534
  misc_feature (60)..(383): Pfam Name: Plant protein of unknown function (DUF827) Pfam Description: Plant protein of unknown function (DUF827)
  misc_feature (60)..(383): Pfam Name: Plant protein of unknown function (DUF827) Pfam Description: Plant protein of unknown function (DUF827)
  misc_feature (104)..(431): Homolog of NCBI NO: 15234171 NR Description: hypothetical protein [Arabidopsis thaliana]
  misc_feature (210)..(485): Homolog of NCBI NO: 21618181 NR Description: unknown [Arabidopsis thaliana]
  misc_feature (210)..(485): Homolog of NCBI NO: 15230567 NR Description: expressed protein [Arabidopsis thaliana]
  misc_feature (79)..(419): Homolog of NCBI NO: 14029007 NR Description: Putative myosin heavy chain-like [Oryza sativa]
  misc_feature (154)..(428): Homolog of NCBI NO: 15225334 NR Description: expressed protein [Arabidopsis thaliana]
  misc_feature (104)..(431): Homolog of NCBI NO: 15234171 NR Description: hypothetical protein [Arabidopsis thaliana]
  misc_feature (210)..(485): Homolog of NCBI NO: 15230567 NR Description: expressed protein [Arabidopsis thaliana]
  misc_feature (154)..(428): Homolog of NCBI NO: 15225334 NR Description: expressed protein [Arabidopsis thaliana]
  misc_feature (21)..(485): Homolog of NCBI NO: 15224495 NR Description: expressed protein [Arabidopsis thaliana]
  misc_feature (138)..(480): Homolog of NCBI NO: 33146426 NR Description: myosin heavy chain-like [Oryza sativa (japonica
  misc_feature (54)..(485): Homolog of NCBI NO: 15226689 NR Description: hypothetical protein [Arabidopsis thaliana]
  misc_feature (56)..(287): Homolog of NCBI NO: 15230567 NR Description: expressed protein [Arabidopsis thaliana]
  misc_feature (56)..(287): Homolog of NCBI NO: 21618181 NR Description: unknown [Arabidopsis thaliana]
  misc_feature (79)..(419): Homolog of NCBI NO: 14029007 NR Description: Putative myosin heavy chain-like [Oryza sativa]
  misc_feature (210)..(485): Homolog of NCBI NO: 21618181 NR Description: unknown [Arabidopsis thaliana]
  misc_feature (56)..(287): Homolog of NCBI NO: 21618181 NR Description: unknown [Arabidopsis thaliana]
  misc_feature (56)..(287): Homolog of NCBI NO: 15230567 NR Description: expressed protein [Arabidopsis thaliana]
  misc_feature (54)..(485): Homolog of NCBI NO: 15226689 NR Description: hypothetical protein [Arabidopsis thaliana]
  misc_feature (138)..(480): Homolog of NCBI NO: 33146426 NR Description: myosin heavy chain-like [Oryza sativa (japonica
  misc_feature (21)..(485): Homolog of NCBI NO: 15224495 NR Description: expressed protein [Arabidopsis thaliana]
EDFGSSLISLSLSLFHFTLFFPIEGSSSSASMAEFPEPGTVNPDSDLSNGRAEKPEIDTSAPFESVREAATRFGGFGFWRPSLNKLPDASQENIQEPDIMGLKAQAFELQRELIVKERETLEVLKELEATKATVLKLQQRNEAYEEDTLREEVDSHIKPAGVVLKDLSQAKMNLCKIASIRESVEQLKNKLNEERAALEKTRERLMEKSLKVFSLEEEEVRVRFAKEGQTGEKDLGMLNEVQRLSRQAQEVKKTGENAELEVVKAMAETESTRDKIRTAKIRLVAARKMKEAAREAEAVAIAEIEAVTGSMNVGKAEAVTISAEEYSVLARSARDAEEEARKRVEDAMSRVEEANVSKKDVLKKVDEAAQEIETSKRVLEEAVERVDAANASKIEAEEALRKWRSENGQRRRLSSSVNNTSKFKSRRETTTRLMDVNGLHLTYDVVDGSSSSSTVPVLKPTMSIGQILSKKLLLAEDSDMNVANE

SEQ ID NO: 43832 - protein, 454 aa, Arabidopsis thaliana
  peptide (1)..(454): Ceres Seq. ID no. 13576535
  misc_feature (29)..(352): Pfam Name: Plant protein of unknown function (DUF827) Pfam Description: Plant protein of unknown function (DUF827)
  misc_feature (29)..(352): Pfam Name: Plant protein of unknown function (DUF827) Pfam Description: Plant protein of unknown function (DUF827)
  misc_feature (73)..(400): Homolog of NCBI NO: 15234171 NR Description: hypothetical protein [Arabidopsis thaliana]
  misc_feature (179)..(454): Homolog of NCBI NO: 21618181 NR Description: unknown [Arabidopsis thaliana]
  misc_feature (179)..(454): Homolog of NCBI NO: 15230567 NR Description: expressed protein [Arabidopsis thaliana]
  misc_feature (48)..(388): Homolog of NCBI NO: 14029007 NR Description: Putative myosin heavy chain-like [Oryza sativa]
  misc_feature (123)..(397): Homolog of NCBI NO: 15225334 NR Description: expressed protein [Arabidopsis thaliana]
  misc_feature (73)..(400): Homolog of NCBI NO: 15234171 NR Description: hypothetical protein [Arabidopsis thaliana]
  misc_feature (179)..(454): Homolog of NCBI NO: 15230567 NR Description: expressed protein [Arabidopsis thaliana]
  misc_feature (123)..(397): Homolog of NCBI NO: 15225334 NR Description: expressed protein [Arabidopsis thaliana]
  misc_feature (1)..(454): Homolog of NCBI NO: 15224495 NR Description: expressed protein [Arabidopsis thaliana]
  misc_feature (107)..(449): Homolog of NCBI NO: 33146426 NR Description: myosin heavy chain-like [Oryza sativa (japonica
  misc_feature (23)..(454): Homolog of NCBI NO: 15226689 NR Description: hypothetical protein [Arabidopsis thaliana]
  misc_feature (25)..(256): Homolog of NCBI NO: 15230567 NR Description: expressed protein [Arabidopsis thaliana]
  misc_feature (25)..(256): Homolog of NCBI NO: 21618181 NR Description: unknown [Arabidopsis thaliana]
  misc_feature (48)..(388): Homolog of NCBI NO: 14029007 NR Description: Putative myosin heavy chain-like [Oryza sativa]
  misc_feature (179)..(454): Homolog of NCBI NO: 21618181 NR Description: unknown [Arabidopsis thaliana]
  misc_feature (25)..(256): Homolog of NCBI NO: 21618181 NR Description: unknown [Arabidopsis thaliana]
  misc_feature (25)..(256): Homolog of NCBI NO: 15230567 NR Description: expressed protein [Arabidopsis thaliana]
  misc_feature (23)..(454): Homolog of NCBI NO: 15226689 NR Description: hypothetical protein [Arabidopsis thaliana]
  misc_feature (107)..(449): Homolog of NCBI NO: 33146426 NR Description: myosin heavy chain-like [Oryza sativa (japonica
  misc_feature (1)..(454): Homolog of NCBI NO: 15224495 NR Description: expressed protein [Arabidopsis thaliana]
MAEFPEPGTVNPDSDLSNGRAEKPEIDTSAPFESVREAATRFGGFGFWRPSLNKLPDASQENIQEPDIMGLKAQAFELQRELIVKERETLEVLKELEATKATVLKLQQRNEAYEEDTLREEVDSHIKPAGVVLKDLSQAKMNLCKIASIRESVEQLKNKLNEERAALEKTRERLMEKSLKVFSLEEEEVRVRFAKEGQTGEKDLGMLNEVQRLSRQAQEVKKTGENAELEVVKAMAETESTRDKIRTAKIRLVAARKMKEAAREAEAVAIAEIEAVTGSMNVGKAEAVTISAEEYSVLARSARDAEEEARKRVEDAMSRVEEANVSKKDVLKKVDEAAQEIETSKRVLEEAVERVDAANASKIEAEEALRKWRSENGQRRRLSSSVNNTSKFKSRRETTTRLMDVNGLHLTYDVVDGSSSSSTVPVLKPTMSIGQILSKKLLLAEDSDMNVANE

SEQ ID NO: 43833 - protein, 386 aa, Arabidopsis thaliana
  peptide (1)..(386): Ceres Seq. ID no. 13576536
  misc_feature (1)..(284): Pfam Name: Plant protein of unknown function (DUF827) Pfam Description: Plant protein of unknown function (DUF827)
  misc_feature (1)..(284): Pfam Name: Plant protein of unknown function (DUF827) Pfam Description: Plant protein of unknown function (DUF827)
  misc_feature (5)..(332): Homolog of NCBI NO: 15234171 NR Description: hypothetical protein [Arabidopsis thaliana]
  misc_feature (111)..(386): Homolog of NCBI NO: 21618181 NR Description: unknown [Arabidopsis thaliana]
  misc_feature (111)..(386): Homolog of NCBI NO: 15230567 NR Description: expressed protein [Arabidopsis thaliana]
  misc_feature (1)..(320): Homolog of NCBI NO: 14029007 NR Description: Putative myosin heavy chain-like [Oryza sativa]
  misc_feature (55)..(329): Homolog of NCBI NO: 15225334 NR Description: expressed protein [Arabidopsis thaliana]
  misc_feature (5)..(332): Homolog of NCBI NO: 15234171 NR Description: hypothetical protein [Arabidopsis thaliana]
  misc_feature (111)..(386): Homolog of NCBI NO: 15230567 NR Description: expressed protein [Arabidopsis thaliana]
  misc_feature (55)..(329): Homolog of NCBI NO: 15225334 NR Description: expressed protein [Arabidopsis thaliana]
  misc_feature (1)..(386): Homolog of NCBI NO: 15224495 NR Description: expressed protein [Arabidopsis thaliana]
  misc_feature (39)..(381): Homolog of NCBI NO: 33146426 NR Description: myosin heavy chain-like [Oryza sativa (japonica
  misc_feature (1)..(386): Homolog of NCBI NO: 15226689 NR Description: hypothetical protein [Arabidopsis thaliana]
  misc_feature (1)..(188): Homolog of NCBI NO: 15230567 NR Description: expressed protein [Arabidopsis thaliana]
  misc_feature (1)..(188): Homolog of NCBI NO: 21618181 NR Description: unknown [Arabidopsis thaliana]
  misc_feature (1)..(320): Homolog of NCBI NO: 14029007 NR Description: Putative myosin heavy chain-like [Oryza sativa]
  misc_feature (111)..(386): Homolog of NCBI NO: 21618181 NR Description: unknown [Arabidopsis thaliana]
  misc_feature (1)..(188): Homolog of NCBI NO: 21618181 NR Description: unknown [Arabidopsis thaliana]
  misc_feature (1)..(188): Homolog of NCBI NO: 15230567 NR Description: expressed protein [Arabidopsis thaliana]
  misc_feature (1)..(386): Homolog of NCBI NO: 15226689 NR Description: hypothetical protein [Arabidopsis thaliana]
  misc_feature (39)..(381): Homolog of NCBI NO: 33146426 NR Description: myosin heavy chain-like [Oryza sativa (japonica
  misc_feature (1)..(386): Homolog of NCBI NO: 15224495 NR Description: expressed protein [Arabidopsis thaliana]
MGLKAQAFELQRELIVKERETLEVLKELEATKATVLKLQQRNEAYEEDTLREEVDSHIKPAGVVLKDLSQAKMNLCKIASIRESVEQLKNKLNEERAALEKTRERLMEKSLKVFSLEEEEVRVRFAKEGQTGEKDLGMLNEVQRLSRQAQEVKKTGENAELEVVKAMAETESTRDKIRTAKIRLVAARKMKEAAREAEAVAIAEIEAVTGSMNVGKAEAVTISAEEYSVLARSARDAEEEARKRVEDAMSRVEEANVSKKDVLKKVDEAAQEIETSKRVLEEAVERVDAANASKIEAEEALRKWRSENGQRRRLSSSVNNTSKFKSRRETTTRLMDVNGLHLTYDVVDGSSSSSTVPVLKPTMSIGQILSKKLLLAEDSDMNVANE

SEQ ID NO: 43834 - DNA, 1707 bp, Arabidopsis thaliana; identical to SEQ ID NO: 26975
  misc_feature (1)..(1707): Ceres Seq. ID no. 13489655
  misc_feature: MA Experiment ID: 20000171 Result: Down-regulated in Transcription
  misc_feature: MA Experiment 20000171 PARAMETER Experiment Name: At_42deg_Heat_P Parameter: Age (day) Value: 14
  misc_feature: MA Experiment 20000171 PARAMETER Experiment Name: At_42deg_Heat_P Parameter: Organism Value: A. thaliana
  misc_feature: MA Experiment 20000171 PARAMETER Experiment Name: At_42deg_Heat_P Parameter: Plant Line Value: WS
  misc_feature: MA Experiment 20000171 PARAMETER Experiment Name: At_42deg_Heat_P Parameter: Temperature (deg C) Value: 42 vs. 22
  misc_feature: MA Experiment 20000171 PARAMETER Experiment Name: At_42deg_Heat_P Parameter: Timepoint (hr) Value: 1
  misc_feature: MA Experiment 20000171 PARAMETER Experiment Name: At_42deg_Heat_P Parameter: Tissue Value: Aerial
  misc_feature: MA Experiment ID: 20000173 Result: Down-regulated in Transcription
  misc_feature: MA Experiment 20000173 PARAMETER Experiment Name: At_42deg_Heat_P Parameter: Age (day) Value: 14
  misc_feature: MA Experiment 20000173 PARAMETER Experiment Name: At_42deg_Heat_P Parameter: Organism Value: A. thaliana
  misc_feature: MA Experiment 20000173 PARAMETER Experiment Name: At_42deg_Heat_P Parameter: Plant Line Value: WS
  misc_feature: MA Experiment 20000173 PARAMETER Experiment Name: At_42deg_Heat_P Parameter: Temperature (deg C) Value: 42 vs. 22
  misc_feature: MA Experiment 20000173 PARAMETER Experiment Name: At_42deg_Heat_P Parameter: Timepoint (hr) Value: 6
  misc_feature: MA Experiment 20000173 PARAMETER Experiment Name: At_42deg_Heat_P Parameter: Tissue Value: Aerial
  misc_feature: MA Experiment ID: 20000179 Result: Up-regulated in Transcription
  misc_feature: MA Experiment 20000179 PARAMETER Experiment Name: At_Germinating_Seeds_P Parameter: Age (hr) Value: 6 vs. 0
  misc_feature: MA Experiment 20000179 PARAMETER Experiment Name: At_Germinating_Seeds_P Parameter: Tissue Value: Germinating Seeds
  misc_feature: MA Experiment ID: 20000180 Result: Up-regulated in Transcription
  misc_feature: MA Experiment 20000180 PARAMETER Experiment Name: At_Germinating_Seeds_P Parameter: Age (hr) Value: 24 vs. 0
  misc_feature: MA Experiment 20000180 PARAMETER Experiment Name: At_Germinating_Seeds_P Parameter: Tissue Value: Germinating Seeds
  misc_feature: MA Experiment ID: 20001451 Result: Up-regulated in Transcription
  misc_feature: MA Experiment 20001451 PARAMETER Experiment Name: At_Far-red-induction_P Parameter: Age (day) Value: 7
  misc_feature: MA Experiment 20001451 PARAMETER Experiment Name: At_Far-red-induction_P Parameter: Light Value: Far-red vs. White
  misc_feature: MA Experiment 20001451 PARAMETER Experiment Name: At_Far-red-induction_P Parameter: Organism Value: A. thaliana
  misc_feature: MA Experiment 20001451 PARAMETER Experiment Name: At_Far-red-induction_P Parameter: Plant Line Value: Columbia
  misc_feature: MA Experiment 20001451 PARAMETER Experiment Name: At_Far-red-induction_P Parameter: Timepoint (hr) Value: 24
  misc_feature: MA Experiment 20001451 PARAMETER Experiment Name: At_Far-red-induction_P Parameter: Tissue Value: Whole Plant

SEQ ID NO: 43835 - protein, 514 aa, Arabidopsis thaliana; identical to SEQ ID NO: 26976
  peptide (1)..(514): Ceres Seq. ID no. 13489656
  misc_feature (54)..(502): Pfam Name: Cytochrome P450 Pfam Description: Cytochrome P450
  misc_feature (54)..(502): Pfam Name: Cytochrome P450 Pfam Description: Cytochrome P450
  misc_feature (27)..(514): Homolog of NCBI NO: 30692923 NR Description: cytochrome P450 91A1 [Arabidopsis thaliana]
  misc_feature (29)..(514): Homolog of NCBI NO: 15227789 NR Description: cytochrome P450, putative [Arabidopsis thaliana]
  misc_feature (23)..(514): Homolog of NCBI NO: 15227792 NR Description: cytochrome P450, putative [Arabidopsis thaliana]
  misc_feature (27)..(514): Homolog of NCBI NO: 15235534 NR Description: cytochrome P450 family [Arabidopsis thaliana]
  misc_feature (28)..(514): Homolog of NCBI NO: 15235535 NR Description: cytochrome P450 family [Arabidopsis thaliana]
  misc_feature (27)..(514): Homolog of NCBI NO: 30692923 NR Description: cytochrome P450 91A1 [Arabidopsis thaliana]
  misc_feature (23)..(514): Homolog of NCBI NO: 15227792 NR Description: cytochrome P450, putative [Arabidopsis thaliana]
  misc_feature (28)..(514): Homolog of NCBI NO: 15235535 NR Description: cytochrome P450 family [Arabidopsis thaliana]
  misc_feature (23)..(514): Homolog of NCBI NO: 15235533 NR Description: cytochrome P450 family [Arabidopsis thaliana]
  misc_feature (23)..(514): Homolog of NCBI NO: 15235517 NR Description: cytochrome P450 family [Arabidopsis thaliana]
  misc_feature (29)..(513): Homolog of NCBI NO: 15235536 NR Description: cytochrome P450, putative [Arabidopsis thaliana]
  misc_feature (29)..(513): Homolog of NCBI NO: 21554381 NR Description: cytochrome P450-like protein [Arabidopsis
  misc_feature (28)..(514): Homolog of NCBI NO: 15228472 NR Description: cytochrome P450 family [Arabidopsis thaliana]
  misc_feature (27)..(514): Homolog of NCBI NO: 15235534 NR Description: cytochrome P450 family [Arabidopsis thaliana]
  misc_feature (29)..(514): Homolog of NCBI NO: 15227789 NR Description: cytochrome P450, putative [Arabidopsis thaliana]
  misc_feature (28)..(514): Homolog of NCBI NO: 15228472 NR Description: cytochrome P450 family [Arabidopsis thaliana]
  misc_feature (29)..(513): Homolog of NCBI NO: 21554381 NR Description: cytochrome P450-like protein [Arabidopsis
  misc_feature (29)..(513): Homolog of NCBI NO: 15235536 NR Description: cytochrome P450, putative [Arabidopsis thaliana]
  misc_feature (23)..(514): Homolog of NCBI NO: 15235517 NR Description: cytochrome P450 family [Arabidopsis thaliana]
  misc_feature (23)..(514): Homolog of NCBI NO: 15235533 NR Description: cytochrome P450 family [Arabidopsis thaliana]

SEQ ID NO: 43836 - protein, 492 aa, Arabidopsis thaliana; identical to SEQ ID NO: 26977
  peptide (1)..(492): Ceres Seq. ID no. 13489657
  misc_feature (32)..(480): Pfam Name: Cytochrome P450 Pfam Description: Cytochrome P450
  misc_feature (32)..(480): Pfam Name: Cytochrome P450 Pfam Description: Cytochrome P450
  misc_feature (5)..(492): Homolog of NCBI NO: 30692923 NR Description: cytochrome P450 91A1 [Arabidopsis thaliana]
  misc_feature (7)..(492): Homolog of NCBI NO: 15227789 NR Description: cytochrome P450, putative [Arabidopsis thaliana]
  misc_feature (1)..(492): Homolog of NCBI NO: 15227792 NR Description: cytochrome P450, putative [Arabidopsis thaliana]
  misc_feature (5)..(492): Homolog of NCBI NO: 15235534 NR Description: cytochrome P450 family [Arabidopsis thaliana]
  misc_feature (6)..(492): Homolog of NCBI NO: 15235535 NR Description: cytochrome P450 family [Arabidopsis thaliana]
  misc_feature (5)..(492): Homolog of NCBI NO: 30692923 NR Description: cytochrome P450 91A1 [Arabidopsis thaliana]
  misc_feature (1)..(492): Homolog of NCBI NO: 15227792 NR Description: cytochrome P450, putative [Arabidopsis thaliana]
  misc_feature (6)..(492): Homolog of NCBI NO: 15235535 NR Description: cytochrome P450 family [Arabidopsis thaliana]
  misc_feature (1)..(492): Homolog of NCBI NO: 15235533 NR Description: cytochrome P450 family [Arabidopsis thaliana]
  misc_feature (1)..(492): Homolog of NCBI NO: 15235517 NR Description: cytochrome P450 family [Arabidopsis thaliana]
  misc_feature (7)..(491): Homolog of NCBI NO: 15235536 NR Description: cytochrome P450, putative [Arabidopsis thaliana]
  misc_feature (7)..(491): Homolog of NCBI NO: 21554381 NR Description: cytochrome P450-like protein [Arabidopsis
  misc_feature (6)..(492): Homolog of NCBI NO: 15228472 NR Description: cytochrome P450 family [Arabidopsis thaliana]
  misc_feature (5)..(492): Homolog of NCBI NO: 15235534 NR Description: cytochrome P450 family [Arabidopsis thaliana]
  misc_feature (7)..(492): Homolog of NCBI NO: 15227789 NR Description: cytochrome P450, putative [Arabidopsis thaliana]
  misc_feature (6)..(492): Homolog of NCBI NO: 15228472 NR Description: cytochrome P450 family [Arabidopsis thaliana]
  misc_feature (7)..(491): Homolog of NCBI NO: 21554381 NR Description: cytochrome P450-like protein [Arabidopsis
  misc_feature (7)..(491): Homolog of NCBI NO: 15235536 NR Description: cytochrome P450, putative [Arabidopsis thaliana]
  misc_feature (1)..(492): Homolog of NCBI NO: 15235517 NR Description: cytochrome P450 family [Arabidopsis thaliana]
  misc_feature (1)..(492): Homolog of NCBI NO: 15235533 NR Description: cytochrome P450 family [Arabidopsis thaliana]

SEQ ID NO: 43837 - protein, 319 aa, Arabidopsis thaliana; identical to SEQ ID NO: 26978
  peptide (1)..(319): Ceres Seq. ID no. 13489658
  misc_feature (1)..(307): Pfam Name: Cytochrome P450 Pfam Description: Cytochrome P450
  misc_feature (1)..(307): Pfam Name: Cytochrome P450 Pfam Description: Cytochrome P450
  misc_feature (1)..(319): Homolog of NCBI NO: 30692923 NR Description: cytochrome P450 91A1 [Arabidopsis thaliana]
  misc_feature (1)..(319): Homolog of NCBI NO: 15227789 NR Description: cytochrome P450, putative [Arabidopsis thaliana]
  misc_feature (1)..(319): Homolog of NCBI NO: 15227792 NR Description: cytochrome P450, putative [Arabidopsis thaliana]
  misc_feature (1)..(319): Homolog of NCBI NO: 15235534 NR Description: cytochrome P450 family [Arabidopsis thaliana]
  misc_feature (1)..(319): Homolog of NCBI NO: 15235535 NR Description: cytochrome P450 family [Arabidopsis thaliana]
  misc_feature (1)..(319): Homolog of NCBI NO: 30692923 NR Description: cytochrome P450 91A1 [Arabidopsis thaliana]
  misc_feature (1)..(319): Homolog of NCBI NO: 15227792 NR Description: cytochrome P450, putative [Arabidopsis thaliana]
  misc_feature (1)..(319): Homolog of NCBI NO: 15235535 NR Description: cytochrome P450 family [Arabidopsis thaliana]
  misc_feature (1)..(319): Homolog of NCBI NO: 15235533 NR Description: cytochrome P450 family [Arabidopsis thaliana]
  misc_feature (1)..(319): Homolog of NCBI NO: 15235517 NR Description: cytochrome P450 family [Arabidopsis thaliana]
  misc_feature (1)..(318): Homolog of NCBI NO: 15235536 NR Description: cytochrome P450, putative [Arabidopsis thaliana]
  misc_feature (1)..(318): Homolog of NCBI NO: 21554381 NR Description: cytochrome P450-like protein [Arabidopsis
  misc_feature (1)..(319): Homolog of NCBI NO: 15228472 NR Description: cytochrome P450 family [Arabidopsis thaliana]
  misc_feature (1)..(319): Homolog of NCBI NO: 15235534 NR Description: cytochrome P450 family [Arabidopsis thaliana]
  misc_feature (1)..(319): Homolog of NCBI NO: 15227789 NR Description: cytochrome P450, putative [Arabidopsis thaliana]
  misc_feature (1)..(319): Homolog of NCBI NO: 15228472 NR Description: cytochrome P450 family [Arabidopsis thaliana]
  misc_feature (1)..(318): Homolog of NCBI NO: 21554381 NR Description: cytochrome P450-like protein [Arabidopsis
  misc_feature (1)..(318): Homolog of NCBI NO: 15235536 NR Description: cytochrome P450, putative [Arabidopsis thaliana]
  misc_feature (1)..(319): Homolog of NCBI NO: 15235517 NR Description: cytochrome P450 family [Arabidopsis thaliana]
  misc_feature (1)..(319): Homolog of NCBI NO: 15235533 NR Description: cytochrome P450 family [Arabidopsis thaliana]

SEQ ID NO: 43838 - DNA, 776 bp, Arabidopsis thaliana; identical to SEQ ID NO: 36257
  misc_feature (1)..(776): Ceres Seq. ID no. 12602631
  misc_feature: MA Experiment ID: 108434 Result: Up-regulated in Transcription
  misc_feature: MA Experiment 108434 PARAMETER Experiment Name: At_Root_Tips_cDNA_P Parameter: Tissue Value: Root Tips
  misc_feature: MA Experiment ID: 20000111 Result: Up-regulated in Transcription
  misc_feature: MA Experiment 20000111 PARAMETER Experiment Name: At_42deg_Heat_cDNA_P Parameter: Temperature (deg C) Value: 42 vs. 22
  misc_feature: MA Experiment 20000111 PARAMETER Experiment Name: At_42deg_Heat_cDNA_P Parameter: Timepoint (hr) Value: 6
  misc_feature: MA Experiment 20000111 PARAMETER Experiment Name: At_42deg_Heat_cDNA_P Parameter: Tissue Value: Aerial
  misc_feature: MA Experiment ID: 20000113 Result: Up-regulated in Transcription
  misc_feature: MA Experiment 20000113 PARAMETER Experiment Name: At_42deg_Heat_cDNA_P Parameter: Temperature (deg C) Value: 42 vs. 22
  misc_feature: MA Experiment 20000113 PARAMETER Experiment Name: At_42deg_Heat_cDNA_P Parameter: Timepoint (hr) Value: 8
  misc_feature: MA Experiment 20000113 PARAMETER Experiment Name: At_42deg_Heat_cDNA_P Parameter: Tissue Value: Aerial
  misc_feature: MA Experiment ID: 20000179 Result: Up-regulated in Transcription
  misc_feature: MA Experiment 20000179 PARAMETER Experiment Name: At_Germinating_Seeds_P Parameter: Age (hr) Value: 6 vs. 0
  misc_feature: MA Experiment 20000179 PARAMETER Experiment Name: At_Germinating_Seeds_P Parameter: Tissue Value: Germinating Seeds
  misc_feature: MA Experiment ID: 20000794 Result: Down-regulated in Transcription
  misc_feature: MA Experiment 20000794 PARAMETER Experiment Name: At_Petals_P Parameter: Age (day) Value: 23-25 days
  misc_feature: MA Experiment 20000794 PARAMETER Experiment Name: At_Petals_P Parameter: Plant Line Value: WS
  misc_feature: MA Experiment 20000794 PARAMETER Experiment Name: At_Petals_P Parameter: Tissue Value: Petals vs. Whole plant

SEQ ID NO: 43839 - protein, 103 aa, Arabidopsis thaliana; identical to SEQ ID NO: 36258
  peptide (1)..(103): Ceres Seq. ID no. 12602632
  misc_feature (2)..(100): Pfam Name: Nuclear transport factor 2 (NTF2) domain Pfam Description: Nuclear transport factor 2 (NTF2) domain
  misc_feature (2)..(100): Pfam Name: Nuclear transport factor 2 (NTF2) domain Pfam Description: Nuclear transport factor 2 (NTF2) domain
  misc_feature (2)..(103): Homolog of NCBI NO: 15214172 NR Description: Nuclear transport factor 2 (NTF-2)
  misc_feature (2)..(102): Homolog of NCBI NO: 25402667 NR Description: protein T23J18.22 [imported] - Arabidopsis
  misc_feature (2)..(103): Homolog of NCBI NO: 21730277 NR Description: Chain A, N77y Point Mutant Of S.Cerevisiae Ntf2
  misc_feature (2)..(103): Homolog of NCBI NO: 6320846 NR Description: May coordinate the Ran-dependent (GSP1/GSP2)
  misc_feature (2)..(102): Homolog of NCBI NO: 19114665 NR Description: nuclear transport factor, NTF2 homolog
  misc_feature (2)..(103): Homolog of NCBI NO: 15214172 NR Description: Nuclear transport factor 2 (NTF-2)
  misc_feature (2)..(103): Homolog of NCBI NO: 21730277 NR Description: Chain A, N77y Point Mutant Of S.Cerevisiae Ntf2
  misc_feature (2)..(102): Homolog of NCBI NO: 19114665 NR Description: nuclear transport factor, NTF2 homolog
  misc_feature (2)..(103): Homolog of NCBI NO: 15223491 NR Description: putative nuclear transport factor
  misc_feature (2)..(103): Homolog of NCBI NO: 15217779 NR Description: nuclear transport factor 2, putative
  misc_feature (2)..(103): Homolog of NCBI NO: 21555203 NR Description: nuclear transport factor 2, putative [Arabidopsis
  misc_feature (2)..(102): Homolog of NCBI NO: 15214179 NR Description: Nuclear transport factor 2 (NTF-2)
  misc_feature (2)..(102): Homolog of NCBI NO: 34908774 NR Description: putative Nuclear transport factor 2
  misc_feature (2)..(103): Homolog of NCBI NO: 6320846 NR Description: May coordinate the Ran-dependent (GSP1/GSP2)
  misc_feature (2)..(102): Homolog of NCBI NO: 25402667 NR Description: protein T23J18.22 [imported] - Arabidopsis
  misc_feature (2)..(102): Homolog of NCBI NO: 34908774 NR Description: putative Nuclear transport factor 2
  misc_feature (2)..(102): Homolog of NCBI NO: 15214179 NR Description: Nuclear transport factor 2 (NTF-2)
  misc_feature (2)..(103): Homolog of NCBI NO: 21555203 NR Description: nuclear transport factor 2, putative [Arabidopsis
  misc_feature (2)..(103): Homolog of NCBI NO: 15217779 NR Description: nuclear transport factor 2, putative
  misc_feature (2)..(103): Homolog of NCBI NO: 15223491 NR Description: putative nuclear transport factor

SEQ ID NO: 43840 - protein, 89 aa, Arabidopsis thaliana; identical to SEQ ID NO: 36259
  peptide (1)..(89): Ceres Seq. ID no. 12602633
  misc_feature (1)..(86): Pfam Name: Nuclear transport factor 2 (NTF2) domain Pfam Description: Nuclear transport factor 2 (NTF2) domain
  misc_feature (1)..(86): Pfam Name: Nuclear transport factor 2 (NTF2) domain Pfam Description: Nuclear transport factor 2 (NTF2) domain
  misc_feature (1)..(89): Homolog of NCBI NO: 15214172 NR Description: Nuclear transport factor 2 (NTF-2)
  misc_feature (1)..(88): Homolog of NCBI NO: 25402667 NR Description: protein T23J18.22 [imported] - Arabidopsis
  misc_feature (1)..(89): Homolog of NCBI NO: 21730277 NR Description: Chain A, N77y Point Mutant Of S.Cerevisiae Ntf2
  misc_feature (1)..(89): Homolog of NCBI NO: 6320846 NR Description: May coordinate the Ran-dependent (GSP1/GSP2)
  misc_feature (1)..(88): Homolog of NCBI NO: 19114665 NR Description: nuclear transport factor, NTF2 homolog
  misc_feature (1)..(89): Homolog of NCBI NO: 15214172 NR Description: Nuclear transport factor 2 (NTF-2)
  misc_feature (1)..(89): Homolog of NCBI NO: 21730277 NR Description: Chain A, N77y Point Mutant Of S.Cerevisiae Ntf2
  misc_feature (1)..(88): Homolog of NCBI NO: 19114665 NR Description: nuclear transport factor, NTF2 homolog
  misc_feature (1)..(89): Homolog of NCBI NO: 15223491 NR Description: putative nuclear transport factor
  misc_feature (1)..(89): Homolog of NCBI NO: 15217779 NR Description: nuclear transport factor 2, putative
  misc_feature (1)..(89): Homolog of NCBI NO: 21555203 NR Description: nuclear transport factor 2, putative [Arabidopsis
  misc_feature (1)..(88): Homolog of NCBI NO: 15214179 NR Description: Nuclear transport factor 2 (NTF-2)
  misc_feature (1)..(88): Homolog of NCBI NO: 34908774 NR Description: putative Nuclear transport factor 2
  misc_feature (1)..(89): Homolog of NCBI NO: 6320846 NR Description: May coordinate the Ran-dependent (GSP1/GSP2)
  misc_feature (1)..(88): Homolog of NCBI NO: 25402667 NR Description: protein T23J18.22 [imported] - Arabidopsis
  misc_feature (1)..(88): Homolog of NCBI NO: 34908774 NR Description: putative Nuclear transport factor 2
  misc_feature (1)..(88): Homolog of NCBI NO: 15214179 NR Description: Nuclear transport factor 2 (NTF-2)
  misc_feature (1)..(89): Homolog of NCBI NO: 21555203 NR Description: nuclear transport factor 2, putative [Arabidopsis
  misc_feature (1)..(89): Homolog of NCBI NO: 15217779 NR Description: nuclear transport factor 2, putative
  misc_feature (1)..(89): Homolog of NCBI NO: 15223491 NR Description: putative nuclear transport factor

SEQ ID NO: 43841 - protein, 87 aa, Arabidopsis thaliana; identical to SEQ ID NO: 36260
  peptide (1)..(87): Ceres Seq. ID no. 12602634
  misc_feature (39)..(57): Homolog of NCBI NO: 15214179 NR Description: Nuclear transport factor 2 (NTF-2)
  misc_feature (39)..(65): Homolog of NCBI NO: 21555203 NR Description: nuclear transport factor 2, putative [Arabidopsis
  misc_feature (38)..(65): Homolog of NCBI NO: 15217779 NR Description: nuclear transport factor 2, putative
  misc_feature (39)..(57): Homolog of NCBI NO: 15223491 NR Description: putative nuclear transport factor
  misc_feature (39)..(57): Homolog of NCBI NO: 15214179 NR Description: Nuclear transport factor 2 (NTF-2)
  misc_feature (39)..(65): Homolog of NCBI NO: 21555203 NR Description: nuclear transport factor 2, putative [Arabidopsis
  misc_feature (38)..(65): Homolog of NCBI NO: 15217779 NR Description: nuclear transport factor 2, putative
  misc_feature (39)..(57): Homolog of NCBI NO: 15223491 NR Description: putative nuclear transport factor

SEQ ID NO: 43842 - DNA, 1335 bp, Arabidopsis thaliana; identical to SEQ ID NO: 35578
  misc_feature (1)..(1335): Ceres Seq. ID no. 13490506
  misc_feature: MA Experiment ID: 108435 Result: Up-regulated in Transcription
  misc_feature: MA Experiment 108435 PARAMETER Experiment Name: At_stm_Mutants_cDNA_P Parameter: Plant Line Value: wt Landsburg vs stm
  misc_feature: MA Experiment 108435 PARAMETER Experiment Name: At_stm_Mutants_cDNA_P Parameter: Tissue Value: Shoot Apical Meristem Region
  misc_feature: MA Experiment ID: 108461 Result: Up-regulated in Transcription
  misc_feature: MA Experiment 108461 PARAMETER Experiment Name: At_Germinating_Seeds_cDNA_P Parameter: Age (day) Value: 1 vs. 0
  misc_feature: MA Experiment 108461 PARAMETER Experiment Name: At_Germinating_Seeds_cDNA_P Parameter: Tissue Value: Germinating Seeds
  misc_feature: MA Experiment ID: 108462 Result: Up-regulated in Transcription
  misc_feature: MA Experiment 108462 PARAMETER Experiment Name: At_Germinating_Seeds_cDNA_P Parameter: Age (day) Value: 2 vs. 0
  misc_feature: MA Experiment 108462 PARAMETER Experiment Name: At_Germinating_Seeds_cDNA_P Parameter: Tissue Value: Germinating Seeds
  misc_feature: MA Experiment ID: 108463 Result: Up-regulated in Transcription
  misc_feature: MA Experiment 108463 PARAMETER Experiment Name: At_Germinating_Seeds_cDNA_P Parameter: Age (day) Value: 3 vs. 0
  misc_feature: MA Experiment 108463 PARAMETER Experiment Name: At_Germinating_Seeds_cDNA_P Parameter: Tissue Value: Germinating Seeds
  misc_feature: MA Experiment ID: 108464 Result: Up-regulated in Transcription
  misc_feature: MA Experiment 108464 PARAMETER Experiment Name: At_Germinating_Seeds_cDNA_P Parameter: Age (day) Value: 4 vs. 0
  misc_feature: MA Experiment 108464 PARAMETER Experiment Name: At_Germinating_Seeds_cDNA_P Parameter: Tissue Value: Germinating Seeds
  misc_feature: MA Experiment ID: 108501 Result: Up-regulated in Transcription
  misc_feature: MA Experiment 108501 PARAMETER Experiment Name: At_ap2_floral_buds_cDNA_P Parameter: Plant Line Value: ap2 (Ler.)
  misc_feature: MA Experiment 108501 PARAMETER Experiment Name: At_ap2_floral_buds_cDNA_P Parameter: Tissue Value: Closed Flower
  misc_feature: MA Experiment ID: 108561 Result: Down-regulated in Transcription
  misc_feature: MA Experiment 108561 PARAMETER Experiment Name: At_100uM_ABA_cDNA_P Parameter: Timepoint (hr) Value: 6
  misc_feature: MA Experiment 108561 PARAMETER Experiment Name: At_100uM_ABA_cDNA_P Parameter: Tissue Value: Aerial
  misc_feature: MA Experiment 108561 PARAMETER Experiment Name: At_100uM_ABA_cDNA_P Parameter: Treatment Value: 100uM ABA vs. No Treatment
  misc_feature: MA Experiment ID: 108573 Result: Down-regulated in Transcription
  misc_feature: MA Experiment 108573 PARAMETER Experiment Name: At_Drought_cDNA_P Parameter: Timepoint (hr) Value: 6
  misc_feature: MA Experiment 108573 PARAMETER Experiment Name: At_Drought_cDNA_P Parameter: Tissue Value: Aerial
  misc_feature: MA Experiment 108573 PARAMETER Experiment Name: At_Drought_cDNA_P Parameter: Treatment Value: Drought vs. No Drought
  misc_feature: MA Experiment ID: 108579 Result: Up-regulated in Transcription
  misc_feature: MA Experiment 108579 PARAMETER Experiment Name: At_4deg_Cold_cDNA_P Parameter: Temperature (deg C) Value: 4 vs. 22
  misc_feature: MA Experiment 108579 PARAMETER Experiment Name: At_4deg_Cold_cDNA_P Parameter: Timepoint (hr) Value: 6
  misc_feature: MA Experiment 108579 PARAMETER Experiment Name: At_4deg_Cold_cDNA_P Parameter: Tissue Value: Aerial
  misc_feature: MA Experiment ID: 108594 Result: Down-regulated in Transcription
  misc_feature: MA Experiment 108594 PARAMETER Experiment Name: At_Ler-rhl_Root_cDNA_P Parameter: Plant Line Value: null
  misc_feature: MA Experiment ID: 108605 Result: Down-regulated in Transcription
  misc_feature: MA Experiment 108605 PARAMETER Experiment Name: At_100uM_ABA_cDNA_P Parameter: Timepoint (hr) Value: 6
  misc_feature: MA Experiment 108605 PARAMETER Experiment Name: At_100uM_ABA_cDNA_P Parameter: Tissue Value: Aerial
  misc_feature: MA Experiment 108605 PARAMETER Experiment Name: At_100uM_ABA_cDNA_P Parameter: Treatment Value: 100uM ABA vs. No Treatment
  misc_feature: MA Experiment ID: 108609 Result: Down-regulated in Transcription
  misc_feature: MA Experiment 108609 PARAMETER Experiment Name: At_100uM_ABA_cDNA_P Parameter: Timepoint (hr) Value: 24
  misc_feature: MA Experiment 108609 PARAMETER Experiment Name: At_100uM_ABA_cDNA_P Parameter: Tissue Value: Aerial
  misc_feature: MA Experiment 108609 PARAMETER Experiment Name: At_100uM_ABA_cDNA_P Parameter: Treatment Value: 100uM ABA vs. No Treatment
  misc_feature: MA Experiment ID: 20000069 Result: Down-regulated in Transcription
  misc_feature: MA Experiment 20000069 PARAMETER Experiment Name: At_100uM_ABA_Mutants_cDNA_P Parameter: Plant Line Value: CS23
  misc_feature: MA Experiment 20000069 PARAMETER Experiment Name: At_100uM_ABA_Mutants_cDNA_P Parameter: Timepoint (hr) Value: 6
  misc_feature: MA Experiment 20000069 PARAMETER Experiment Name: At_100uM_ABA_Mutants_cDNA_P Parameter: Tissue Value: Aerial
  misc_feature: MA Experiment 20000069 PARAMETER Experiment Name: At_100uM_ABA_Mutants_cDNA_P Parameter: Treatment Value: 100uM ABA vs. No Treatment
  misc_feature: MA Experiment ID: 20000070 Result: Down-regulated in Transcription
  misc_feature: MA Experiment 20000070 PARAMETER Experiment Name: At_100uM_ABA_Mutants_cDNA_P Parameter: Plant Line Value: CS24
  misc_feature: MA Experiment 20000070 PARAMETER Experiment Name: At_100uM_ABA_Mutants_cDNA_P Parameter: Timepoint (hr) Value: 6
  misc_feature: MA Experiment 20000070 PARAMETER Experiment Name: At_100uM_ABA_Mutants_cDNA_P Parameter: Tissue Value: Aerial
  misc_feature: MA Experiment 20000070 PARAMETER Experiment Name: At_100uM_ABA_Mutants_cDNA_P Parameter: Treatment Value: 100uM ABA vs. No Treatment
  misc_feature: MA Experiment ID: 20000071 Result: Down-regulated in Transcription
  misc_feature: MA Experiment 20000071 PARAMETER Experiment Name: At_100uM_ABA_Mutants_cDNA_P Parameter: Plant Line Value: CS8104
  misc_feature: MA Experiment 20000071 PARAMETER Experiment Name: At_100uM_ABA_Mutants_cDNA_P Parameter: Timepoint (hr) Value: 6
  misc_feature: MA Experiment 20000071 PARAMETER Experiment Name: At_100uM_ABA_Mutants_cDNA_P Parameter: Tissue Value: Aerial
  misc_feature: MA Experiment 20000071 PARAMETER Experiment Name: At_100uM_ABA_Mutants_cDNA_P Parameter: Treatment Value: 100uM ABA vs. No Treatment
  misc_feature: MA Experiment ID: 20000086 Result: Down-regulated in Transcription
  misc_feature: MA Experiment 20000086 PARAMETER Experiment Name: At_100uM_ABA_Mutants_cDNA_P Parameter: Plant Line Value: CS22
  misc_feature: MA Experiment 20000086 PARAMETER Experiment Name: At_100uM_ABA_Mutants_cDNA_P Parameter: Timepoint (hr) Value: 6
  misc_feature: MA Experiment 20000086 PARAMETER Experiment Name: At_100uM_ABA_Mutants_cDNA_P Parameter: Tissue Value: Aerial
  misc_feature: MA Experiment 20000086 PARAMETER Experiment Name: At_100uM_ABA_Mutants_cDNA_P Parameter: Treatment Value: 100uM ABA vs. No Treatment
  misc_feature: MA Experiment ID: 20000087 Result: Down-regulated in Transcription
  misc_feature: MA Experiment 20000087 PARAMETER Experiment Name: At_100uM_ABA_Mutants_cDNA_P Parameter: Plant Line Value: WS
  misc_feature: MA Experiment 20000087 PARAMETER Experiment Name: At_100uM_ABA_Mutants_cDNA_P Parameter: Timepoint (hr) Value: 6
  misc_feature: MA Experiment 20000087 PARAMETER Experiment Name: At_100uM_ABA_Mutants_cDNA_P Parameter: Tissue Value: Aerial
  misc_feature: MA Experiment 20000087 PARAMETER Experiment Name: At_100uM_ABA_Mutants_cDNA_P Parameter: Treatment Value: 100uM ABA vs. No Treatment
  misc_feature: MA Experiment ID: 20000088 Result: Down-regulated in Transcription
  misc_feature: MA Experiment 20000088 PARAMETER Experiment Name: At_100uM_ABA_Mutants_cDNA_P Parameter: Plant Line Value: Landsberg
  misc_feature: MA Experiment 20000088 PARAMETER Experiment Name: At_100uM_ABA_Mutants_cDNA_P Parameter: Timepoint (hr) Value: 6
  misc_feature: MA Experiment 20000088 PARAMETER Experiment Name: At_100uM_ABA_Mutants_cDNA_P Parameter: Tissue Value: Aerial
  misc_feature: MA Experiment 20000088 PARAMETER Experiment Name: At_100uM_ABA_Mutants_cDNA_P Parameter: Treatment Value: 100uM ABA vs. No Treatment
  misc_feature: MA Experiment ID: 20000089 Result: Down-regulated in Transcription
  misc_feature: MA Experiment ID: 20000090 Result: Down-regulated in Transcription
  misc_feature: MA Experiment ID: 20000117 Result: Down-regulated in Transcription
  misc_feature: MA Experiment 20000117 PARAMETER Experiment Name: At_100uM_ABA_Mutants_cDNA_P Parameter: Plant Line Value: Columbia
  misc_feature: MA Experiment 20000117 PARAMETER Experiment Name: At_100uM_ABA_Mutants_cDNA_P Parameter: Timepoint (hr) Value: 6
  misc_feature: MA Experiment 20000117 PARAMETER Experiment Name: At_100uM_ABA_Mutants_cDNA_P Parameter: Tissue Value: Aerial
  misc_feature: MA Experiment 20000117 PARAMETER Experiment Name: At_100uM_ABA_Mutants_cDNA_P Parameter: Treatment Value: 100uM ABA vs. No Treatment
  misc_feature: MA Experiment ID: 20000169 Result: Down-regulated in Transcription
  misc_feature: MA Experiment 20000169 PARAMETER Experiment Name: At_100uM_ABA_P Parameter: Age (day) Value: 14
  misc_feature: MA Experiment 20000169 PARAMETER Experiment Name: At_100uM_ABA_P Parameter: Organism Value: A. thaliana
  misc_feature: MA Experiment 20000169 PARAMETER Experiment Name: At_100uM_ABA_P Parameter: Plant Line Value: WS
  misc_feature: MA Experiment 20000169 PARAMETER Experiment Name: At_100uM_ABA_P Parameter: Timepoint (hr) Value: 6
  misc_feature: MA Experiment 20000169 PARAMETER Experiment Name: At_100uM_ABA_P Parameter: Tissue Value: Aerial
  misc_feature: MA Experiment 20000169 PARAMETER Experiment Name: At_100uM_ABA_P Parameter: Treatment Value: 100uM ABA vs. No Treatment
  misc_feature: MA Experiment ID: 20000179 Result: Up-regulated in Transcription
  misc_feature: MA Experiment 20000179 PARAMETER Experiment Name: At_Germinating_Seeds_P Parameter: Age (hr) Value: 6 vs. 0
  misc_feature: MA Experiment 20000179 PARAMETER Experiment Name: At_Germinating_Seeds_P Parameter: Tissue Value: Germinating Seeds
  misc_feature: MA Experiment ID: 20000180 Result: Up-regulated in Transcription
  misc_feature: MA Experiment 20000180 PARAMETER Experiment Name: At_Germinating_Seeds_P Parameter: Age (hr) Value: 24 vs. 0
  misc_feature: MA Experiment 20000180 PARAMETER Experiment Name: At_Germinating_Seeds_P Parameter: Tissue Value: Germinating Seeds
  misc_feature: MA Experiment ID: 20000185 Result: Up-regulated in Transcription
  misc_feature: MA Experiment 20000185 PARAMETER Experiment Name: At_Roots__P Parameter: Age (day) Value: 7 vs. 21
  misc_feature: MA Experiment 20000185 PARAMETER Experiment Name: At_Roots__P Parameter: Organism Value: A. thaliana
  misc_feature: MA Experiment 20000185 PARAMETER Experiment Name: At_Roots__P Parameter: Tissue Value: Roots vs. Whole Plant
  misc_feature: MA Experiment ID: 20000224 Result: Up-regulated in Transcription
  misc_feature: MA Experiment ID: 20000264 Result: Up-regulated in Transcription
  misc_feature: MA Experiment 20000264 PARAMETER Experiment Name: At_Open_Flower_P Parameter: Age (day) Value: 21
  misc_feature: MA Experiment 20000264 PARAMETER Experiment Name: At_Open_Flower_P Parameter: Plant Line Value: WS
  misc_feature: MA Experiment 20000264 PARAMETER Experiment Name: At_Open_Flower_P Parameter: Tissue Value: Open Flower vs. Whole Plant
  misc_feature: MA Experiment ID: 20000286 Result: Up-regulated in Transcription
  misc_feature: MA Experiment 20000286 PARAMETER Experiment Name: At_Open_Flower_P Parameter: Age (day) Value: 21
  misc_feature: MA Experiment 20000286 PARAMETER Experiment Name: At_Open_Flower_P Parameter: Plant Line Value: WS
  misc_feature: MA Experiment 20000286 PARAMETER Experiment Name: At_Open_Flower_P Parameter: Tissue Value: Half Open vs. Whole Plant
  misc_feature: MA Experiment ID: 20000437 Result: Down-regulated in Transcription
  misc_feature: MA Experiment 20000437 PARAMETER Experiment Name: At_Drought_P Parameter: Age (day) Value: 8
  misc_feature: MA Experiment 20000437 PARAMETER Experiment Name: At_Drought_P Parameter: Organism Value: A. thaliana
  misc_feature: MA Experiment 20000437 PARAMETER Experiment Name: At_Drought_P Parameter: Plant Line Value: WS
  misc_feature: MA Experiment 20000437 PARAMETER Experiment Name: At_Drought_P Parameter: Timepoint (hr) Value: 24
  misc_feature: MA Experiment 20000437 PARAMETER Experiment Name: At_Drought_P Parameter: Tissue Value: Whole Plant
  misc_feature: MA Experiment 20000437 PARAMETER Experiment Name: At_Drought_P Parameter: Treatment Value: Drought vs. No Drought
  misc_feature: MA Experiment ID: 20000441 Result: Down-regulated in Transcription
  misc_feature: MA Experiment 20000441 PARAMETER Experiment Name: At_1uM_BR-BRZ__P Parameter: Tissue Value: Shoot Apices
  misc_feature: MA Experiment 20000441 PARAMETER Experiment Name: At_1uM_BR-BRZ__P Parameter: Treatment Value: 1uM BR vs. No Treatment
  misc_feature: MA Experiment ID: 20000443 Result: Down-regulated in Transcription
  misc_feature: MA Experiment 20000443 PARAMETER Experiment Name: At_1uM_BR-BRZ__P Parameter: Tissue Value: Shoot Apices
  misc_feature: MA Experiment 20000443 PARAMETER Experiment Name: At_1uM_BR-BRZ__P Parameter: Treatment Value: 1uM BRZ vs. No Treatment
  misc_feature: MA Experiment ID: 20000453 Result: Down-regulated in Transcription
  misc_feature: MA Experiment 20000453 PARAMETER Experiment Name: At_100uM_ABA_P Parameter: Age (day) Value: 15
  misc_feature: MA Experiment 20000453 PARAMETER Experiment Name: At_100uM_ABA_P Parameter: Organism Value: A. thaliana
  misc_feature: MA Experiment 20000453 PARAMETER Experiment Name: At_100uM_ABA_P Parameter: Plant Line Value: WS
  misc_feature: MA Experiment 20000453 PARAMETER Experiment Name: At_100uM_ABA_P Parameter: Timepoint (hr) Value: 24
  misc_feature: MA Experiment 20000453 PARAMETER Experiment Name: At_100uM_ABA_P Parameter: Tissue Value: Aerial
  misc_feature: MA Experiment 20000453 PARAMETER Experiment Name: At_100uM_ABA_P Parameter: Treatment Value: 100uM ABA vs. No Treatment
  misc_feature: MA Experiment ID: 20000495 Result: Down-regulated in Transcription
  misc_feature: MA Experiment 20000495 PARAMETER Experiment Name: At_Guard_Cells_P Parameter: Harvest Date Value: 8/2/2002
  misc_feature: MA Experiment 20000495 PARAMETER Experiment Name: At_Guard_Cells_P Parameter: Organism Value: A. thaliana
  misc_feature: MA Experiment 20000495 PARAMETER Experiment Name: At_Guard_Cells_P Parameter: Tissue Value: Guard Cells vs. Leaves
  misc_feature: MA Experiment ID: 20000573 Result: Down-regulated in Transcription
  misc_feature: MA Experiment 20000573 PARAMETER Experiment Name: At_100uM_ABA_Mutants__P Parameter: Organism Value: A. thaliana
  misc_feature: MA Experiment 20000573 PARAMETER Experiment Name: At_100uM_ABA_Mutants__P Parameter: Plant Line Value: CS22 vs. Ler wt
  misc_feature: MA Experiment 20000573 PARAMETER Experiment Name: At_100uM_ABA_Mutants__P Parameter: Timepoint (hr) Value: N/A
  misc_feature: MA Experiment 20000573 PARAMETER Experiment Name: At_100uM_ABA_Mutants__P Parameter: Tissue Value: Whole Plant
  misc_feature: MA Experiment 20000573 PARAMETER Experiment Name: At_100uM_ABA_Mutants__P Parameter: Treatment Value: None
  misc_feature: MA Experiment ID: 20000574 Result: Down-regulated in Transcription
  misc_feature: MA Experiment 20000574 PARAMETER Experiment Name: At_100uM_ABA_Mutants__P Parameter: Organism Value: A. thaliana
  misc_feature: MA Experiment 20000574 PARAMETER Experiment Name: At_100uM_ABA_Mutants__P Parameter: Plant Line Value: CS23 vs. Ler wt
  misc_feature: MA Experiment 20000574 PARAMETER Experiment Name: At_100uM_ABA_Mutants__P Parameter: Timepoint (hr) Value: N/A
  misc_feature: MA Experiment 20000574 PARAMETER Experiment Name: At_100uM_ABA_Mutants__P Parameter: Tissue Value: Whole Plant
  misc_feature: MA Experiment 20000574 PARAMETER Experiment Name: At_100uM_ABA_Mutants__P Parameter: Treatment Value: None
  misc_feature: MA Experiment ID: 20001247 Result: Down-regulated in Transcription
  misc_feature: MA Experiment 20001247 PARAMETER Experiment Name: At_Far-red-induction_P Parameter: Age (day) Value: 7
  misc_feature: MA Experiment 20001247 PARAMETER Experiment Name: At_Far-red-induction_P Parameter: Light Value: Far-red vs. White
  misc_feature: MA Experiment 20001247 PARAMETER Experiment Name: At_Far-red-induction_P Parameter: Organism Value: A. thaliana
  misc_feature: MA Experiment 20001247 PARAMETER Experiment Name: At_Far-red-induction_P Parameter: Plant Line Value: Columbia
  misc_feature: MA Experiment 20001247 PARAMETER Experiment Name: At_Far-red-induction_P Parameter: Timepoint (hr) Value: 1
  misc_feature: MA Experiment 20001247 PARAMETER Experiment Name: At_Far-red-induction_P Parameter: Tissue Value: Whole Plant
  misc_feature: MA Experiment ID: 20001450 Result: Down-regulated in Transcription
  misc_feature: MA Experiment 20001450 PARAMETER Experiment Name: At_Far-red-induction_P Parameter: Age (day) Value: 7
  misc_feature: MA Experiment 20001450 PARAMETER Experiment Name: At_Far-red-induction_P Parameter: Light Value: Far-red vs. White
  misc_feature: MA Experiment 20001450 PARAMETER Experiment Name: At_Far-red-induction_P Parameter: Organism Value: A. thaliana
  misc_feature: MA Experiment 20001450 PARAMETER Experiment Name: At_Far-red-induction_P Parameter: Plant Line Value: Columbia
  misc_feature: MA Experiment 20001450 PARAMETER Experiment Name: At_Far-red-induction_P Parameter: Timepoint (hr) Value: 8
  misc_feature: MA Experiment 20001450 PARAMETER Experiment Name: At_Far-red-induction_P Parameter: Tissue Value: Whole Plant
  misc_feature: MA Experiment ID: 20001504 Result: Up-regulated in Transcription
  misc_feature: MA Experiment 20001504 PARAMETER Experiment Name: At_Far-red-enriched_P Parameter: Age (day) Value: 10
  misc_feature: MA Experiment 20001504 PARAMETER Experiment Name: At_Far-red-enriched_P Parameter: Light Value: Far-red enriched vs. White
  misc_feature: MA Experiment 20001504 PARAMETER Experiment Name: At_Far-red-enriched_P Parameter: Organism Value: A. thaliana
  misc_feature: MA Experiment 20001504 PARAMETER Experiment Name: At_Far-red-enriched_P Parameter: Plant Line Value: Columbia
  misc_feature: MA Experiment 20001504 PARAMETER Experiment Name: At_Far-red-enriched_P Parameter: Timepoint (day) Value: 6
  misc_feature: MA Experiment 20001504 PARAMETER Experiment Name: At_Far-red-enriched_P Parameter: Tissue Value: Whole Plant
  misc_feature: MA Experiment ID: 20001556 Result: Up-regulated in Transcription
  misc_feature: MA Experiment 20001556 PARAMETER Experiment Name: At_Drought_Soil_Dry_P Parameter: Age (day) Value: 26
  misc_feature: MA Experiment 20001556 PARAMETER Experiment Name: At_Drought_Soil_Dry_P Parameter: Organism Value: A. thaliana
  misc_feature: MA Experiment 20001556 PARAMETER Experiment Name: At_Drought_Soil_Dry_P Parameter: Plant Line Value: WS
  misc_feature: MA Experiment 20001556 PARAMETER Experiment Name: At_Drought_Soil_Dry_P Parameter: Post Timepoint (hr) Value: None
  misc_feature: MA Experiment 20001556 PARAMETER Experiment Name: At_Drought_Soil_Dry_P Parameter: Post-Treatment Value: None
  misc_feature: MA Experiment 20001556 PARAMETER Experiment Name: At_Drought_Soil_Dry_P Parameter: Timepoint (day) Value: 12
  misc_feature: MA Experiment 20001556 PARAMETER Experiment Name: At_Drought_Soil_Dry_P Parameter: Treatment Value: Drought vs. No Drought
  misc_feature: MA Experiment ID: 20001557 Result: Up-regulated in Transcription
  misc_feature: MA Experiment 20001557 PARAMETER Experiment Name: At_Drought_Soil_Dry_P Parameter: Age (day) Value: 27
  misc_feature: MA Experiment 20001557 PARAMETER Experiment Name: At_Drought_Soil_Dry_P Parameter: Organism Value: A. thaliana
  misc_feature: MA Experiment 20001557 PARAMETER Experiment Name: At_Drought_Soil_Dry_P Parameter: Plant Line Value: WS
  misc_feature: MA Experiment 20001557 PARAMETER Experiment Name: At_Drought_Soil_Dry_P Parameter: Post Timepoint (hr) Value: 3
  misc_feature: MA Experiment 20001557 PARAMETER Experiment Name: At_Drought_Soil_Dry_P Parameter: Post-Treatment Value: Re-Water vs. No Drought
  misc_feature: MA Experiment 20001557 PARAMETER Experiment Name: At_Drought_Soil_Dry_P Parameter: Timepoint (day) Value: 13
  misc_feature: MA Experiment 20001557 PARAMETER Experiment Name: At_Drought_Soil_Dry_P Parameter: Treatment Value: Drought vs. No Drought
  misc_feature: MA Experiment ID: 20001558 Result: Up-regulated in Transcription
  misc_feature: MA Experiment 20001558 PARAMETER Experiment Name: At_Drought_Soil_Dry_P Parameter: Age (day) Value: 27
  misc_feature: MA Experiment 20001558 PARAMETER Experiment Name: At_Drought_Soil_Dry_P Parameter: Organism Value: A. thaliana
  misc_feature: MA Experiment 20001558 PARAMETER Experiment Name: At_Drought_Soil_Dry_P Parameter: Plant Line Value: WS
  misc_feature: MA Experiment 20001558 PARAMETER Experiment Name: At_Drought_Soil_Dry_P Parameter: Post Timepoint (hr) Value: 6
  misc_feature: MA Experiment 20001558 PARAMETER Experiment Name: At_Drought_Soil_Dry_P Parameter: Post-Treatment Value: Re-Water vs. No Drought
  misc_feature: MA Experiment 20001558 PARAMETER Experiment Name: At_Drought_Soil_Dry_P Parameter: Timepoint (day) Value: 13
  misc_feature: MA Experiment 20001558 PARAMETER Experiment Name: At_Drought_Soil_Dry_P Parameter: Treatment Value: Drought vs. No Drought
  misc_feature: MA Experiment ID: 20001911 Result: Down-regulated in Transcription
  misc_feature: MA Experiment 20001911 PARAMETER Experiment Name: At_Drought_Reproduction_P Parameter: Age (day) Value: 40
  misc_feature: MA Experiment 20001911 PARAMETER Experiment Name: At_Drought_Reproduction_P Parameter: Organism Value: A. thaliana
  misc_feature: MA Experiment 20001911 PARAMETER Experiment Name: At_Drought_Reproduction_P Parameter: Plant Line Value: WS
  misc_feature: MA Experiment 20001911 PARAMETER Experiment Name: At_Drought_Reproduction_P Parameter: Timepoint (day) Value: 10
  misc_feature: MA Experiment 20001911 PARAMETER Experiment Name: At_Drought_Reproduction_P Parameter: Tissue Value: Flowers
  misc_feature: MA Experiment 20001911 PARAMETER Experiment Name: At_Drought_Reproduction_P Parameter: Treatment Value: Drought vs. No Drought

SEQ ID NO: 43843 - protein, 353 aa, Arabidopsis thaliana; identical to SEQ ID NO: 35579
  peptide (1)..(353): Ceres Seq. ID no. 13490507
  misc_feature (214)..(313): Pfam Name: 2OG-Fe(II) oxygenase superfamily Pfam Description: 2OG-Fe(II) oxygenase superfamily
  misc_feature (214)..(313): Pfam Name: 2OG-Fe(II) oxygenase superfamily Pfam Description: 2OG-Fe(II) oxygenase superfamily
  misc_feature (18)..(351): Homolog of NCBI NO: 29420435 NR Description: flavonol synthase [Rosa hybrid cultivar
  misc_feature (18)..(351): Homolog of NCBI NO: 2492613 NR Description: Flavonol synthase (FLS)
  misc_feature (60)..(353): Homolog of NCBI NO: 21554244 NR Description: flavonol synthase [Arabidopsis thaliana]
  misc_feature (18)..(351): Homolog of NCBI NO: 31978953 NR Description: flavonol synthase [Petroselinum crispum]
  misc_feature (60)..(353): Homolog of NCBI NO: 15242827 NR Description: flavonol synthase, putative [Arabidopsis
  misc_feature (18)..(351): Homolog of NCBI NO: 29420435 NR Description: flavonol synthase [Rosa hybrid cultivar
  misc_feature (60)..(353): Homolog of NCBI NO: 21554244 NR Description: flavonol synthase [Arabidopsis thaliana]
  misc_feature (60)..(353): Homolog of NCBI NO: 15242827 NR Description: flavonol synthase, putative [Arabidopsis
  misc_feature (18)..(353): Homolog of NCBI NO: 15242339 NR Description: flavonol synthase 1 (FLS1) [Arabidopsis thaliana]
  misc_feature (18)..(351): Homolog of NCBI NO: 14916566 NR Description: Flavonol synthase (FLS) (CitFLS)
  misc_feature (18)..(351): Homolog of NCBI NO: 14916564 NR Description: Flavonol synthase (FLS)
  misc_feature (18)..(351): Homolog of NCBI NO: 1706822 NR Description: Flavonol synthase (FLS)
  misc_feature (18)..(351): Homolog of NCBI NO: 29123532 NR Description: flavonol synthase [Allium cepa]
  misc_feature (18)..(351): Homolog of NCBI NO: 31978953 NR Description: flavonol synthase [Petroselinum crispum]
  misc_feature (18)..(351): Homolog of NCBI NO: 2492613 NR Description: Flavonol synthase (FLS)
  misc_feature (18)..(351): Homolog of NCBI NO: 29123532 NR Description: flavonol synthase [Allium cepa]
  misc_feature (18)..(351): Homolog of NCBI NO: 1706822 NR Description: Flavonol synthase (FLS)
  misc_feature (18)..(351): Homolog of NCBI NO: 14916564 NR Description: Flavonol synthase (FLS)
  misc_feature (18)..(351): Homolog of NCBI NO: 14916566 NR Description: Flavonol synthase (FLS) (CitFLS)
  misc_feature (18)..(353): Homolog of NCBI NO: 15242339 NR Description: flavonol synthase 1 (FLS1) [Arabidopsis thaliana]

SEQ ID NO: 43844 - protein, 336 aa, Arabidopsis thaliana; identical to SEQ ID NO: 35580
  peptide (1)..(336): Ceres Seq. ID no. 13490508
  misc_feature (197)..(296): Pfam Name: 2OG-Fe(II) oxygenase superfamily Pfam Description: 2OG-Fe(II) oxygenase superfamily
  misc_feature (197)..(296): Pfam Name: 2OG-Fe(II) oxygenase superfamily Pfam Description: 2OG-Fe(II) oxygenase superfamily
  misc_feature (1)..(334): Homolog of NCBI NO: 29420435 NR Description: flavonol synthase [Rosa hybrid cultivar
  misc_feature (1)..(334): Homolog of NCBI NO: 2492613 NR Description: Flavonol synthase (FLS)
  misc_feature (43)..(336): Homolog of NCBI NO: 21554244 NR Description: flavonol synthase [Arabidopsis thaliana]
  misc_feature (1)..(334): Homolog of NCBI NO: 31978953 NR Description: flavonol synthase [Petroselinum crispum]
  misc_feature (43)..(336): Homolog of NCBI NO: 15242827 NR Description: flavonol synthase, putative [Arabidopsis
  misc_feature (1)..(334): Homolog of NCBI NO: 29420435 NR Description: flavonol synthase [Rosa hybrid cultivar
  misc_feature (43)..(336): Homolog of NCBI NO: 21554244 NR Description: flavonol synthase [Arabidopsis thaliana]
  misc_feature (43)..(336): Homolog of NCBI NO: 15242827 NR Description: flavonol synthase, putative [Arabidopsis
  misc_feature (1)..(336): Homolog of NCBI NO: 15242339 NR Description: flavonol synthase 1 (FLS1) [Arabidopsis thaliana]
  misc_feature (1)..(334): Homolog of NCBI NO: 14916566 NR Description: Flavonol synthase (FLS) (CitFLS)
  misc_feature (1)..(334): Homolog of NCBI NO: 14916564 NR Description: Flavonol synthase (FLS)
  misc_feature (1)..(334): Homolog of NCBI NO: 1706822 NR Description: Flavonol synthase (FLS)
  misc_feature (1)..(334): Homolog of NCBI NO: 29123532 NR Description: flavonol synthase [Allium cepa]
  misc_feature (1)..(334): Homolog of NCBI NO: 31978953 NR Description: flavonol synthase [Petroselinum crispum]
  misc_feature (1)..(334): Homolog of NCBI NO: 2492613 NR Description: Flavonol synthase (FLS)
  misc_feature (1)..(334): Homolog of NCBI NO: 29123532 NR Description: flavonol synthase [Allium cepa]
  misc_feature (1)..(334): Homolog of NCBI NO: 1706822 NR Description: Flavonol synthase (FLS)
  misc_feature (1)..(334): Homolog of NCBI NO: 14916564 NR Description: Flavonol synthase (FLS)
  misc_feature (1)..(334): Homolog of NCBI NO: 14916566 NR Description: Flavonol synthase (FLS) (CitFLS)
  misc_feature (1)..(336): Homolog of NCBI NO: 15242339 NR Description: flavonol synthase 1 (FLS1) [Arabidopsis thaliana]

SEQ ID NO: 43845 - DNA, 946 bp, Arabidopsis thaliana
  misc_feature (1)..(946): Ceres Seq. ID no. 12562112
gctcttctccttcacggcgaagtgactcacttccatggattcctctctgctctcggcggctacggccgataccttcaacggcaatgcggcggatcaaattcctcctccgttacagcctccgggaacggatatgactggaatttccttcagggatcagctctggatcaattcataccctcttgatcgtaactacatcttcgattacttcgctttgtctcctttctacgatacaacttgcaacaatgagattcttcggagaagatccattcaccctctcgatctctctcacctctcgaagatgacaggtctagaatatatgttaactgatgctactgaaccaaacctgttcgtctttcgtaagcaaaagagagatggtcctgagaaagtcacaccgatgctaacatattatatcttggatggttctatttaccaagctcctcagctttgtagtgtcttcgcagctcgagttagtcggactatttataatatatccaaggctttcactgatgctgcatcgaaattggagaccattagacaagttgatactgaaaaccagaacgaacctgctgagtcgaagcctgctagtgagacagttgatctaaaggaaatgaagcgagtcgatgtcattcttacctcattatatcgcaagttagcgccaccacctccacccccaccctttcctgaaggttatgttagccaagaagcattaggagaaaaggaagagcttggaacacagggaggagagtcacaaccgcctcaagttgatccaattatcgatcaaggtcctgctaaaagaatgaagttctaagctcatcaaaattgtttcttcatctatgcatgtatagaatttttaggtactagcaaaggctcttctactttttcgcattgtttaatctgaactccttacacaattgttgacatgattacttctcataaagtttcgcat

SEQ ID NO: 43846 - protein, 257 aa, Arabidopsis thaliana
  peptide (1)..(257): Ceres Seq. ID no. 12562113
  misc_feature (81)..(256): Homolog of NCBI NO: 11231121 NR Description: hypothetical protein [Macaca fascicularis]
  misc_feature (54)..(212): Homolog of NCBI NO: 28573123 NR Description: CG9473-PB [Drosophila melanogaster]
  misc_feature (32)..(161): Homolog of NCBI NO: 26354242 NR Description: unnamed protein product [Mus musculus]
  misc_feature (32)..(161): Homolog of NCBI NO: 4885481 NR Description: mediator of RNA polymerase II transcription,
  misc_feature (33)..(256): Homolog of NCBI NO: 5360103 NR Description: NY-REN-28 antigen [Homo sapiens]
  misc_feature (32)..(256): Homolog of NCBI NO: 30583885 NR Description: Homo sapiens mediator of RNA polymerase II
  misc_feature (32)..(256): Homolog of NCBI NO: 29840782 NR Description: RNA polymerase transcriptional regulation subunit 6 homolog (Activator-recruited cofactor 33 kDa component)
  misc_feature (32)..(256): Homolog of NCBI NO: 3329506 NR Description: RNA polymerase transcriptional regulation
  misc_feature (32)..(256): Homolog of NCBI NO: 34867365 NR Description: similar to RNA polymerase II transcriptional
  misc_feature (1)..(257): Homolog of NCBI NO: 22331241 NR Description: hypothetical protein
  misc_feature (81)..(256): Homolog of NCBI NO: 11231121 NR Description: hypothetical protein [Macaca fascicularis]
  misc_feature (54)..(212): Homolog of NCBI NO: 28573123 NR Description: CG9473-PB [Drosophila melanogaster]
  misc_feature (32)..(161): Homolog of NCBI NO: 26354242 NR Description: unnamed protein product [Mus musculus]
  misc_feature (32)..(161): Homolog of NCBI NO: 4885481 NR Description: mediator of RNA polymerase II transcription,
  misc_feature (33)..(256): Homolog of NCBI NO: 5360103 NR Description: NY-REN-28 antigen [Homo sapiens]
  misc_feature (32)..(256): Homolog of NCBI NO: 30583885 NR Description: Homo sapiens mediator of RNA polymerase II
  misc_feature (32)..(256): Homolog of NCBI NO: 29840782 NR Description: RNA polymerase transcriptional regulation subunit 6 homolog (Activator-recruited cofactor 33 kDa component)
  misc_feature (32)..(256): Homolog of NCBI NO: 3329506 NR Description: RNA polymerase transcriptional regulation
  misc_feature (32)..(256): Homolog of NCBI NO: 34867365 NR Description: similar to RNA polymerase II transcriptional
  misc_feature (1)..(257): Homolog of NCBI NO: 22331241 NR Description: hypothetical protein
MDSSLLSAATADTFNGNAADQIPPPLQPPGTDMTGISFRDQLWINSYPLDRNYIFDYFALSPFYDTTCNNEILRRRSIHPLDLSHLSKMTGLEYMLTDATEPNLFVFRKQKRDGPEKVTPMLTYYILDGSIYQAPQLCSVFAARVSRTIYNISKAFTDAASKLETIRQVDTENQNEPAESKPASETVDLKEMKRVDVILTSLYRKLAPPPPPPPFPEGYVSQEALGEKEELGTQGGESQPPQVDPIIDQGPAKRMKF

SEQ ID NO: 43847 - protein, 225 aa, Arabidopsis thaliana
  peptide (1)..(225): Ceres Seq. ID no. 12562114
  misc_feature (49)..(224): Homolog of NCBI NO: 11231121 NR Description: hypothetical protein [Macaca fascicularis]
  misc_feature (22)..(180): Homolog of NCBI NO: 28573123 NR Description: CG9473-PB [Drosophila melanogaster]
  misc_feature (1)..(129): Homolog of NCBI NO: 26354242 NR Description: unnamed protein product [Mus musculus]
  misc_feature (1)..(129): Homolog of NCBI NO: 4885481 NR Description: mediator of RNA polymerase II transcription,
  misc_feature (1)..(224): Homolog of NCBI NO: 5360103 NR Description: NY-REN-28 antigen [Homo sapiens]
  misc_feature (1)..(224): Homolog of NCBI NO: 29840782 NR Description: RNA polymerase transcriptional regulation subunit 6 homolog (Activator-recruited cofactor 33 kDa component)
  misc_feature (1)..(224): Homolog of NCBI NO: 30583885 NR Description: Homo sapiens mediator of RNA polymerase II
  misc_feature (1)..(224): Homolog of NCBI NO: 3329506 NR Description: RNA polymerase transcriptional regulation
  misc_feature (1)..(224): Homolog of NCBI NO: 34867365 NR Description: similar to RNA polymerase II transcriptional
  misc_feature (1)..(225): Homolog of NCBI NO: 22331241 NR Description: hypothetical protein
  misc_feature (49)..(224): Homolog of NCBI NO: 11231121 NR Description: hypothetical protein [Macaca fascicularis]
  misc_feature (22)..(180): Homolog of NCBI NO: 28573123 NR Description: CG9473-PB [Drosophila melanogaster]
  misc_feature (1)..(129): Homolog of NCBI NO: 26354242 NR Description: unnamed protein product [Mus musculus]
  misc_feature (1)..(129): Homolog of NCBI NO: 4885481 NR Description: mediator of RNA polymerase II transcription,
  misc_feature (1)..(224): Homolog of NCBI NO: 5360103 NR Description: NY-REN-28 antigen [Homo sapiens]
  misc_feature (1)..(224): Homolog of NCBI NO: 29840782 NR Description: RNA polymerase transcriptional regulation subunit 6 homolog (Activator-recruited cofactor 33 kDa component)
  misc_feature (1)..(224): Homolog of NCBI NO: 30583885 NR Description: Homo sapiens mediator of RNA polymerase II
  misc_feature (1)..(224): Homolog of NCBI NO: 3329506 NR Description: RNA polymerase transcriptional regulation
  misc_feature (1)..(224): Homolog of NCBI NO: 34867365 NR Description: similar to RNA polymerase II transcriptional
  misc_feature (1)..(225): Homolog of NCBI NO: 22331241 NR Description: hypothetical protein
MTGISFRDQLWINSYPLDRNYIFDYFALSPFYDTTCNNEILRRRSIHPLDLSHLSKMTGLEYMLTDATEPNLFVFRKQKRDGPEKVTPMLTYYILDGSIYQAPQLCSVFAARVSRTIYNISKAFTDAASKLETIRQVDTENQNEPAESKPASETVDLKEMKRVDVILTSLYRKLAPPPPPPPFPEGYVSQEALGEKEELGTQGGESQPPQVDPIIDQGPAKRMKF

SEQ ID NO: 43848 - protein, 169 aa, Arabidopsis thaliana
  peptide (1)..(169): Ceres Seq. ID no. 12562115
  misc_feature (1)..(168): Homolog of NCBI NO: 11231121 NR Description: hypothetical protein [Macaca fascicularis]
  misc_feature (1)..(124): Homolog of NCBI NO: 28573123 NR Description: CG9473-PB [Drosophila melanogaster]
  misc_feature (1)..(73): Homolog of NCBI NO: 26354242 NR Description: unnamed protein product [Mus musculus]
  misc_feature (1)..(73): Homolog of NCBI NO: 4885481 NR Description: mediator of RNA polymerase II transcription,
  misc_feature (1)..(168): Homolog of NCBI NO: 5360103 NR Description: NY-REN-28 antigen [Homo sapiens]
  misc_feature (1)..(168): Homolog of NCBI NO: 30583885 NR Description: Homo sapiens mediator of RNA polymerase II
  misc_feature (1)..(168): Homolog of NCBI NO: 29840782 NR Description: RNA polymerase transcriptional regulation subunit 6 homolog (Activator-recruited cofactor 33 kDa component)
  misc_feature (1)..(168): Homolog of NCBI NO: 3329506 NR Description: RNA polymerase transcriptional regulation
  misc_feature (1)..(168): Homolog of NCBI NO: 34867365 NR Description: similar to RNA polymerase II transcriptional
  misc_feature (1)..(169): Homolog of NCBI NO: 22331241 NR Description: hypothetical protein
  misc_feature (1)..(168): Homolog of NCBI NO: 11231121 NR Description: hypothetical protein [Macaca fascicularis]
  misc_feature (1)..(124): Homolog of NCBI NO: 28573123 NR Description: CG9473-PB [Drosophila melanogaster]
  misc_feature (1)..(73): Homolog of NCBI NO: 26354242 NR Description: unnamed protein product [Mus musculus]
  misc_feature (1)..(73): Homolog of NCBI NO: 4885481 NR Description: mediator of RNA polymerase II transcription,
  misc_feature (1)..(168): Homolog of NCBI NO: 5360103 NR Description: NY-REN-28 antigen [Homo sapiens]
  misc_feature (1)..(168): Homolog of NCBI NO: 30583885 NR Description: Homo sapiens mediator of RNA polymerase II
  misc_feature (1)..(168): Homolog of NCBI NO: 29840782 NR Description: RNA polymerase transcriptional regulation subunit 6 homolog (Activator-recruited cofactor 33 kDa component)
  misc_feature (1)..(168): Homolog of NCBI NO: 3329506 NR Description: RNA polymerase transcriptional regulation
  misc_feature (1)..(168): Homolog of NCBI NO: 34867365 NR Description: similar to RNA polymerase II transcriptional
  misc_feature (1)..(169): Homolog of NCBI NO: 22331241 NR Description: hypothetical protein
MTGLEYMLTDATEPNLFVFRKQKRDGPEKVTPMLTYYILDGSIYQAPQLCSVFAARVSRTIYNISKAFTDAASKLETIRQVDTENQNEPAESKPASETVDLKEMKRVDVILTSLYRKLAPPPPPPPFPEGYVSQEALGEKEELGTQGGESQPPQVDPIIDQGPAKRMKF

SEQ ID NO: 43849 - DNA, 1018 bp, Arabidopsis thaliana; identical to SEQ ID NO: 21544
  misc_feature (1)..(1018): Ceres Seq. ID no. 12602461
  misc_feature: MA Experiment ID: 108434 Result: Down-regulated in Transcription
  misc_feature: MA Experiment 108434 PARAMETER Experiment Name: At_Root_Tips_cDNA_P Parameter: Tissue Value: Root Tips
  misc_feature: MA Experiment ID: 108462 Result: Up-regulated in Transcription
  misc_feature: MA Experiment 108462 PARAMETER Experiment Name: At_Germinating_Seeds_cDNA_P Parameter: Age (day) Value: 2 vs. 0
  misc_feature: MA Experiment 108462 PARAMETER Experiment Name: At_Germinating_Seeds_cDNA_P Parameter: Tissue Value: Germinating Seeds
  misc_feature: MA Experiment ID: 108464 Result: Up-regulated in Transcription
  misc_feature: MA Experiment 108464 PARAMETER Experiment Name: At_Germinating_Seeds_cDNA_P Parameter: Age (day) Value: 4 vs. 0
  misc_feature: MA Experiment 108464 PARAMETER Experiment Name: At_Germinating_Seeds_cDNA_P Parameter: Tissue Value: Germinating Seeds
  misc_feature: MA Experiment ID: 108488 Result: Down-regulated in Transcription
  misc_feature: MA Experiment ID: 108577 Result: Down-regulated in Transcription
  misc_feature: MA Experiment 108577 PARAMETER Experiment Name: At_42deg_Heat_cDNA_P Parameter: Temperature (deg C) Value: 42 vs. 22
  misc_feature: MA Experiment 108577 PARAMETER Experiment Name: At_42deg_Heat_cDNA_P Parameter: Timepoint (hr) Value: 6
  misc_feature: MA Experiment 108577 PARAMETER Experiment Name: At_42deg_Heat_cDNA_P Parameter: Tissue Value: Aerial
  misc_feature: MA Experiment ID: 108595 Result: Up-regulated in Transcription
  misc_feature: MA Experiment 108595 PARAMETER Experiment Name: At_Ler-pi_Ovule_cDNA_P Parameter: Plant Line Value: null
  misc_feature: MA Experiment ID: 108608 Result: Up-regulated in Transcription
  misc_feature: MA Experiment 108608 PARAMETER Experiment Name: At_100uM_ABA_cDNA_P Parameter: Timepoint (hr) Value: 1
  misc_feature: MA Experiment 108608 PARAMETER Experiment Name: At_100uM_ABA_cDNA_P Parameter: Tissue Value: Aerial
  misc_feature: MA Experiment 108608 PARAMETER Experiment Name: At_100uM_ABA_cDNA_P Parameter: Treatment Value: 100uM ABA vs. No Treatment
  misc_feature: MA Experiment ID: 20000069 Result: Up-regulated in Transcription
  misc_feature: MA Experiment 20000069 PARAMETER Experiment Name: At_100uM_ABA_Mutants_cDNA_P Parameter: Plant Line Value: CS23
  misc_feature: MA Experiment 20000069 PARAMETER Experiment Name: At_100uM_ABA_Mutants_cDNA_P Parameter: Timepoint (hr) Value: 6
  misc_feature: MA Experiment 20000069 PARAMETER Experiment Name: At_100uM_ABA_Mutants_cDNA_P Parameter: Tissue Value: Aerial
  misc_feature: MA Experiment 20000069 PARAMETER Experiment Name: At_100uM_ABA_Mutants_cDNA_P Parameter: Treatment Value: 100uM ABA vs. No Treatment
  misc_feature: MA Experiment ID: 20000070 Result: Up-regulated in Transcription
  misc_feature: MA Experiment 20000070 PARAMETER Experiment Name: At_100uM_ABA_Mutants_cDNA_P Parameter: Plant Line Value: CS24
  misc_feature: MA Experiment 20000070 PARAMETER Experiment Name: At_100uM_ABA_Mutants_cDNA_P Parameter: Timepoint (hr) Value: 6
  misc_feature: MA Experiment 20000070 PARAMETER Experiment Name: At_100uM_ABA_Mutants_cDNA_P Parameter: Tissue Value: Aerial
  misc_feature: MA Experiment 20000070 PARAMETER Experiment Name: At_100uM_ABA_Mutants_cDNA_P Parameter: Treatment Value: 100uM ABA vs. No Treatment
  misc_feature: MA Experiment ID: 20000071 Result: Up-regulated in Transcription
  misc_feature: MA Experiment 20000071 PARAMETER Experiment Name: At_100uM_ABA_Mutants_cDNA_P Parameter: Plant Line Value: CS8104
  misc_feature: MA Experiment 20000071 PARAMETER Experiment Name: At_100uM_ABA_Mutants_cDNA_P Parameter: Timepoint (hr) Value: 6
  misc_feature: MA Experiment 20000071 PARAMETER Experiment Name: At_100uM_ABA_Mutants_cDNA_P Parameter: Tissue Value: Aerial
  misc_feature: MA Experiment 20000071 PARAMETER Experiment Name: At_100uM_ABA_Mutants_cDNA_P Parameter: Treatment Value: 100uM ABA vs. No Treatment
  misc_feature: MA Experiment ID: 20000086 Result: Up-regulated in Transcription
  misc_feature: MA Experiment 20000086 PARAMETER Experiment Name: At_100uM_ABA_Mutants_cDNA_P Parameter: Plant Line Value: CS22
  misc_feature: MA Experiment 20000086 PARAMETER Experiment Name: At_100uM_ABA_Mutants_cDNA_P Parameter: Timepoint (hr) Value: 6
  misc_feature: MA Experiment 20000086 PARAMETER Experiment Name: At_100uM_ABA_Mutants_cDNA_P Parameter: Tissue Value: Aerial
  misc_feature: MA Experiment 20000086 PARAMETER Experiment Name: At_100uM_ABA_Mutants_cDNA_P Parameter: Treatment Value: 100uM ABA vs. No Treatment
  misc_feature: MA Experiment ID: 20000087 Result: Up-regulated in Transcription
  misc_feature: MA Experiment 20000087 PARAMETER Experiment Name: At_100uM_ABA_Mutants_cDNA_P Parameter: Plant Line Value: WS
  misc_feature: MA Experiment 20000087 PARAMETER Experiment Name: At_100uM_ABA_Mutants_cDNA_P Parameter: Timepoint (hr) Value: 6
  misc_feature: MA Experiment 20000087 PARAMETER Experiment Name: At_100uM_ABA_Mutants_cDNA_P Parameter: Tissue Value: Aerial
  misc_feature: MA Experiment 20000087 PARAMETER Experiment Name: At_100uM_ABA_Mutants_cDNA_P Parameter: Treatment Value: 100uM ABA vs. No Treatment
  misc_feature: MA Experiment ID: 20000088 Result: Up-regulated in Transcription
  misc_feature: MA Experiment 20000088 PARAMETER Experiment Name: At_100uM_ABA_Mutants_cDNA_P Parameter: Plant Line Value: Landsberg
  misc_feature: MA Experiment 20000088 PARAMETER Experiment Name: At_100uM_ABA_Mutants_cDNA_P Parameter: Timepoint (hr) Value: 6
  misc_feature: MA Experiment 20000088 PARAMETER Experiment Name: At_100uM_ABA_Mutants_cDNA_P Parameter: Tissue Value: Aerial
  misc_feature: MA Experiment 20000088 PARAMETER Experiment Name: At_100uM_ABA_Mutants_cDNA_P Parameter: Treatment Value: 100uM ABA vs. No Treatment
  misc_feature: MA Experiment ID: 20000117 Result: Up-regulated in Transcription
  misc_feature: MA Experiment 20000117 PARAMETER Experiment Name: At_100uM_ABA_Mutants_cDNA_P Parameter: Plant Line Value: Columbia
  misc_feature: MA Experiment 20000117 PARAMETER Experiment Name: At_100uM_ABA_Mutants_cDNA_P Parameter: Timepoint (hr) Value: 6
  misc_feature: MA Experiment 20000117 PARAMETER Experiment Name: At_100uM_ABA_Mutants_cDNA_P Parameter: Tissue Value: Aerial
  misc_feature: MA Experiment 20000117 PARAMETER Experiment Name: At_100uM_ABA_Mutants_cDNA_P Parameter: Treatment Value: 100uM ABA vs. No Treatment
  misc_feature: MA Experiment ID: 20000166 Result: Up-regulated in Transcription
  misc_feature: MA Experiment 20000166 PARAMETER Experiment Name: At_100uM_ABA_P Parameter: Age (day) Value: 14
  misc_feature: MA Experiment 20000166 PARAMETER Experiment Name: At_100uM_ABA_P Parameter: Organism Value: A. thaliana
  misc_feature: MA Experiment 20000166 PARAMETER Experiment Name: At_100uM_ABA_P Parameter: Plant Line Value: WS
  misc_feature: MA Experiment 20000166 PARAMETER Experiment Name: At_100uM_ABA_P Parameter: Timepoint (hr) Value: 1
  misc_feature: MA Experiment 20000166 PARAMETER Experiment Name: At_100uM_ABA_P Parameter: Tissue Value: Aerial
  misc_feature: MA Experiment 20000166 PARAMETER Experiment Name: At_100uM_ABA_P Parameter: Treatment Value: 100uM ABA vs. No Treatment
  misc_feature: MA Experiment ID: 20000180 Result: Up-regulated in Transcription
  misc_feature: MA Experiment 20000180 PARAMETER Experiment Name: At_Germinating_Seeds_P Parameter: Age (hr) Value: 24 vs. 0
  misc_feature: MA Experiment 20000180 PARAMETER Experiment Name: At_Germinating_Seeds_P Parameter: Tissue Value: Germinating Seeds
  misc_feature: MA Experiment ID: 20000182 Result: Up-regulated in Transcription
  misc_feature: MA Experiment 20000182 PARAMETER Experiment Name: At_2mM_SA_P Parameter: Age (day) Value: 14
  misc_feature: MA Experiment 20000182 PARAMETER Experiment Name: At_2mM_SA_P Parameter: Organism Value: A. thaliana
  misc_feature: MA Experiment 20000182 PARAMETER Experiment Name: At_2mM_SA_P Parameter: Plant Line Value: WS
  misc_feature: MA Experiment 20000182 PARAMETER Experiment Name: At_2mM_SA_P Parameter: Timepoint (hr) Value: 6
  misc_feature: MA Experiment 20000182 PARAMETER Experiment Name: At_2mM_SA_P Parameter: Tissue Value: Aerial
  misc_feature: MA Experiment 20000182 PARAMETER Experiment Name: At_2mM_SA_P Parameter: Treatment Value: 2mM SA vs. No Treatment
  misc_feature: MA Experiment ID: 20000184 Result: Down-regulated in Transcription
  misc_feature: MA Experiment 20000184 PARAMETER Experiment Name: At_Shoots__P Parameter: Age (day) Value: 7
  misc_feature: MA Experiment 20000184 PARAMETER Experiment Name: At_Shoots__P Parameter: Tissue Value: Shoots vs. Whole Plant
  misc_feature: MA Experiment ID: 20000224 Result: Down-regulated in Transcription
  misc_feature: MA Experiment ID: 20000234 Result: Down-regulated in Transcription
  misc_feature: MA Experiment 20000234 PARAMETER Experiment Name: At_Siliques_P Parameter: Age (day) Value: 21
  misc_feature: MA Experiment 20000234 PARAMETER Experiment Name: At_Siliques_P Parameter: Organism Value: A. thaliana
  misc_feature: MA Experiment 20000234 PARAMETER Experiment Name: At_Siliques_P Parameter: Plant Line Value: WS
  misc_feature: MA Experiment 20000234 PARAMETER Experiment Name: At_Siliques_P Parameter: Tissue Value: Less Than 5mm Siliques vs. Whole Plant
  misc_feature: MA Experiment ID: 20000265 Result: Down-regulated in Transcription
  misc_feature: MA Experiment 20000265 PARAMETER Experiment Name: At_Open_Flower_P Parameter: Age (day) Value: 21
  misc_feature: MA Experiment 20000265 PARAMETER Experiment Name: At_Open_Flower_P Parameter: Plant Line Value: WS
  misc_feature: MA Experiment 20000265 PARAMETER Experiment Name: At_Open_Flower_P Parameter: Tissue Value: Closed Flower vs. Whole Plant
  misc_feature: MA Experiment ID: 20000267 Result: Up-regulated in Transcription
  misc_feature: MA Experiment 20000267 PARAMETER Experiment Name: At_Drought_P Parameter: Age (day) Value: 7
  misc_feature: MA Experiment 20000267 PARAMETER Experiment Name: At_Drought_P Parameter: Organism Value: A. thaliana
  misc_feature: MA Experiment 20000267 PARAMETER Experiment Name: At_Drought_P Parameter: Plant Line Value: WS
  misc_feature: MA Experiment 20000267 PARAMETER Experiment Name: At_Drought_P Parameter: Timepoint (hr) Value: 6
  misc_feature: MA Experiment 20000267 PARAMETER Experiment Name: At_Drought_P Parameter: Tissue Value: Whole Plant
  misc_feature: MA Experiment 20000267 PARAMETER Experiment Name: At_Drought_P Parameter: Treatment Value: Drought vs. No Drought
  misc_feature: MA Experiment ID: 20000268 Result: Up-regulated in Transcription
  misc_feature: MA Experiment 20000268 PARAMETER Experiment Name: At_100mM_NaCl__P Parameter: Age (day) Value: 14
  misc_feature: MA Experiment 20000268 PARAMETER Experiment Name: At_100mM_NaCl__P Parameter: Organism Value: A. thaliana
  misc_feature: MA Experiment 20000268 PARAMETER Experiment Name: At_100mM_NaCl__P Parameter: Plant Line Value: WS
  misc_feature: MA Experiment 20000268 PARAMETER Experiment Name: At_100mM_NaCl__P Parameter: Timepoint (hr) Value: 6
  misc_feature: MA Experiment 20000268 PARAMETER Experiment Name: At_100mM_NaCl__P Parameter: Tissue Value: Whole Plant
  misc_feature: MA Experiment 20000268 PARAMETER Experiment Name: At_100mM_NaCl__P Parameter: Treatment Value: 100mM NaCl vs. No Treatment
  misc_feature: MA Experiment ID: 20000286 Result: Down-regulated in Transcription
  misc_feature: MA Experiment 20000286 PARAMETER Experiment Name: At_Open_Flower_P Parameter: Age (day) Value: 21
  misc_feature: MA Experiment 20000286 PARAMETER Experiment Name: At_Open_Flower_P Parameter: Plant Line Value: WS
  misc_feature: MA Experiment 20000286 PARAMETER Experiment Name: At_Open_Flower_P Parameter: Tissue Value: Half Open vs. Whole Plant
  misc_feature: MA Experiment ID: 20000436 Result: Up-regulated in Transcription
  misc_feature: MA Experiment 20000436 PARAMETER Experiment Name: At_Drought_P Parameter: Age (day) Value: 7
  misc_feature: MA Experiment 20000436 PARAMETER Experiment Name: At_Drought_P Parameter: Organism Value: A. thaliana
  misc_feature: MA Experiment 20000436 PARAMETER Experiment Name: At_Drought_P Parameter: Plant Line Value: WS
  misc_feature: MA Experiment 20000436 PARAMETER Experiment Name: At_Drought_P Parameter: Timepoint (hr) Value: 12
  misc_feature: MA Experiment 20000436 PARAMETER Experiment Name: At_Drought_P Parameter: Tissue Value: Whole Plant
  misc_feature: MA Experiment 20000436 PARAMETER Experiment Name: At_Drought_P Parameter: Treatment Value: Drought vs. No Drought
  misc_feature: MA Experiment ID: 20000437 Result: Up-regulated in Transcription
  misc_feature: MA Experiment 20000437 PARAMETER Experiment Name: At_Drought_P Parameter: Age (day) Value: 8
  misc_feature: MA Experiment 20000437 PARAMETER Experiment Name: At_Drought_P Parameter: Organism Value: A. thaliana
  misc_feature: MA Experiment 20000437 PARAMETER Experiment Name: At_Drought_P Parameter: Plant Line Value: WS
  misc_feature: MA Experiment 20000437 PARAMETER Experiment Name: At_Drought_P Parameter: Timepoint (hr) Value: 24
  misc_feature: MA Experiment 20000437 PARAMETER Experiment Name: At_Drought_P Parameter: Tissue Value: Whole Plant
  misc_feature: MA Experiment 20000437 PARAMETER Experiment Name: At_Drought_P Parameter: Treatment Value: Drought vs. No Drought
  misc_feature: MA Experiment ID: 20000438 Result: Down-regulated in Transcription
  misc_feature: MA Experiment 20000438 PARAMETER Experiment Name: At_Shoots__P Parameter: Age (day) Value: 14
  misc_feature: MA Experiment 20000438 PARAMETER Experiment Name: At_Shoots__P Parameter: Tissue Value: Shoots vs. Whole Plant
  misc_feature: MA Experiment ID: 20000439 Result: Down-regulated in Transcription
  misc_feature: MA Experiment 20000439 PARAMETER Experiment Name: At_Roots__P Parameter: Age (day) Value: 14 vs. 21
  misc_feature: MA Experiment 20000439 PARAMETER Experiment Name: At_Roots__P Parameter: Organism Value: A. thaliana
  misc_feature: MA Experiment 20000439 PARAMETER Experiment Name: At_Roots__P Parameter: Tissue Value: Roots vs. Whole Plant
  misc_feature: MA Experiment ID: 20000451 Result: Down-regulated in Transcription
  misc_feature: MA Experiment 20000451 PARAMETER Experiment Name: At_CS6879_Shoots-Roots_P Parameter: Age (day) Value: 14
  misc_feature: MA Experiment 20000451 PARAMETER Experiment Name: At_CS6879_Shoots-Roots_P Parameter: Organism Value: A. thaliana
  misc_feature: MA Experiment 20000451 PARAMETER Experiment Name: At_CS6879_Shoots-Roots_P Parameter: Plant Line Value: CS6879 vs. WS
  misc_feature: MA Experiment 20000451 PARAMETER Experiment Name: At_CS6879_Shoots-Roots_P Parameter: Tissue Value: Roots
  misc_feature: MA Experiment ID: 20000495 Result: Down-regulated in Transcription
  misc_feature: MA Experiment 20000495 PARAMETER Experiment Name: At_Guard_Cells_P Parameter: Harvest Date Value: 8/2/2002
  misc_feature: MA Experiment 20000495 PARAMETER Experiment Name: At_Guard_Cells_P Parameter: Organism Value: A. thaliana
  misc_feature: MA Experiment 20000495 PARAMETER Experiment Name: At_Guard_Cells_P Parameter: Tissue Value: Guard Cells vs. Leaves
  misc_feature: MA Experiment ID: 20001451 Result: Up-regulated in Transcription
  misc_feature: MA Experiment 20001451 PARAMETER Experiment Name: At_Far-red-induction_P Parameter: Age (day) Value: 7
  misc_feature: MA Experiment 20001451 PARAMETER Experiment Name: At_Far-red-induction_P Parameter: Light Value: Far-red vs. White
  misc_feature: MA Experiment 20001451 PARAMETER Experiment Name: At_Far-red-induction_P Parameter: Organism Value: A. thaliana
  misc_feature: MA Experiment 20001451 PARAMETER Experiment Name: At_Far-red-induction_P Parameter: Plant Line Value: Columbia
  misc_feature: MA Experiment 20001451 PARAMETER Experiment Name: At_Far-red-induction_P Parameter: Timepoint (hr) Value: 24
  misc_feature: MA Experiment 20001451 PARAMETER Experiment Name: At_Far-red-induction_P Parameter: Tissue Value: Whole Plant
  misc_feature: MA Experiment ID: 20001556 Result: Down-regulated in Transcription
  misc_feature: MA Experiment 20001556 PARAMETER Experiment Name: At_Drought_Soil_Dry_P Parameter: Age (day) Value: 26
  misc_feature: MA Experiment 20001556 PARAMETER Experiment Name: At_Drought_Soil_Dry_P Parameter: Organism Value: A. thaliana
  misc_feature: MA Experiment 20001556 PARAMETER Experiment Name: At_Drought_Soil_Dry_P Parameter: Plant Line Value: WS
  misc_feature: MA Experiment 20001556 PARAMETER Experiment Name: At_Drought_Soil_Dry_P Parameter: Post Timepoint (hr) Value: None
  misc_feature: MA Experiment 20001556 PARAMETER Experiment Name: At_Drought_Soil_Dry_P Parameter: Post-Treatment Value: None
  misc_feature: MA Experiment 20001556 PARAMETER Experiment Name: At_Drought_Soil_Dry_P Parameter: Timepoint (day) Value: 12
  misc_feature: MA Experiment 20001556 PARAMETER Experiment Name: At_Drought_Soil_Dry_P Parameter: Treatment Value: Drought vs. No Drought
  misc_feature: MA Experiment ID: 20001557 Result: Down-regulated in Transcription
  misc_feature: MA Experiment 20001557 PARAMETER Experiment Name: At_Drought_Soil_Dry_P Parameter: Age (day) Value: 27
  misc_feature: MA Experiment 20001557 PARAMETER Experiment Name: At_Drought_Soil_Dry_P Parameter: Organism Value: A. thaliana
  misc_feature: MA Experiment 20001557 PARAMETER Experiment Name: At_Drought_Soil_Dry_P Parameter: Plant Line Value: WS
  misc_feature: MA Experiment 20001557 PARAMETER Experiment Name: At_Drought_Soil_Dry_P Parameter: Post Timepoint (hr) Value: 3
  misc_feature: MA Experiment 20001557 PARAMETER Experiment Name: At_Drought_Soil_Dry_P Parameter: Post-Treatment Value: Re-Water vs. No Drought
  misc_feature: MA Experiment 20001557 PARAMETER Experiment Name: At_Drought_Soil_Dry_P Parameter: Timepoint (day) Value: 13
  misc_feature: MA Experiment 20001557 PARAMETER Experiment Name: At_Drought_Soil_Dry_P Parameter: Treatment Value: Drought vs. No Drought
  misc_feature: MA Experiment ID: 20001558 Result: Down-regulated in Transcription
  misc_feature: MA Experiment 20001558 PARAMETER Experiment Name: At_Drought_Soil_Dry_P Parameter: Age (day) Value: 27
  misc_feature: MA Experiment 20001558 PARAMETER Experiment Name: At_Drought_Soil_Dry_P Parameter: Organism Value: A. thaliana
  misc_feature: MA Experiment 20001558 PARAMETER Experiment Name: At_Drought_Soil_Dry_P Parameter: Plant Line Value: WS
  misc_feature: MA Experiment 20001558 PARAMETER Experiment Name: At_Drought_Soil_Dry_P Parameter: Post Timepoint (hr) Value: 6
  misc_feature: MA Experiment 20001558 PARAMETER Experiment Name: At_Drought_Soil_Dry_P Parameter: Post-Treatment Value: Re-Water vs. No Drought
  misc_feature: MA Experiment 20001558 PARAMETER Experiment Name: At_Drought_Soil_Dry_P Parameter: Timepoint (day) Value: 13
  misc_feature: MA Experiment 20001558 PARAMETER Experiment Name: At_Drought_Soil_Dry_P Parameter: Treatment Value: Drought vs. No Drought
  misc_feature: MA Experiment ID: 20001560 Result: Down-regulated in Transcription
  misc_feature: MA Experiment 20001560 PARAMETER Experiment Name: At_Drought_Soil_Dry_P Parameter: Age (day) Value: 28
  misc_feature: MA Experiment 20001560 PARAMETER Experiment Name: At_Drought_Soil_Dry_P Parameter: Organism Value: A. thaliana
  misc_feature: MA Experiment 20001560 PARAMETER Experiment Name: At_Drought_Soil_Dry_P Parameter: Plant Line Value: WS
  misc_feature: MA Experiment 20001560 PARAMETER Experiment Name: At_Drought_Soil_Dry_P Parameter: Post Timepoint (hr) Value: None
  misc_feature: MA Experiment 20001560 PARAMETER Experiment Name: At_Drought_Soil_Dry_P Parameter: Post-Treatment Value: None
  misc_feature: MA Experiment 20001560 PARAMETER Experiment Name: At_Drought_Soil_Dry_P Parameter: Timepoint (day) Value: 14
  misc_feature: MA Experiment 20001560 PARAMETER Experiment Name: At_Drought_Soil_Dry_P Parameter: Treatment Value: Drought vs. No Drought

SEQ ID NO: 43850 - protein, 185 aa, Arabidopsis thaliana [sequence omitted]

SEQ ID NO: 43851 - DNA, 920 bp, Arabidopsis thaliana; identical to SEQ ID NO: 42580
  misc_feature (1)..(920): Ceres Seq. ID no. 12339008
  misc_feature: MA Experiment ID: 108435 Result: Down-regulated in Transcription
  misc_feature: MA Experiment 108435 PARAMETER Experiment Name: At_stm_Mutants_cDNA_P Parameter: Plant Line Value: wt Landsburg vs stm
  misc_feature: MA Experiment 108435 PARAMETER Experiment Name: At_stm_Mutants_cDNA_P Parameter: Tissue Value: Shoot Apical Meristem Region
  misc_feature: MA Experiment ID: 108461 Result: Up-regulated in Transcription
  misc_feature: MA Experiment 108461 PARAMETER Experiment Name: At_Germinating_Seeds_cDNA_P Parameter: Age (day) Value: 1 vs. 0
  misc_feature: MA Experiment 108461 PARAMETER Experiment Name: At_Germinating_Seeds_cDNA_P Parameter: Tissue Value: Germinating Seeds
  misc_feature: MA Experiment ID: 108462 Result: Up-regulated in Transcription
  misc_feature: MA Experiment 108462 PARAMETER Experiment Name: At_Germinating_Seeds_cDNA_P Parameter: Age (day) Value: 2 vs. 0
  misc_feature: MA Experiment 108462 PARAMETER Experiment Name: At_Germinating_Seeds_cDNA_P Parameter: Tissue Value: Germinating Seeds
  misc_feature: MA Experiment ID: 108464 Result: Up-regulated in Transcription
  misc_feature: MA Experiment 108464 PARAMETER Experiment Name: At_Germinating_Seeds_cDNA_P Parameter: Age (day) Value: 4 vs. 0
  misc_feature: MA Experiment 108464 PARAMETER Experiment Name: At_Germinating_Seeds_cDNA_P Parameter: Tissue Value: Germinating Seeds
  misc_feature: MA Experiment ID: 108595 Result: Down-regulated in Transcription
  misc_feature: MA Experiment 108595 PARAMETER Experiment Name: At_Ler-pi_Ovule_cDNA_P Parameter: Plant Line Value: null
  misc_feature: MA Experiment ID: 20000087 Result: Down-regulated in Transcription
  misc_feature: MA Experiment 20000087 PARAMETER Experiment Name: At_100uM_ABA_Mutants_cDNA_P Parameter: Plant Line Value: WS
  misc_feature: MA Experiment 20000087 PARAMETER Experiment Name: At_100uM_ABA_Mutants_cDNA_P Parameter: Timepoint (hr) Value: 6
  misc_feature: MA Experiment 20000087 PARAMETER Experiment Name: At_100uM_ABA_Mutants_cDNA_P Parameter: Tissue Value: Aerial
  misc_feature: MA Experiment 20000087 PARAMETER Experiment Name: At_100uM_ABA_Mutants_cDNA_P Parameter: Treatment Value: 100uM ABA vs. No Treatment
  misc_feature: MA Experiment ID: 20000224 Result: Down-regulated in Transcription

SEQ ID NO: 43852 - protein, 266 aa, Arabidopsis thaliana; identical to SEQ ID NO: 42581
  peptide (1)..(266): Ceres Seq. ID no. 12339009
  misc_feature (102)..(266): Pfam Name: Manganese-stabilising protein / photosystem II Pfam Description: Manganese-stabilising protein / photosystem II
  misc_feature (102)..(266): Pfam Name: Manganese-stabilising protein / photosystem II Pfam Description: Manganese-stabilising protein / photosystem II
  misc_feature (12)..(121): Homolog of NCBI NO: 11133881 NR Description: Oxygen-evolving enhancer protein 1, chloroplast (OEE1) (33 kDa subunit of oxygen evolving system of photosystem (OEC 33 kDa subunit) (33 kDa thylakoid membrane protein) protein
  misc_feature (102)..(266): Homolog of NCBI NO: 11133881 NR Description: Oxygen-evolving enhancer protein 1, chloroplast (OEE1) (33 kDa subunit of oxygen evolving system of photosystem (OEC 33 kDa subunit) (33 kDa thylakoid membrane protein) protein
  misc_feature (12)..(121): Homolog of NCBI NO: 131384 NR Description: Oxygen-evolving enhancer protein 1, chloroplast (OEE1) (33 kDa subunit of oxygen evolving system of photosystem
  misc_feature (102)..(266): Homolog of NCBI NO: 131384 NR Description: Oxygen-evolving enhancer protein 1, chloroplast (OEE1) (33 kDa subunit of oxygen evolving system of photosystem
  misc_feature (12)..(121): Homolog of NCBI NO: 12644171 NR Description: Oxygen-evolving enhancer protein 1, chloroplast (OEE1) (33 kDa subunit of oxygen evolving system of photosystem (OEC 33 kDa subunit) (33 kDa thylakoid membrane protein) protein
  misc_feature (12)..(121): Homolog of NCBI NO: 11133881 NR Description: Oxygen-evolving enhancer protein 1, chloroplast (OEE1) (33 kDa subunit of oxygen evolving system of photosystem (OEC 33 kDa subunit) (33 kDa thylakoid membrane protein) protein
  misc_feature (12)..(121): Homolog of NCBI NO: 131384 NR Description: Oxygen-evolving enhancer protein 1, chloroplast (OEE1) (33 kDa subunit of oxygen evolving system of photosystem
  misc_feature (12)..(121): Homolog of NCBI NO: 12644171 NR Description: Oxygen-evolving enhancer protein 1, chloroplast (OEE1) (33 kDa subunit of oxygen evolving system of photosystem (OEC 33 kDa subunit) (33 kDa thylakoid membrane protein) protein
  misc_feature (102)..(266): Homolog of NCBI NO: 30013657 NR Description: oxygen evolving complex 33 kDa photosystem II
  misc_feature (12)..(121): Homolog of NCBI NO: 30013657 NR Description: oxygen evolving complex 33 kDa photosystem II
  misc_feature (102)..(266): Homolog of NCBI NO: 11134054 NR Description: Oxygen-evolving enhancer protein 1, chloroplast (OEE1) (33 kDa subunit of oxygen evolving system of photosystem (OEC 33 kDa subunit) (33 kDa thylakoid membrane protein) kDa
  misc_feature (12)..(121): Homolog of NCBI NO: 11134054 NR Description: Oxygen-evolving enhancer protein 1, chloroplast (OEE1) (33 kDa subunit of oxygen evolving system of photosystem (OEC 33 kDa subunit) (33 kDa thylakoid membrane protein) kDa
  misc_feature (102)..(266): Homolog of NCBI NO: 12644171 NR Description: Oxygen-evolving enhancer protein 1, chloroplast (OEE1) (33 kDa subunit of oxygen evolving system of photosystem (OEC 33 kDa subunit) (33 kDa thylakoid membrane protein) protein
  misc_feature (102)..(266): Homolog of NCBI NO: 131384 NR Description: Oxygen-evolving enhancer protein 1, chloroplast (OEE1) (33 kDa subunit of oxygen evolving system of photosystem
  misc_feature (102)..(266): Homolog of NCBI NO: 11133881 NR Description: Oxygen-evolving enhancer protein 1, chloroplast (OEE1) (33 kDa subunit of oxygen evolving system of photosystem (OEC 33 kDa subunit) (33 kDa thylakoid membrane protein) protein
  misc_feature (102)..(266): Homolog of NCBI NO: 12644171 NR Description: Oxygen-evolving enhancer protein 1, chloroplast (OEE1) (33 kDa subunit of oxygen evolving system of photosystem (OEC 33 kDa subunit) (33 kDa thylakoid membrane protein) protein
  misc_feature (12)..(121): Homolog of NCBI NO: 11134054 NR Description: Oxygen-evolving enhancer protein 1, chloroplast (OEE1) (33 kDa subunit of oxygen evolving system of photosystem (OEC 33 kDa subunit) (33 kDa thylakoid membrane protein) kDa
  misc_feature (102)..(266): Homolog of NCBI NO: 11134054 NR Description: Oxygen-evolving enhancer protein 1, chloroplast (OEE1) (33 kDa subunit of oxygen evolving system of photosystem (OEC 33 kDa subunit) (33 kDa thylakoid membrane protein) kDa
  misc_feature (12)..(121): Homolog of NCBI NO: 30013657 NR Description: oxygen evolving complex 33 kDa photosystem II
  misc_feature (102)..(266): Homolog of NCBI NO: 30013657 NR Description: oxygen evolving complex 33 kDa photosystem II

SEQ ID NO: 43853 - protein, 255 aa, Arabidopsis thaliana; identical to SEQ ID NO: 42582
  peptide (1)..(255): Ceres Seq. ID no. 12339010
  misc_feature (91)..(255): Pfam Name: Manganese-stabilising protein / photosystem II Pfam Description: Manganese-stabilising protein / photosystem II
  misc_feature (91)..(255): Pfam Name: Manganese-stabilising protein / photosystem II Pfam Description: Manganese-stabilising protein / photosystem II
  misc_feature (1)..(110): Homolog of NCBI NO: 11133881 NR Description: Oxygen-evolving enhancer protein 1, chloroplast (OEE1) (33 kDa subunit of oxygen evolving system of photosystem (OEC 33 kDa subunit) (33 kDa thylakoid membrane protein) protein
  misc_feature (91)..(255): Homolog of NCBI NO: 11133881 NR Description: Oxygen-evolving enhancer protein 1, chloroplast (OEE1) (33 kDa subunit of oxygen evolving system of photosystem (OEC 33 kDa subunit) (33 kDa thylakoid membrane protein) protein
  misc_feature (1)..(110): Homolog of NCBI NO: 131384 NR Description: Oxygen-evolving enhancer protein 1, chloroplast (OEE1) (33 kDa subunit of oxygen evolving system of photosystem
  misc_feature (91)..(255): Homolog of NCBI NO: 131384 NR Description: Oxygen-evolving enhancer protein 1, chloroplast (OEE1) (33 kDa subunit of oxygen evolving system of photosystem
  misc_feature (1)..(110): Homolog of NCBI NO: 12644171 NR Description: Oxygen-evolving enhancer protein 1, chloroplast (OEE1) (33 kDa subunit of oxygen evolving system of photosystem (OEC 33 kDa subunit) (33 kDa thylakoid membrane protein) protein
  misc_feature (1)..(110): Homolog of NCBI NO: 11133881 NR Description: Oxygen-evolving enhancer protein 1, chloroplast (OEE1) (33 kDa subunit of oxygen evolving system of photosystem (OEC 33 kDa subunit) (33 kDa thylakoid membrane protein) protein
  misc_feature (1)..(110): Homolog of NCBI NO: 131384 NR Description: Oxygen-evolving enhancer protein 1, chloroplast (OEE1) (33 kDa subunit of oxygen evolving system of photosystem
  misc_feature (1)..(110): Homolog of NCBI NO: 12644171 NR Description: Oxygen-evolving enhancer protein 1, chloroplast (OEE1) (33 kDa subunit of oxygen evolving system of photosystem (OEC 33 kDa subunit) (33 kDa thylakoid membrane protein) protein
  misc_feature (91)..(255): Homolog of NCBI NO: 30013657 NR Description: oxygen evolving complex 33 kDa photosystem II
  misc_feature (1)..(110): Homolog of NCBI NO: 30013657 NR Description: oxygen evolving complex 33 kDa photosystem II
  misc_feature (91)..(255): Homolog of NCBI NO: 11134054 NR Description: Oxygen-evolving enhancer protein 1, chloroplast (OEE1) (33 kDa subunit of oxygen evolving system of photosystem (OEC 33 kDa subunit) (33 kDa thylakoid membrane protein) kDa
  misc_feature (1)..(110): Homolog of NCBI NO: 11134054 NR Description: Oxygen-evolving enhancer protein 1, chloroplast (OEE1) (33 kDa subunit of oxygen evolving system of photosystem (OEC 33 kDa subunit) (33 kDa thylakoid membrane protein) kDa
  misc_feature (91)..(255): Homolog of NCBI NO: 12644171 NR Description: Oxygen-evolving enhancer protein 1, chloroplast (OEE1) (33 kDa subunit of oxygen evolving system of photosystem (OEC 33 kDa subunit) (33 kDa thylakoid membrane protein) protein
  misc_feature (91)..(255): Homolog of NCBI NO: 131384 NR Description: Oxygen-evolving enhancer protein 1, chloroplast (OEE1) (33 kDa subunit of oxygen evolving system of photosystem
  misc_feature (91)..(255): Homolog of NCBI NO: 11133881 NR Description: Oxygen-evolving enhancer protein 1, chloroplast (OEE1) (33 kDa subunit of oxygen evolving system of photosystem (OEC 33 kDa subunit) (33 kDa thylakoid membrane protein) protein
  misc_feature (91)..(255): Homolog of NCBI NO: 12644171 NR Description: Oxygen-evolving enhancer protein 1, chloroplast (OEE1) (33 kDa subunit of oxygen evolving system of photosystem (OEC 33 kDa subunit) (33 kDa thylakoid membrane protein) protein
  misc_feature (1)..(110): Homolog of NCBI NO: 11134054 NR Description: Oxygen-evolving enhancer protein 1, chloroplast (OEE1) (33 kDa subunit of oxygen evolving system of photosystem (OEC 33 kDa subunit) (33 kDa thylakoid membrane protein) kDa
  misc_feature (91)..(255): Homolog of NCBI NO: 11134054 NR Description: Oxygen-evolving enhancer protein 1, chloroplast (OEE1) (33 kDa subunit of oxygen evolving system of photosystem (OEC 33 kDa subunit) (33 kDa thylakoid membrane protein) kDa
  misc_feature (1)..(110): Homolog of NCBI NO: 30013657 NR Description: oxygen evolving complex 33 kDa photosystem II
  misc_feature (91)..(255): Homolog of NCBI NO: 30013657 NR Description: oxygen evolving complex 33 kDa photosystem II

SEQ ID NO: 43854 - DNA, 867 bp, Arabidopsis thaliana
  misc_feature (1)..(867): Ceres Seq. ID no. 12559066
  misc_feature: MA Experiment ID: 20000227 Result: Down-regulated in Transcription
  misc_feature: MA Experiment 20000227 PARAMETER Experiment Name: At_Root-Tips-vs-Tops_P Parameter: Tissue Value: Root Tips vs. Root Tops
tcttctcctgaatctctttacctttttacgttgacattgatcctcgcagtgtctgattttgatcgaagaagaagaagagatcgggattttttcgcggttgtatatcgcctatggacgaggtgatgacagcggcggacgttggttcgttaggtggcggcaatagggcgttgtacggatctcctccgtcgcataatctgtttcctcacaatctcccaatcttctccgcttttcttgccttcgctcttgctcagttcctcaaagtcttcactaattggtacaaagaaaagaggtgggactctaaacgtatgattagttctggtggaatgccttcttctcattctgctactgtcactgccttagctgttgccattggctttgaagaaggagctggagcaccagcttttgctattgcagttgtcttggcttgcgttgttatgtatgatgcctctggtgtcaggcttcatgctggtcgtcaagccgagctgctgaatcaaattgtttgtgagtttcctccggagcatccattatcaacagttagaccattgcgtgaactgcttggccacactcctatccaggttgcagcaggtgggattttaggatgcgtggtagcttacttaatgaggagctcaagctagtcagtctctctacacaagaacaaatcccgaattcttttgaaatcatagacccttcaggtactaagatagattcagcgatatcaagtgacgctagattattggagtaaatggaaattgttaaatctgtgtaatatatagatgatcttagttagacttgtcattgtttaagcttacgccttctcaacattctctctctctctatatatatatatataatctctctatttcctct

SEQ ID NO: 43855 - protein, 174 aa, Arabidopsis thaliana
  peptide (1)..(174): Ceres Seq. ID no. 12559067
  misc_feature (27)..(173): Pfam Name: Divergent PAP2 family Pfam Description: Divergent PAP2 family
  misc_feature (35)..(167): Homolog of NCBI NO: 18412127 NR Description: putative protein
  misc_feature (33)..(156): Homolog of NCBI NO: 9743358 NR Description: F21J9.1 [Arabidopsis thaliana]
  misc_feature (33)..(167): Homolog of NCBI NO: 7486375 NR Description: hypothetical protein F3I6.29 - Arabidopsis
  misc_feature (23)..(157): Homolog of NCBI NO: 12324675 NR Description: unknown protein [Arabidopsis thaliana]
  misc_feature (33)..(171): Homolog of NCBI NO: 38344227 NR Description: OJ991113_30.3 [Oryza sativa (japonica
  misc_feature (33)..(167): Homolog of NCBI NO: 21555270 NR Description: unknown [Arabidopsis thaliana]
  misc_feature (33)..(167): Homolog of NCBI NO: 18395459 NR Description: expressed protein
  misc_feature (23)..(170): Homolog of NCBI NO: 15220480 NR Description: F12A21.27; protein id: At1g67600.1, supported by
  misc_feature (5)..(156): Homolog of NCBI NO: 11994397 NR Description: gb|AAB61516.1~gene_id:MIL23.18~similar to unknown
  misc_feature (1)..(174): Homolog of NCBI NO: 30686309 NR Description: expressed protein [Arabidopsis thaliana]
MDEVMTAADVGSLGGGNRALYGSPPSHNLFPHNLPIFSAFLAFALAQFLKVFTNWYKEKRWDSKRMISSGGMPSSHSATVTALAVAIGFEEGAGAPAFAIAVVLACVVMYDASGVRLHAGRQAELLNQIVCEFPPEHPLSTVRPLRELLGHTPIQVAAGGILGCVVAYLMRSSS

SEQ ID NO: 43856 - protein, 170 aa, Arabidopsis thaliana
  peptide (1)..(170): Ceres Seq. ID no. 12559068
  misc_feature (23)..(169): Pfam Name: Divergent PAP2 family Pfam Description: Divergent PAP2 family
  misc_feature (31)..(163): Homolog of NCBI NO: 18412127 NR Description: putative protein
  misc_feature (29)..(152): Homolog of NCBI NO: 9743358 NR Description: F21J9.1 [Arabidopsis thaliana]
  misc_feature (29)..(163): Homolog of NCBI NO: 7486375 NR Description: hypothetical protein F3I6.29 - Arabidopsis
  misc_feature (19)..(153): Homolog of NCBI NO: 12324675 NR Description: unknown protein [Arabidopsis thaliana]
  misc_feature (29)..(167): Homolog of NCBI NO: 38344227 NR Description: OJ991113_30.3 [Oryza sativa (japonica
  misc_feature (29)..(163): Homolog of NCBI NO: 21555270 NR Description: unknown [Arabidopsis thaliana]
  misc_feature (29)..(163): Homolog of NCBI NO: 18395459 NR Description: expressed protein
  misc_feature (19)..(166): Homolog of NCBI NO: 15220480 NR Description: F12A21.27; protein id: At1g67600.1, supported by
  misc_feature (1)..(152): Homolog of NCBI NO: 11994397 NR Description: gb|AAB61516.1~gene_id:MIL23.18~similar to unknown
  misc_feature (1)..(170): Homolog of NCBI NO: 30686309 NR Description: expressed protein [Arabidopsis thaliana]
MTAADVGSLGGGNRALYGSPPSHNLFPHNLPIFSAFLAFALAQFLKVFTNWYKEKRWDSKRMISSGGMPSSHSATVTALAVAIGFEEGAGAPAFAIAVVLACVVMYDASGVRLHAGRQAELLNQIVCEFPPEHPLSTVRPLRELLGHTPIQVAAGGILGCVVAYLMRSSS

SEQ ID NO: 43857 - protein, 109 aa, Arabidopsis thaliana
  peptide (1)..(109): Ceres Seq. ID no. 12559069
  misc_feature (1)..(108): Pfam Name: Divergent PAP2 family Pfam Description: Divergent PAP2 family
  misc_feature (1)..(102): Homolog of NCBI NO: 18412127 NR Description: putative protein
  misc_feature (1)..(91): Homolog of NCBI NO: 9743358 NR Description: F21J9.1 [Arabidopsis thaliana]
  misc_feature (1)..(102): Homolog of NCBI NO: 7486375 NR Description: hypothetical protein F3I6.29 - Arabidopsis
  misc_feature (1)..(92): Homolog of NCBI NO: 12324675 NR Description: unknown protein [Arabidopsis thaliana]
  misc_feature (1)..(106): Homolog of NCBI NO: 38344227 NR Description: OJ991113_30.3 [Oryza sativa (japonica
  misc_feature (1)..(102): Homolog of NCBI NO: 21555270 NR Description: unknown [Arabidopsis thaliana]
  misc_feature (1)..(102): Homolog of NCBI NO: 18395459 NR Description: expressed protein
  misc_feature (1)..(105): Homolog of NCBI NO: 15220480 NR Description: F12A21.27; protein id: At1g67600.1, supported by
  misc_feature (1)..(91): Homolog of NCBI NO: 11994397 NR Description: gb|AAB61516.1~gene_id:MIL23.18~similar to unknown
  misc_feature (1)..(109): Homolog of NCBI NO: 30686309 NR Description: expressed protein [Arabidopsis thaliana]
MISSGGMPSSHSATVTALAVAIGFEEGAGAPAFAIAVVLACVVMYDASGVRLHAGRQAELLNQIVCEFPPEHPLSTVRPLRELLGHTPIQVAAGGILGCVVAYLMRSSS

SEQ ID NO: 43858 - DNA, 1035 bp, Arabidopsis thaliana
  misc_feature (1)..(1035): Ceres Seq. ID no. 13592062
  misc_feature: MA Experiment ID: 20000179 Result: Down-regulated in Transcription
  misc_feature: MA Experiment 20000179 PARAMETER Experiment Name: At_Germinating_Seeds_P Parameter: Age (hr) Value: 6 vs. 0
  misc_feature: MA Experiment 20000179 PARAMETER Experiment Name: At_Germinating_Seeds_P Parameter: Tissue Value: Germinating Seeds
aagccagttctcggagcaatcaaatctataagaaaagaatcgtcgccggtgaagagaaaaaaccatagaagcgatggatccgcagctaactgaagtttcacagcagttcgagagattcaaggcggcgtttgcgaggaaggattacaatacctgtagcgatctgttgtctcagcttaaggttcttcttaccaaattcacaagtcttcctccattgttcgagaattcacctaatgcagccaaggaattgactattgcaagggacatttatgagcatgctgttgttctaagcgtcaaaaccgaggatcaagatgcttttgagagagatttcttccagctgaaaccttactatgtggatgccaggaaccgtattcctcagtctccacaggagaatcttatcctgggtcttaaccttctgaggctgctggtacaaaatagaattgctgaattccacaccgagcttgaattactttcatcagctacactagaggatccttgcatcaagcatgcagtagagcttgagcaatccttcatggagggtgcctataaccgtgtgttgagtgctagacagaccgcgcctgatgcaacttacgtctatttcatggatctcttggcaaagaccataagagatgaaatagctggatgcagcgagaaagcttatgattatgtctctatcagcgatgcccggcagatgttgttgttctcttctgatcaagaactcttaacctatgtcacagatgagcatcctgagtgggaagtgaaggaagggtttgttgtcttccagaaagccaaagaaactgcaccgtgcaaagagattccgtctctgcaactcatcaaccagactctaagctacgccagagagctggagcgtatcgtgtaagattcgacttttctcactgcttgtctcttctcttctgttatgttcctggaaatctctgggtcagaaaactttgttatcatgtaatgaccgatattgagcgactcagtattttctccgggtcaatgagactttgttgtgatatcaatctgtttttccat

SEQ ID NO: 43859 - protein, 267 aa, Arabidopsis thaliana [sequence omitted]

SEQ ID NO: 43860 - DNA, 1762 bp, Arabidopsis thaliana
  misc_feature (1)..(1762): Ceres Seq. ID no. 12576067
  misc_feature: MA Experiment ID: 20000179 Result: Up-regulated in Transcription
  misc_feature: MA Experiment 20000179 PARAMETER Experiment Name: At_Germinating_Seeds_P Parameter: Age (hr) Value: 6 vs. 0
  misc_feature: MA Experiment 20000179 PARAMETER Experiment Name: At_Germinating_Seeds_P Parameter: Tissue Value: Germinating Seeds
  misc_feature: MA Experiment ID: 20000180 Result: Up-regulated in Transcription
  misc_feature: MA Experiment 20000180 PARAMETER Experiment Name: At_Germinating_Seeds_P Parameter: Age (hr) Value: 24 vs. 0
  misc_feature: MA Experiment 20000180 PARAMETER Experiment Name: At_Germinating_Seeds_P Parameter: Tissue Value: Germinating Seeds
  misc_feature: MA Experiment ID: 20000185 Result: Down-regulated in Transcription
  misc_feature: MA Experiment 20000185 PARAMETER Experiment Name: At_Roots__P Parameter: Age (day) Value: 7 vs. 21
  misc_feature: MA Experiment 20000185 PARAMETER Experiment Name: At_Roots__P Parameter: Organism Value: A. thaliana
  misc_feature: MA Experiment 20000185 PARAMETER Experiment Name: At_Roots__P Parameter: Tissue Value: Roots vs. Whole Plant
  misc_feature: MA Experiment ID: 20000227 Result: Up-regulated in Transcription
  misc_feature: MA Experiment 20000227 PARAMETER Experiment Name: At_Root-Tips-vs-Tops_P Parameter: Tissue Value: Root Tips vs. Root Tops
  misc_feature: MA Experiment ID: 20000265 Result: Up-regulated in Transcription
  misc_feature: MA Experiment 20000265 PARAMETER Experiment Name: At_Open_Flower_P Parameter: Age (day) Value: 21
  misc_feature: MA Experiment 20000265 PARAMETER Experiment Name: At_Open_Flower_P Parameter: Plant Line Value: WS
  misc_feature: MA Experiment 20000265 PARAMETER Experiment Name: At_Open_Flower_P Parameter: Tissue Value: Closed Flower vs. Whole Plant
  misc_feature: MA Experiment ID: 20000286 Result: Up-regulated in Transcription
  misc_feature: MA Experiment 20000286 PARAMETER Experiment Name: At_Open_Flower_P Parameter: Age (day) Value: 21
  misc_feature: MA Experiment 20000286 PARAMETER Experiment Name: At_Open_Flower_P Parameter: Plant Line Value: WS
  misc_feature: MA Experiment 20000286 PARAMETER Experiment Name: At_Open_Flower_P Parameter: Tissue Value: Half Open vs. Whole Plant
  misc_feature: MA Experiment ID: 20000439 Result: Down-regulated in Transcription
  misc_feature: MA Experiment 20000439 PARAMETER Experiment Name: At_Roots__P Parameter: Age (day) Value: 14 vs. 21
  misc_feature: MA Experiment 20000439 PARAMETER Experiment Name: At_Roots__P Parameter: Organism Value: A. thaliana
  misc_feature: MA Experiment 20000439 PARAMETER Experiment Name: At_Roots__P Parameter: Tissue Value: Roots vs. Whole Plant
  misc_feature: MA Experiment ID: 20000794 Result: Up-regulated in Transcription
  misc_feature: MA Experiment 20000794 PARAMETER Experiment Name: At_Petals_P Parameter: Age (day) Value: 23-25 days
  misc_feature: MA Experiment 20000794 PARAMETER Experiment Name: At_Petals_P Parameter: Plant Line Value: WS
  misc_feature: MA Experiment 20000794 PARAMETER Experiment Name: At_Petals_P Parameter: Tissue Value: Petals vs. Whole plant
  misc_feature: MA Experiment ID: 20001247 Result: Down-regulated in Transcription
  misc_feature: MA Experiment 20001247 PARAMETER Experiment Name: At_Far-red-induction_P Parameter: Age (day) Value: 7
  misc_feature: MA Experiment 20001247 PARAMETER Experiment Name: At_Far-red-induction_P Parameter: Light Value: Far-red vs. White
  misc_feature: MA Experiment 20001247 PARAMETER Experiment Name: At_Far-red-induction_P Parameter: Organism Value: A. thaliana
  misc_feature: MA Experiment 20001247 PARAMETER Experiment Name: At_Far-red-induction_P Parameter: Plant Line Value: Columbia
  misc_feature: MA Experiment 20001247 PARAMETER Experiment Name: At_Far-red-induction_P Parameter: Timepoint (hr) Value: 1
  misc_feature: MA Experiment 20001247 PARAMETER Experiment Name: At_Far-red-induction_P Parameter: Tissue Value: Whole Plant
  misc_feature: MA Experiment ID: 20001248 Result: Down-regulated in Transcription
  misc_feature: MA Experiment 20001248 PARAMETER Experiment Name: At_Far-red-induction_P Parameter: Age (day) Value: 7
  misc_feature: MA Experiment 20001248 PARAMETER Experiment Name: At_Far-red-induction_P Parameter: Light Value: Far-red vs. White
  misc_feature: MA Experiment 20001248 PARAMETER Experiment Name: At_Far-red-induction_P Parameter: Organism Value: A. thaliana
  misc_feature: MA Experiment 20001248 PARAMETER Experiment Name: At_Far-red-induction_P Parameter: Plant Line Value: Columbia
  misc_feature: MA Experiment 20001248 PARAMETER Experiment Name: At_Far-red-induction_P Parameter: Timepoint (hr) Value: 4
  misc_feature: MA Experiment 20001248 PARAMETER Experiment Name: At_Far-red-induction_P Parameter: Tissue Value: Whole Plant
agtatagaaacgtttaaaaacatacaacaaacttttatcatctctttttgtgacaggcccacactatcaattcgaaaagtctaaacaaaagtcgccgtcatgaaagtagaacttgtgttcataccatcgccgggcgttggccatatccgagcaacaacggcgttagcaaagcttctcgttgccagcgacaaccgcctctccgtcactctcatcgtcattccttcacgagtctccgacgacgcttcttcctccgtctacacgaactccgaagaccgtctccgctacatcctcctccccgcccgagatcaaactactgatctcgtatcttacatcgacagccagaaaccacaagtaagagccgtcgtgtccaaggtcgctggagatgtttcaacacgttcagactcacggctagctgggattgtcgtagacatgttctgcacgtccatgatagacatcgccgatgagtttaacctctcggcttatatcttctacacgtccaacgcttcttatctcgggctacagttccacgttcaatctctttacgacgagaaagaactcgacgtaagtgagttcaaagatacggagatgaagtttgacgttccaactctgactcagccttttccggcaaaatgtttgccttcagtgatgctaaacaagaaatggtttccttacgttttgggtcgagctagaagttttagagcaacgaagggtattttggtaaattcggtggctgacatggaacctcaggcgttgagtttcttttccggtggaaatgggaatacaaatatccctccggtgtacgcggttgggcccattatggacttagaatctagcggcgatgaagagaagagaaaggagattttacattggctaaaagagcaaccgacgaaatctgtagtgtttctctgttttgggagcatgggaggtttcagtgaggaacaagcaagagaaatagctgtggcgctcgagcgaagcggacacaggtttctctggtcgcttcgccgcgcttctcctgttggaaacaagtctaatcctcctcccggagaattcacgaacttagaggagattcttccaaaagggtttttagatcggacggtggagatagggaagatcataagctgggcaccacaagtagatgtgttgaatagtcctgctataggagcgttcgtgacacattgtggatggaactcaattctcgagagtctttggttcggtgttccgatggcggcgtggcctatctatgctgagcaacagtttaacgcgtttcatatggtggatgagcttggtttagcggcggaggtaaagaaggagtaccgtagagattttctggtggaggagccggagattgtgacggctgatgagatagagagagggatcaagtgtgcgatggagcaggatagcaagatgaggaagagggtgatggagatgaaggataagctccacgtggcgttggtggacggtggatcttcgaactgtgctctaaagaagtttgttcaagacgtggtcgataatgttccataatccataggaacgtgctcgataatgtaccataggaacatggttgggtgttttgtgatagaataatgggaatcttttaaaaggactatgatgacatgattgaaaacaaccagtctgaaagtataataatagttacgtgtacttttgtctattaagcaaaataatgcaatttacgtttcggtaagattgtaagaaaagaaatgcagtttatgtctaaacaatctatttatattttgttatctgc

SEQ ID NO: 43861 - protein, 473 aa, Arabidopsis thaliana
  peptide (1)..(473): Ceres Seq. ID no. 12576068
  misc_feature (3)..(472): Pfam Name: UDP-glucoronosyl and UDP-glucosyl transferase Pfam Description: UDP-glucoronosyl and UDP-glucosyl transferase
  misc_feature (3)..(472): Pfam Name: UDP-glucoronosyl and UDP-glucosyl transferase Pfam Description: UDP-glucoronosyl and UDP-glucosyl transferase
  misc_feature (2)..(468): Homolog of NCBI NO: 15233158 NR Description: putative UDP-glucose glucosyltransferase; protein
  misc_feature (2)..(92): Homolog of NCBI NO: 7488111 NR Description: probable glucosyltransferase - Arabidopsis
  misc_feature (56)..(472): Homolog of NCBI NO: 7488111 NR Description: probable glucosyltransferase - Arabidopsis
  misc_feature (1)..(472): Homolog of NCBI NO: 15233761 NR Description: UTP-glucose glucosyltransferase; protein id:
  misc_feature (1)..(472): Homolog of NCBI NO: 15233157 NR Description: putative UDP-glucose glucosyltransferase; protein
  misc_feature (2)..(468): Homolog of NCBI NO: 15233158 NR Description: putative UDP-glucose glucosyltransferase; protein
  misc_feature (56)..(472): Homolog of NCBI NO: 7488111 NR Description: probable glucosyltransferase - Arabidopsis
  misc_feature (1)..(472): Homolog of NCBI NO: 15233157 NR Description: putative UDP-glucose glucosyltransferase; protein
  misc_feature (1)..(473): Homolog of NCBI NO: 15233149 NR Description: UDP-glycosyltransferase family; protein id:
  misc_feature (1)..(454): Homolog of NCBI NO: 13605541 NR Description: AT3g21750/MSD21_6 [Arabidopsis thaliana]
  misc_feature (1)..(472): Homolog of NCBI NO: 15233151 NR Description: putative UDP-glucose glucosyltransferase
  misc_feature (1)..(472): Homolog of NCBI NO: 11994645 NR Description: UTP-glucose glucosyltransferase [Arabidopsis
  misc_feature (1)..(472): Homolog of NCBI NO: 11994646 NR Description: UTP-glucose glucosyltransferase [Arabidopsis
  misc_feature (1)..(472): Homolog of NCBI NO: 15233761 NR Description: UTP-glucose glucosyltransferase; protein id:
  misc_feature (2)..(92): Homolog of NCBI NO: 7488111 NR Description: probable glucosyltransferase - Arabidopsis
  misc_feature (1)..(472): Homolog of NCBI NO: 11994646 NR Description: UTP-glucose glucosyltransferase [Arabidopsis
  misc_feature (1)..(472): Homolog of NCBI NO: 11994645 NR Description: UTP-glucose glucosyltransferase [Arabidopsis
  misc_feature (1)..(472): Homolog of NCBI NO: 15233151 NR Description: putative UDP-glucose glucosyltransferase
  misc_feature (1)..(454): Homolog of NCBI NO: 13605541 NR Description: AT3g21750/MSD21_6 [Arabidopsis thaliana]
  misc_feature (1)..(473): Homolog of NCBI NO: 15233149 NR Description: UDP-glycosyltransferase family; protein id:
MKVELVFIPSPGVGHIRATTALAKLLVASDNRLSVTLIVIPSRVSDDASSSVYTNSEDRLRYILLPARDQTTDLVSYIDSQKPQVRAVVSKVAGDVSTRSDSRLAGIVVDMFCTSMIDIADEFNLSAYIFYTSNASYLGLQFHVQSLYDEKELDVSEFKDTEMKFDVPTLTQPFPAKCLPSVMLNKKWFPYVLGRARSFRATKGILVNSVADMEPQALSFFSGGNGNTNIPPVYAVGPIMDLESSGDEEKRKEILHWLKEQPTKSVVFLCFGSMGGFSEEQAREIAVALERSGHRFLWSLRRASPVGNKSNPPPGEFTNLEEILPKGFLDRTVEIGKIISWAPQVDVLNSPAIGAFVTHCGWNSILESLWFGVPMAAWPIYAEQQFNAFHMVDELGLAAEVKKEYRRDFLVEEPEIVTADEIERGIKCAMEQDSKMRKRVMEMKDKLHVALVDGGSSNCALKKFVQDVVDNVP

SEQ ID NO: 43862 - protein, 363 aa, Arabidopsis thaliana
  peptide (1)..(363): Ceres Seq. ID no. 12576069
  misc_feature (1)..(362): Pfam Name: UDP-glucoronosyl and UDP-glucosyl transferase Pfam Description: UDP-glucoronosyl and UDP-glucosyl transferase
  misc_feature (1)..(362): Pfam Name: UDP-glucoronosyl and UDP-glucosyl transferase Pfam Description: UDP-glucoronosyl and UDP-glucosyl transferase
  misc_feature (1)..(362): Homolog of NCBI NO: 15233155 NR Description: putative UDP-glucose glucosyltransferase; protein
  misc_feature (1)..(358): Homolog of NCBI NO: 15233158 NR Description: putative UDP-glucose glucosyltransferase; protein
  misc_feature (1)..(362): Homolog of NCBI NO: 7488111 NR Description: probable glucosyltransferase - Arabidopsis
  misc_feature (1)..(362): Homolog of NCBI NO: 15233761 NR Description: UTP-glucose glucosyltransferase; protein id:
  misc_feature (1)..(362): Homolog of NCBI NO: 15233157 NR Description: putative UDP-glucose glucosyltransferase; protein
  misc_feature (1)..(362): Homolog of NCBI NO: 15233155 NR Description: putative UDP-glucose glucosyltransferase; protein
  misc_feature (1)..(362): Homolog of NCBI NO: 7488111 NR Description: probable glucosyltransferase - Arabidopsis
  misc_feature (1)..(362): Homolog of NCBI NO: 15233157 NR Description: putative UDP-glucose glucosyltransferase; protein
  misc_feature (1)..(363): Homolog of NCBI NO: 15233149 NR Description: UDP-glycosyltransferase family; protein id:
  misc_feature (1)..(344): Homolog of NCBI NO: 13605541 NR Description: AT3g21750/MSD21_6 [Arabidopsis thaliana]
  misc_feature (1)..(362): Homolog of NCBI NO: 15233151 NR Description: putative UDP-glucose glucosyltransferase
  misc_feature (1)..(362): Homolog of NCBI NO: 11994645 NR Description: UTP-glucose glucosyltransferase [Arabidopsis
  misc_feature (1)..(362): Homolog of NCBI NO: 11994646 NR Description: UTP-glucose glucosyltransferase [Arabidopsis
  misc_feature (1)..(362): Homolog of NCBI NO: 15233761 NR Description: UTP-glucose glucosyltransferase; protein id:
  misc_feature (1)..(358): Homolog of NCBI NO: 15233158 NR Description: putative UDP-glucose glucosyltransferase; protein
  misc_feature (1)..(362): Homolog of NCBI NO: 11994646 NR Description: UTP-glucose glucosyltransferase [Arabidopsis
  misc_feature (1)..(362): Homolog of NCBI NO: 11994645 NR Description: UTP-glucose glucosyltransferase [Arabidopsis
  misc_feature (1)..(362): Homolog of NCBI NO: 15233151 NR Description: putative UDP-glucose glucosyltransferase
  misc_feature (1)..(344): Homolog of NCBI NO: 13605541 NR Description: AT3g21750/MSD21_6 [Arabidopsis thaliana]
  misc_feature (1)..(363): Homolog of NCBI NO: 15233149 NR Description: UDP-glycosyltransferase family; protein id:
MFCTSMIDIADEFNLSAYIFYTSNASYLGLQFHVQSLYDEKELDVSEFKDTEMKFDVPTLTQPFPAKCLPSVMLNKKWFPYVLGRARSFRATKGILVNSVADMEPQALSFFSGGNGNTNIPPVYAVGPIMDLESSGDEEKRKEILHWLKEQPTKSVVFLCFGSMGGFSEEQAREIAVALERSGHRFLWSLRRASPVGNKSNPPPGEFTNLEEILPKGFLDRTVEIGKIISWAPQVDVLNSPAIGAFVTHCGWNSILESLWFGVPMAAWPIYAEQQFNAFHMVDELGLAAEVKKEYRRDFLVEEPEIVTADEIERGIKCAMEQDSKMRKRVMEMKDKLHVALVDGGSSNCALKKFVQDVVDNVP

SEQ ID NO: 43863 - protein, 358 aa, Arabidopsis thaliana
  peptide (1)..(358): Ceres Seq. ID no. 12576070
  misc_feature (1)..(357): Pfam Name: UDP-glucoronosyl and UDP-glucosyl transferase Pfam Description: UDP-glucoronosyl and UDP-glucosyl transferase
  misc_feature (1)..(357): Pfam Name: UDP-glucoronosyl and UDP-glucosyl transferase Pfam Description: UDP-glucoronosyl and UDP-glucosyl transferase
  misc_feature (1)..(357): Homolog of NCBI NO: 15233155 NR Description: putative UDP-glucose glucosyltransferase; protein
  misc_feature (1)..(353): Homolog of NCBI NO: 15233158 NR Description: putative UDP-glucose glucosyltransferase; protein
  misc_feature (1)..(357): Homolog of NCBI NO: 7488111 NR Description: probable glucosyltransferase - Arabidopsis
  misc_feature (1)..(357): Homolog of NCBI NO: 15233761 NR Description: UTP-glucose glucosyltransferase; protein id:
  misc_feature (1)..(357): Homolog of NCBI NO: 15233157 NR Description: putative UDP-glucose glucosyltransferase; protein
  misc_feature (1)..(357): Homolog of NCBI NO: 15233155 NR Description: putative UDP-glucose glucosyltransferase; protein
  misc_feature (1)..(357): Homolog of NCBI NO: 7488111 NR Description: probable glucosyltransferase - Arabidopsis
  misc_feature (1)..(357): Homolog of NCBI NO: 15233157 NR Description: putative UDP-glucose glucosyltransferase; protein
  misc_feature (1)..(358): Homolog of NCBI NO: 15233149 NR Description: UDP-glycosyltransferase family; protein id:
  misc_feature (1)..(339): Homolog of NCBI NO: 13605541 NR Description: AT3g21750/MSD21_6 [Arabidopsis thaliana]
  misc_feature (1)..(357): Homolog of NCBI NO: 15233151 NR Description: putative UDP-glucose glucosyltransferase
  misc_feature (1)..(357): Homolog of NCBI NO: 11994645 NR Description: UTP-glucose glucosyltransferase [Arabidopsis
  misc_feature (1)..(357): Homolog of NCBI NO: 11994646 NR Description: UTP-glucose glucosyltransferase [Arabidopsis
  misc_feature (1)..(357): Homolog of NCBI NO: 15233761 NR Description: UTP-glucose glucosyltransferase; protein id:
  misc_feature (1)..(353): Homolog of NCBI NO: 15233158 NR Description: putative UDP-glucose glucosyltransferase; protein
  misc_feature (1)..(357): Homolog of NCBI NO: 11994646 NR Description: UTP-glucose glucosyltransferase [Arabidopsis
  misc_feature (1)..(357): Homolog of NCBI NO: 11994645 NR Description: UTP-glucose glucosyltransferase [Arabidopsis
  misc_feature (1)..(357): Homolog of NCBI NO: 15233151 NR Description: putative UDP-glucose glucosyltransferase
  misc_feature (1)..(339): Homolog of NCBI NO: 13605541 NR Description: AT3g21750/MSD21_6 [Arabidopsis thaliana]
  misc_feature (1)..(358): Homolog of NCBI NO: 15233149 NR Description: UDP-glycosyltransferase family; protein id:
MIDIADEFNLSAYIFYTSNASYLGLQFHVQSLYDEKELDVSEFKDTEMKFDVPTLTQPFPAKCLPSVMLNKKWFPYVLGRARSFRATKGILVNSVADMEPQALSFFSGGNGNTNIPPVYAVGPIMDLESSGDEEKRKEILHWLKEQPTKSVVFLCFGSMGGFSEEQAREIAVALERSGHRFLWSLRRASPVGNKSNPPPGEFTNLEEILPKGFLDRTVEIGKIISWAPQVDVLNSPAIGAFVTHCGWNSILESLWFGVPMAAWPIYAEQQFNAFHMVDELGLAAEVKKEYRRDFLVEEPEIVTADEIERGIKCAMEQDSKMRKRVMEMKDKLHVALVDGGSSNCALKKFVQDVVDNVP

SEQ ID NO: 43864 - DNA, 1009 bp, Arabidopsis thaliana; identical to SEQ ID NO: 25129
  misc_feature (1)..(1009): Ceres Seq. ID no. 13488493
  misc_feature: MA Experiment ID: 108434 Result: Down-regulated in Transcription
  misc_feature: MA Experiment 108434 PARAMETER Experiment Name: At_Root_Tips_cDNA_P Parameter: Tissue Value: Root Tips
  misc_feature: MA Experiment ID: 108461 Result: Up-regulated in Transcription
  misc_feature: MA Experiment 108461 PARAMETER Experiment Name: At_Germinating_Seeds_cDNA_P Parameter: Age (day) Value: 1 vs. 0
  misc_feature: MA Experiment 108461 PARAMETER Experiment Name: At_Germinating_Seeds_cDNA_P Parameter: Tissue Value: Germinating Seeds
  misc_feature: MA Experiment ID: 108462 Result: Up-regulated in Transcription
  misc_feature: MA Experiment 108462 PARAMETER Experiment Name: At_Germinating_Seeds_cDNA_P Parameter: Age (day) Value: 2 vs. 0
  misc_feature: MA Experiment 108462 PARAMETER Experiment Name: At_Germinating_Seeds_cDNA_P Parameter: Tissue Value: Germinating Seeds
  misc_feature: MA Experiment ID: 108488 Result: Up-regulated in Transcription
  misc_feature: MA Experiment ID: 108594 Result: Down-regulated in Transcription
  misc_feature: MA Experiment 108594 PARAMETER Experiment Name: At_Ler-rhl_Root_cDNA_P Parameter: Plant Line Value: null
  misc_feature: MA Experiment ID: 108595 Result: Down-regulated in Transcription
  misc_feature: MA Experiment 108595 PARAMETER Experiment Name: At_Ler-pi_Ovule_cDNA_P Parameter: Plant Line Value: null
  misc_feature: MA Experiment ID: 20000090 Result: Down-regulated in Transcription

SEQ ID NO: 43865 - protein, 265 aa, Arabidopsis thaliana; identical to SEQ ID NO: 25130
  peptide (1)..(265): Ceres Seq. ID no. 15218578
  misc_feature (64)..(232): Pfam Name: Chlorophyll A-B binding protein Pfam Description: Chlorophyll A-B binding protein
  misc_feature (64)..(232): Pfam Name: Chlorophyll A-B binding protein Pfam Description: Chlorophyll A-B binding protein
  misc_feature (1)..(265): Homolog of NCBI NO: 1345698 NR Description: Chlorophyll A-B binding protein 151, chloroplast
  misc_feature (1)..(265): Homolog of NCBI NO: 3560529 NR Description: light harvesting chlorophyll A/B binding protein
  misc_feature (1)..(265): Homolog of NCBI NO: 15232249 NR Description: light harvesting chlorophyll A/B binding protein,
  misc_feature (1)..(265): Homolog of NCBI NO: 15224465 NR Description: light-harvesting chlorophyll a/b binding protein
  misc_feature (1)..(265): Homolog of NCBI NO: 3560529 NR Description: light harvesting chlorophyll A/B binding protein
  misc_feature (1)..(265): Homolog of NCBI NO: 15224465 NR Description: light-harvesting chlorophyll a/b binding protein
  misc_feature (1)..(265): Homolog of NCBI NO: 25299029 NR Description: chlorophyll a/b-binding protein Lhcb2
  misc_feature (1)..(265): Homolog of NCBI NO: 25299022 NR Description: chlorophyll a/b-binding protein Lhcb2
  misc_feature (1)..(264): Homolog of NCBI NO: 15224471 NR Description: light-harvesting chlorophyll a/b binding protein
  misc_feature (1)..(265): Homolog of NCBI NO: 15232249 NR Description: light harvesting chlorophyll A/B binding protein,
  misc_feature (1)..(265): Homolog of NCBI NO: 1345698 NR Description: Chlorophyll A-B binding protein 151, chloroplast
  misc_feature (1)..(264): Homolog of NCBI NO: 15224471 NR Description: light-harvesting chlorophyll a/b binding protein
  misc_feature (1)..(265): Homolog of NCBI NO: 25299029 NR Description: chlorophyll a/b-binding protein Lhcb2
  misc_feature (1)..(265): Homolog of NCBI NO: 25299022 NR Description: chlorophyll a/b-binding protein Lhcb2

SEQ ID NO: 43866 - protein, 229 aa, Arabidopsis thaliana; identical to SEQ ID NO: 25131
  peptide (1)..(229): Ceres Seq. ID no. 15218579
  misc_feature (28)..(196): Pfam Name: Chlorophyll A-B binding protein Pfam Description: Chlorophyll A-B binding protein
  misc_feature (28)..(196): Pfam Name: Chlorophyll A-B binding protein Pfam Description: Chlorophyll A-B binding protein
  misc_feature (1)..(229): Homolog of NCBI NO: 1345698 NR Description: Chlorophyll A-B binding protein 151, chloroplast
  misc_feature (1)..(229): Homolog of NCBI NO: 3560529 NR Description: light harvesting chlorophyll A/B binding protein
  misc_feature (1)..(229): Homolog of NCBI NO: 15232249 NR Description: light harvesting chlorophyll A/B binding protein,
  misc_feature (1)..(229): Homolog of NCBI NO: 15224465 NR Description: light-harvesting chlorophyll a/b binding protein
  misc_feature (1)..(229): Homolog of NCBI NO: 1345698 NR Description: Chlorophyll A-B binding protein 151, chloroplast
  misc_feature (1)..(229): Homolog of NCBI NO: 15232249 NR Description: light harvesting chlorophyll A/B binding protein,
  misc_feature (1)..(228): Homolog of NCBI NO: 15224471 NR Description: light-harvesting chlorophyll a/b binding protein
  misc_feature (1)..(229): Homolog of NCBI NO: 15224465 NR Description: light-harvesting chlorophyll a/b binding protein
  misc_feature (1)..(229): Homolog of NCBI NO: 3560529 NR Description: light harvesting chlorophyll A/B binding protein
  misc_feature (1)..(229): Homolog of NCBI NO: 25299022 NR Description: chlorophyll a/b-binding protein Lhcb2
  misc_feature (1)..(229): Homolog of NCBI NO: 25299029 NR Description: chlorophyll a/b-binding protein Lhcb2
  misc_feature (1)..(228): Homolog of NCBI NO: 15224471 NR Description: light-harvesting chlorophyll a/b binding protein
  misc_feature (1)..(229): Homolog of NCBI NO: 25299029 NR Description: chlorophyll a/b-binding protein Lhcb2
  misc_feature (1)..(229): Homolog of NCBI NO: 25299022 NR Description: chlorophyll a/b-binding protein Lhcb2

SEQ ID NO: 43867 - protein, 160 aa, Arabidopsis thaliana; identical to SEQ ID NO: 25132
  peptide (1)..(160): Ceres Seq. ID no. 15218580
  misc_feature (1)..(127): Pfam Name: Chlorophyll A-B binding protein Pfam Description: Chlorophyll A-B binding protein
  misc_feature (1)..(127): Pfam Name: Chlorophyll A-B binding protein Pfam Description: Chlorophyll A-B binding protein
  misc_feature (1)..(160): Homolog of NCBI NO: 1345698 NR Description: Chlorophyll A-B binding protein 151, chloroplast
  misc_feature (1)..(160): Homolog of NCBI NO: 3560529 NR Description: light harvesting chlorophyll A/B binding protein
  misc_feature (1)..(160): Homolog of NCBI NO: 15232249 NR Description: light harvesting chlorophyll A/B binding protein,
  misc_feature (1)..(160): Homolog of NCBI NO: 15224465 NR Description: light-harvesting chlorophyll a/b binding protein
  misc_feature (1)..(160): Homolog of NCBI NO: 3560529 NR Description: light harvesting chlorophyll A/B binding protein
  misc_feature (1)..(160): Homolog of NCBI NO: 15224465 NR Description: light-harvesting chlorophyll a/b binding protein
  misc_feature (1)..(160): Homolog of NCBI NO: 25299029 NR Description: chlorophyll a/b-binding protein Lhcb2
  misc_feature (1)..(160): Homolog of NCBI NO: 25299022 NR Description: chlorophyll a/b-binding protein Lhcb2
  misc_feature (1)..(159): Homolog of NCBI NO: 15224471 NR Description: light-harvesting chlorophyll a/b binding protein
  misc_feature (1)..(160): Homolog of NCBI NO: 15232249 NR Description: light harvesting chlorophyll A/B binding protein,
  misc_feature (1)..(160): Homolog of NCBI NO: 1345698 NR Description: Chlorophyll A-B binding protein 151, chloroplast
  misc_feature (1)..(159): Homolog of NCBI NO: 15224471 NR Description: light-harvesting chlorophyll a/b binding protein
  misc_feature (1)..(160): Homolog of NCBI NO: 25299029 NR Description: chlorophyll a/b-binding protein Lhcb2
  misc_feature (1)..(160): Homolog of NCBI NO: 25299022 NR Description: chlorophyll a/b-binding protein Lhcb2

SEQ ID NO: 43868 - DNA, 1338 bp, Arabidopsis thaliana
  misc_feature (1)..(1338): Ceres Seq. ID no. 12462175
  misc_feature: MA Experiment ID: 108433 Result: Up-regulated in Transcription
  misc_feature: MA Experiment 108433 PARAMETER Experiment Name: At_rhl_Mutant2_cDNA_P Parameter: Age (day) Value: 7
  misc_feature: MA Experiment 108433 PARAMETER Experiment Name: At_rhl_Mutant2_cDNA_P Parameter: Organism Value: A. thaliana
  misc_feature: MA Experiment 108433 PARAMETER Experiment Name: At_rhl_Mutant2_cDNA_P Parameter: Plant Line Value: rhl Mutant vs. wt landsburg
  misc_feature: MA Experiment 108433 PARAMETER Experiment Name: At_rhl_Mutant2_cDNA_P Parameter: Tissue Value: Roots
  misc_feature: MA Experiment ID: 108434 Result: Down-regulated in Transcription
  misc_feature: MA Experiment 108434 PARAMETER Experiment Name: At_Root_Tips_cDNA_P Parameter: Tissue Value: Root Tips
  misc_feature: MA Experiment ID: 108573 Result: Up-regulated in Transcription
  misc_feature: MA Experiment 108573 PARAMETER Experiment Name: At_Drought_cDNA_P Parameter: Timepoint (hr) Value: 6
  misc_feature: MA Experiment 108573 PARAMETER Experiment Name: At_Drought_cDNA_P Parameter: Tissue Value: Aerial
  misc_feature: MA Experiment 108573 PARAMETER Experiment Name: At_Drought_cDNA_P Parameter: Treatment Value: Drought vs. No Drought
  misc_feature: MA Experiment ID: 108594 Result: Down-regulated in Transcription
  misc_feature: MA Experiment 108594 PARAMETER Experiment Name: At_Ler-rhl_Root_cDNA_P Parameter: Plant Line Value: null
  misc_feature: MA Experiment ID: 108595 Result: Down-regulated in Transcription
  misc_feature: MA Experiment 108595 PARAMETER Experiment Name: At_Ler-pi_Ovule_cDNA_P Parameter: Plant Line Value: null
  misc_feature: MA Experiment ID: 108605 Result: Up-regulated in Transcription
  misc_feature: MA Experiment 108605 PARAMETER Experiment Name: At_100uM_ABA_cDNA_P Parameter: Timepoint (hr) Value: 6
  misc_feature: MA Experiment 108605 PARAMETER Experiment Name: At_100uM_ABA_cDNA_P Parameter: Tissue Value: Aerial
  misc_feature: MA Experiment 108605 PARAMETER Experiment Name: At_100uM_ABA_cDNA_P Parameter: Treatment Value: 100uM ABA vs. No Treatment
  misc_feature: MA Experiment ID: 20000185 Result: Down-regulated in Transcription
  misc_feature: MA Experiment 20000185 PARAMETER Experiment Name: At_Roots__P Parameter: Age (day) Value: 7 vs. 21
  misc_feature: MA Experiment 20000185 PARAMETER Experiment Name: At_Roots__P Parameter: Organism Value: A. thaliana
  misc_feature: MA Experiment 20000185 PARAMETER Experiment Name: At_Roots__P Parameter: Tissue Value: Roots vs. Whole Plant
  misc_feature: MA Experiment ID: 20000437 Result: Down-regulated in Transcription
  misc_feature: MA Experiment 20000437 PARAMETER Experiment Name: At_Drought_P Parameter: Age (day) Value: 8
  misc_feature: MA Experiment 20000437 PARAMETER Experiment Name: At_Drought_P Parameter: Organism Value: A. thaliana
  misc_feature: MA Experiment 20000437 PARAMETER Experiment Name: At_Drought_P Parameter: Plant Line Value: WS
  misc_feature: MA Experiment 20000437 PARAMETER Experiment Name: At_Drought_P Parameter: Timepoint (hr) Value: 24
  misc_feature: MA Experiment 20000437 PARAMETER Experiment Name: At_Drought_P Parameter: Tissue Value: Whole Plant
  misc_feature: MA Experiment 20000437 PARAMETER Experiment Name: At_Drought_P Parameter: Treatment Value: Drought vs. No Drought
  misc_feature: MA Experiment ID: 20000439 Result: Down-regulated in Transcription
  misc_feature: MA Experiment 20000439 PARAMETER Experiment Name: At_Roots__P Parameter: Age (day) Value: 14 vs. 21
  misc_feature: MA Experiment 20000439 PARAMETER Experiment Name: At_Roots__P Parameter: Organism Value: A. thaliana
  misc_feature: MA Experiment 20000439 PARAMETER Experiment Name: At_Roots__P Parameter: Tissue Value: Roots vs. Whole Plant
  misc_feature: MA Experiment ID: 20000573 Result: Down-regulated in Transcription
  misc_feature: MA Experiment 20000573 PARAMETER Experiment Name: At_100uM_ABA_Mutants__P Parameter: Organism Value: A. thaliana
  misc_feature: MA Experiment 20000573 PARAMETER Experiment Name: At_100uM_ABA_Mutants__P Parameter: Plant Line Value: CS22 vs. Ler wt
  misc_feature: MA Experiment 20000573 PARAMETER Experiment Name: At_100uM_ABA_Mutants__P Parameter: Timepoint (hr) Value: N/A
  misc_feature: MA Experiment 20000573 PARAMETER Experiment Name: At_100uM_ABA_Mutants__P Parameter: Tissue Value: Whole Plant
  misc_feature: MA Experiment 20000573 PARAMETER Experiment Name: At_100uM_ABA_Mutants__P Parameter: Treatment Value: None
  misc_feature: MA Experiment ID: 20000574 Result: Down-regulated in Transcription
  misc_feature: MA Experiment 20000574 PARAMETER Experiment Name: At_100uM_ABA_Mutants__P Parameter: Organism Value: A. thaliana
  misc_feature: MA Experiment 20000574 PARAMETER Experiment Name: At_100uM_ABA_Mutants__P Parameter: Plant Line Value: CS23 vs. Ler wt
  misc_feature: MA Experiment 20000574 PARAMETER Experiment Name: At_100uM_ABA_Mutants__P Parameter: Timepoint (hr) Value: N/A
  misc_feature: MA Experiment 20000574 PARAMETER Experiment Name: At_100uM_ABA_Mutants__P Parameter: Tissue Value: Whole Plant
  misc_feature: MA Experiment 20000574 PARAMETER Experiment Name: At_100uM_ABA_Mutants__P Parameter: Treatment Value: None
  misc_feature: MA Experiment ID: 20000794 Result: Up-regulated in Transcription
  misc_feature: MA Experiment 20000794 PARAMETER Experiment Name: At_Petals_P Parameter: Age (day) Value: 23-25 days
  misc_feature: MA Experiment 20000794 PARAMETER Experiment Name: At_Petals_P Parameter: Plant Line Value: WS
  misc_feature: MA Experiment 20000794 PARAMETER Experiment Name: At_Petals_P Parameter: Tissue Value: Petals vs. Whole plant
  misc_feature: MA Experiment ID: 20001248 Result: Down-regulated in Transcription
  misc_feature: MA Experiment 20001248 PARAMETER Experiment Name: At_Far-red-induction_P Parameter: Age (day) Value: 7
  misc_feature: MA Experiment 20001248 PARAMETER Experiment Name: At_Far-red-induction_P Parameter: Light Value: Far-red vs. White
  misc_feature: MA Experiment 20001248 PARAMETER Experiment Name: At_Far-red-induction_P Parameter: Organism Value: A. thaliana
  misc_feature: MA Experiment 20001248 PARAMETER Experiment Name: At_Far-red-induction_P Parameter: Plant Line Value: Columbia
  misc_feature: MA Experiment 20001248 PARAMETER Experiment Name: At_Far-red-induction_P Parameter: Timepoint (hr) Value: 4
  misc_feature: MA Experiment 20001248 PARAMETER Experiment Name: At_Far-red-induction_P Parameter: Tissue Value: Whole Plant
atgaaccaaagtaaaaaacaaagactcgagttgatatgtctagtactaaagatatgtcaactgtccaaaacgcaactccttttaacggcgttgccccatccaccaccgtgcgagttacaatcgtccaatcctccaccgtctataacgatactcctgccactatagacaaagcggagaagtatattgtggaggcggcaagcaagggagcagagctagtgttgttcccggaggggtttatcggtggctatcctcgaggttttaggttcggtttagcggttggcgttcataacgaagaagggcgtgatgagtttcggaagtaccatgcttctgctattcatgttcctggccctgaagtagcaagattggctgacgtggctaggaaaaaccatgtgtacttggtaatgggagccatagagaaggaagggtataccctctattgcacagttcttttctttagtccacagggtcagttcttgggcaagcaccgtaaactcatgcccacaagtttggaacgttgcatttggggccaaggggacggatcaaccatccccgtttacgacactcccattggaaaactcggtgctgctatttgctgggagaataggatgcccctctacagaactgcattgtacgccaaaggcattgagctttattgtgcacctactgctgatggttcgaaagaatggcaatcgtcgatgcttcacattgcgatcgaaggtggatgtttcgtcttgtcggcttgccaattctgccagcgtaaacatttccctgatcatcctgactacttgtttaccgattggtacgacgacaaagaacatgattctattgtctcccaaggtggaagtgtcattatttcacctttgggacaagttctcgccggaccaaactttgaatcagagggtctcgtcacagctgatattgatcttggtgatatagcaagagccaagttatacttcgattcggttggacattactcgagaccagatgttttacacttgaccgtaaatgagcacccgaggaaatcggttacattcgtgacgaaggtggagaaagctgaggatgactcaaacaaatagtaagagacttgaagttcgtatctgctggagttatgtcaatcgtatggagtcaagtccaaaatgttctgttgcgttttcattttatgttcaagtttatttatctttctcttcaatggtaagatctatggagtcaagtaataatggtaagacttatgttgttgaataaaacgaattggttctctcctcttgtattttaaaactgtgccattatgtttatctaatttgggcgttgggcgttgaatctcaattgttgttcagccgt

SEQ ID NO: 43869 - protein, 346 aa, Arabidopsis thaliana
  peptide (1)..(346): Ceres Seq. ID no. 12462176
  misc_feature (123)..(346): Homolog of NCBI NO: 30692072 NR Description: nitrilase 1 [Arabidopsis thaliana]
  misc_feature (1)..(344): Homolog of NCBI NO: 14211396 NR Description: nitrilase-like protein [Brassica napus]
  misc_feature (1)..(346): Homolog of NCBI NO: 21593107 NR Description: nitrilase 3 [Arabidopsis thaliana]
  misc_feature (1)..(346): Homolog of NCBI NO: 15229936 NR Description: nitrilase 3
  misc_feature (7)..(346): Homolog of NCBI NO: 25290267 NR Description: nitrilase (EC 3.5.5.1) 2 [imported] - Arabidopsis
  misc_feature (7)..(346): Homolog of NCBI NO: 25290266 NR Description: nitrilase (EC 3.5.5.1) 2 [imported] - Arabidopsis
  misc_feature (7)..(346): Homolog of NCBI NO: 15229932 NR Description: nitrilase 2
  misc_feature (1)..(346): Homolog of NCBI NO: 16226740 NR Description: AT3g44310/T10D17_100 [Arabidopsis thaliana]
  misc_feature (1)..(346): Homolog of NCBI NO: 417381 NR Description: Nitrilase 1
  misc_feature (1)..(346): Homolog of NCBI NO: 30692067 NR Description: nitrilase 1 [Arabidopsis thaliana]
  misc_feature (123)..(346): Homolog of NCBI NO: 30692072 NR Description: nitrilase 1 [Arabidopsis thaliana]
  misc_feature (1)..(344): Homolog of NCBI NO: 14211396 NR Description: nitrilase-like protein [Brassica napus]
  misc_feature (1)..(346): Homolog of NCBI NO: 21593107 NR Description: nitrilase 3 [Arabidopsis thaliana]
  misc_feature (1)..(346): Homolog of NCBI NO: 15229936 NR Description: nitrilase 3
  misc_feature (7)..(346): Homolog of NCBI NO: 25290267 NR Description: nitrilase (EC 3.5.5.1) 2 [imported] - Arabidopsis
  misc_feature (7)..(346): Homolog of NCBI NO: 25290266 NR Description: nitrilase (EC 3.5.5.1) 2 [imported] - Arabidopsis
  misc_feature (7)..(346): Homolog of NCBI NO: 15229932 NR Description: nitrilase 2
  misc_feature (1)..(346): Homolog of NCBI NO: 16226740 NR Description: AT3g44310/T10D17_100 [Arabidopsis thaliana]
  misc_feature (1)..(346): Homolog of NCBI NO: 417381 NR Description: Nitrilase 1
  misc_feature (1)..(346): Homolog of NCBI NO: 30692067 NR Description: nitrilase 1 [Arabidopsis thaliana]
MSSTKDMSTVQNATPFNGVAPSTTVRVTIVQSSTVYNDTPATIDKAEKYIVEAASKGAELVLFPEGFIGGYPRGFRFGLAVGVHNEEGRDEFRKYHASAIHVPGPEVARLADVARKNHVYLVMGAIEKEGYTLYCTVLFFSPQGQFLGKHRKLMPTSLERCIWGQGDGSTIPVYDTPIGKLGAAICWENRMPLYRTALYAKGIELYCAPTADGSKEWQSSMLHIAIEGGCFVLSACQFCQRKHFPDHPDYLFTDWYDDKEHDSIVSQGGSVIISPLGQVLAGPNFESEGLVTADIDLGDIARAKLYFDSVGHYSRPDVLHLTVNEHPRKSVTFVTKVEKAEDDSNK

SEQ ID NO: 43870 - protein, 340 aa, Arabidopsis thaliana
  peptide (1)..(340): Ceres Seq. ID no. 12462177
  misc_feature (117)..(340): Homolog of NCBI NO: 30692072 NR Description: nitrilase 1 [Arabidopsis thaliana]
  misc_feature (1)..(338): Homolog of NCBI NO: 14211396 NR Description: nitrilase-like protein [Brassica napus]
  misc_feature (1)..(340): Homolog of NCBI NO: 21593107 NR Description: nitrilase 3 [Arabidopsis thaliana]
  misc_feature (1)..(340): Homolog of NCBI NO: 15229936 NR Description: nitrilase 3
  misc_feature (1)..(340): Homolog of NCBI NO: 25290267 NR Description: nitrilase (EC 3.5.5.1) 2 [imported] - Arabidopsis
  misc_feature (1)..(340): Homolog of NCBI NO: 25290266 NR Description: nitrilase (EC 3.5.5.1) 2 [imported] - Arabidopsis
  misc_feature (1)..(340): Homolog of NCBI NO: 15229932 NR Description: nitrilase 2
  misc_feature (1)..(340): Homolog of NCBI NO: 16226740 NR Description: AT3g44310/T10D17_100 [Arabidopsis thaliana]
  misc_feature (1)..(340): Homolog of NCBI NO: 417381 NR Description: Nitrilase 1
  misc_feature (1)..(340): Homolog of NCBI NO: 30692067 NR Description: nitrilase 1 [Arabidopsis thaliana]
  misc_feature (117)..(340): Homolog of NCBI NO: 30692072 NR Description: nitrilase 1 [Arabidopsis thaliana]
  misc_feature (1)..(338): Homolog of NCBI NO: 14211396 NR Description: nitrilase-like protein [Brassica napus]
  misc_feature (1)..(340): Homolog of NCBI NO: 21593107 NR Description: nitrilase 3 [Arabidopsis thaliana]
  misc_feature (1)..(340): Homolog of NCBI NO: 15229936 NR Description: nitrilase 3
  misc_feature (1)..(340): Homolog of NCBI NO: 25290267 NR Description: nitrilase (EC 3.5.5.1) 2 [imported] - Arabidopsis
  misc_feature (1)..(340): Homolog of NCBI NO: 25290266 NR Description: nitrilase (EC 3.5.5.1) 2 [imported] - Arabidopsis
  misc_feature (1)..(340): Homolog of NCBI NO: 15229932 NR Description: nitrilase 2
  misc_feature (1)..(340): Homolog of NCBI NO: 16226740 NR Description: AT3g44310/T10D17_100 [Arabidopsis thaliana]
  misc_feature (1)..(340): Homolog of NCBI NO: 417381 NR Description: Nitrilase 1
  misc_feature (1)..(340): Homolog of NCBI NO: 30692067 NR Description: nitrilase 1 [Arabidopsis thaliana]
MSTVQNATPFNGVAPSTTVRVTIVQSSTVYNDTPATIDKAEKYIVEAASKGAELVLFPEGFIGGYPRGFRFGLAVGVHNEEGRDEFRKYHASAIHVPGPEVARLADVARKNHVYLVMGAIEKEGYTLYCTVLFFSPQGQFLGKHRKLMPTSLERCIWGQGDGSTIPVYDTPIGKLGAAICWENRMPLYRTALYAKGIELYCAPTADGSKEWQSSMLHIAIEGGCFVLSACQFCQRKHFPDHPDYLFTDWYDDKEHDSIVSQGGSVIISPLGQVLAGPNFESEGLVTADIDLGDIARAKLYFDSVGHYSRPDVLHLTVNEHPRKSVTFVTKVEKAEDDSNK

SEQ ID NO: 43871 - protein, 224 aa, Arabidopsis thaliana
  peptide (1)..(224): Ceres Seq. ID no. 12462178
  misc_feature (1)..(224): Homolog of NCBI NO: 30692072 NR Description: nitrilase 1 [Arabidopsis thaliana]
  misc_feature (1)..(222): Homolog of NCBI NO: 14211396 NR Description: nitrilase-like protein [Brassica napus]
  misc_feature (1)..(224): Homolog of NCBI NO: 21593107 NR Description: nitrilase 3 [Arabidopsis thaliana]
  misc_feature (1)..(224): Homolog of NCBI NO: 15229936 NR Description: nitrilase 3
  misc_feature (1)..(224): Homolog of NCBI NO: 25290267 NR Description: nitrilase (EC 3.5.5.1) 2 [imported] - Arabidopsis
  misc_feature (1)..(224): Homolog of NCBI NO: 25290266 NR Description: nitrilase (EC 3.5.5.1) 2 [imported] - Arabidopsis
  misc_feature (1)..(224): Homolog of NCBI NO: 15229932 NR Description: nitrilase 2
  misc_feature (1)..(224): Homolog of NCBI NO: 16226740 NR Description: AT3g44310/T10D17_100 [Arabidopsis thaliana]
  misc_feature (1)..(224): Homolog of NCBI NO: 417381 NR Description: Nitrilase 1
  misc_feature (1)..(224): Homolog of NCBI NO: 30692067 NR Description: nitrilase 1 [Arabidopsis thaliana]
  misc_feature (1)..(224): Homolog of NCBI NO: 30692072 NR Description: nitrilase 1 [Arabidopsis thaliana]
  misc_feature (1)..(222): Homolog of NCBI NO: 14211396 NR Description: nitrilase-like protein [Brassica napus]
  misc_feature (1)..(224): Homolog of NCBI NO: 21593107 NR Description: nitrilase 3 [Arabidopsis thaliana]
  misc_feature (1)..(224): Homolog of NCBI NO: 15229936 NR Description: nitrilase 3
  misc_feature (1)..(224): Homolog of NCBI NO: 25290267 NR Description: nitrilase (EC 3.5.5.1) 2 [imported] - Arabidopsis
  misc_feature (1)..(224): Homolog of NCBI NO: 25290266 NR Description: nitrilase (EC 3.5.5.1) 2 [imported] - Arabidopsis
  misc_feature (1)..(224): Homolog of NCBI NO: 15229932 NR Description: nitrilase 2
  misc_feature (1)..(224): Homolog of NCBI NO: 16226740 NR Description: AT3g44310/T10D17_100 [Arabidopsis thaliana]
  misc_feature (1)..(224): Homolog of NCBI NO: 417381 NR Description: Nitrilase 1
  misc_feature (1)..(224): Homolog of NCBI NO: 30692067 NR Description: nitrilase 1 [Arabidopsis thaliana]
MGAIEKEGYTLYCTVLFFSPQGQFLGKHRKLMPTSLERCIWGQGDGSTIPVYDTPIGKLGAAICWENRMPLYRTALYAKGIELYCAPTADGSKEWQSSMLHIAIEGGCFVLSACQFCQRKHFPDHPDYLFTDWYDDKEHDSIVSQGGSVIISPLGQVLAGPNFESEGLVTADIDLGDIARAKLYFDSVGHYSRPDVLHLTVNEHPRKSVTFVTKVEKAEDDSNK

SEQ ID NO: 43872 - DNA, 822 bp, Arabidopsis thaliana; identical to SEQ ID NO: 34900
  misc_feature (1)..(822): Ceres Seq. ID no. 13504913
  misc_feature: MA Experiment ID: 108595 Result: Down-regulated in Transcription
  misc_feature: MA Experiment 108595 PARAMETER Experiment Name: At_Ler-pi_Ovule_cDNA_P Parameter: Plant Line Value: null

SEQ ID NO: 43873 - protein, 189 aa, Arabidopsis thaliana; identical to SEQ ID NO: 34901
  peptide (1)..(189): Ceres Seq. ID no. 13504914
  misc_feature (62)..(189): Pfam Name: Cofilin/tropomyosin-type actin-binding protein Pfam Description: Cofilin/tropomyosin-type actin-binding protein
  misc_feature (62)..(189): Pfam Name: Cofilin/tropomyosin-type actin-binding protein Pfam Description: Cofilin/tropomyosin-type actin-binding protein
  misc_feature (58)..(189): Homolog of NCBI NO: 30697303 NR Description: actin depolymerizing factor 4 - like protein
  misc_feature (51)..(189): Homolog of NCBI NO: 18408116 NR Description: actin depolymerizing factor 2 (ADF2) [Arabidopsis
  misc_feature (51)..(189): Homolog of NCBI NO: 38564721 NR Description: putative actin-depolymerizing factor 2
  misc_feature (51)..(189): Homolog of NCBI NO: 17366768 NR Description: Actin-depolymerizing factor 1 (ADF 1)
  misc_feature (51)..(188): Homolog of NCBI NO: 17366765 NR Description: Actin-depolymerizing factor 2 (ADF 2)
  misc_feature (58)..(189): Homolog of NCBI NO: 30697303 NR Description: actin depolymerizing factor 4 - like protein
  misc_feature (51)..(189): Homolog of NCBI NO: 38564721 NR Description: putative actin-depolymerizing factor 2
  misc_feature (51)..(188): Homolog of NCBI NO: 17366765 NR Description: Actin-depolymerizing factor 2 (ADF 2)
  misc_feature (51)..(189): Homolog of NCBI NO: 30697295 NR Description: actin depolymerizing factor 3 - like protein
  misc_feature (51)..(189): Homolog of NCBI NO: 15231309 NR Description: actin depolymerizing factor 1 (ADF1) [Arabidopsis
  misc_feature (51)..(189): Homolog of NCBI NO: 30697300 NR Description: actin depolymerizing factor 4 - like protein
  misc_feature (51)..(189): Homolog of NCBI NO: 4185511 NR Description: actin depolymerizing factor 4 [Arabidopsis
  misc_feature (51)..(189): Homolog of NCBI NO: 30697298 NR Description: actin depolymerizing factor 3 - like protein
  misc_feature (51)..(189): Homolog of NCBI NO: 17366768 NR Description: Actin-depolymerizing factor 1 (ADF 1)
  misc_feature (51)..(189): Homolog of NCBI NO: 18408116 NR Description: actin depolymerizing factor 2 (ADF2) [Arabidopsis
  misc_feature (51)..(189): Homolog of NCBI NO: 30697298 NR Description: actin depolymerizing factor 3 - like protein
  misc_feature (51)..(189): Homolog of NCBI NO: 4185511 NR Description: actin depolymerizing factor 4 [Arabidopsis
  misc_feature (51)..(189): Homolog of NCBI NO: 30697300 NR Description: actin depolymerizing factor 4 - like protein
  misc_feature (51)..(189): Homolog of NCBI NO: 15231309 NR Description: actin depolymerizing factor 1 (ADF1) [Arabidopsis
  misc_feature (51)..(189): Homolog of NCBI NO: 30697295 NR Description: actin depolymerizing factor 3 - like protein

SEQ ID NO: 43874 - protein, 139 aa, Arabidopsis thaliana; identical to SEQ ID NO: 34902
  peptide (1)..(139): Ceres Seq. ID no. 13504915
  misc_feature (12)..(139): Pfam Name: Cofilin/tropomyosin-type actin-binding protein Pfam Description: Cofilin/tropomyosin-type actin-binding protein
  misc_feature (12)..(139): Pfam Name: Cofilin/tropomyosin-type actin-binding protein Pfam Description: Cofilin/tropomyosin-type actin-binding protein
  misc_feature (8)..(139): Homolog of NCBI NO: 30697303 NR Description: actin depolymerizing factor 4 - like protein
  misc_feature (1)..(139): Homolog of NCBI NO: 18408116 NR Description: actin depolymerizing factor 2 (ADF2) [Arabidopsis
  misc_feature (1)..(139): Homolog of NCBI NO: 38564721 NR Description: putative actin-depolymerizing factor 2
  misc_feature (1)..(139): Homolog of NCBI NO: 17366768 NR Description: Actin-depolymerizing factor 1 (ADF 1)
  misc_feature (1)..(138): Homolog of NCBI NO: 17366765 NR Description: Actin-depolymerizing factor 2 (ADF 2)
  misc_feature (8)..(139): Homolog of NCBI NO: 30697303 NR Description: actin depolymerizing factor 4 - like protein
  misc_feature (1)..(139): Homolog of NCBI NO: 38564721 NR Description: putative actin-depolymerizing factor 2
  misc_feature (1)..(138): Homolog of NCBI NO: 17366765 NR Description: Actin-depolymerizing factor 2 (ADF 2)
  misc_feature (1)..(139): Homolog of NCBI NO: 30697295 NR Description: actin depolymerizing factor 3 - like protein
  misc_feature (1)..(139): Homolog of NCBI NO: 15231309 NR Description: actin depolymerizing factor 1 (ADF1) [Arabidopsis
  misc_feature (1)..(139): Homolog of NCBI NO: 30697300 NR Description: actin depolymerizing factor 4 - like protein
  misc_feature (1)..(139): Homolog of NCBI NO: 4185511 NR Description: actin depolymerizing factor 4 [Arabidopsis
  misc_feature (1)..(139): Homolog of NCBI NO: 30697298 NR Description: actin depolymerizing factor 3 - like protein
  misc_feature (1)..(139): Homolog of NCBI NO: 17366768 NR Description: Actin-depolymerizing factor 1 (ADF 1)
  misc_feature (1)..(139): Homolog of NCBI NO: 18408116 NR Description: actin depolymerizing factor 2 (ADF2) [Arabidopsis
  misc_feature (1)..(139): Homolog of NCBI NO: 30697298 NR Description: actin depolymerizing factor 3 - like protein
  misc_feature (1)..(139): Homolog of NCBI NO: 4185511 NR Description: actin depolymerizing factor 4 [Arabidopsis
  misc_feature (1)..(139): Homolog of NCBI NO: 30697300 NR Description: actin depolymerizing factor 4 - like protein
  misc_feature (1)..(139): Homolog of NCBI NO: 15231309 NR Description: actin depolymerizing factor 1 (ADF1) [Arabidopsis
  misc_feature (1)..(139): Homolog of NCBI NO: 30697295 NR Description: actin depolymerizing factor 3 - like protein

SEQ ID NO: 43875 - protein, 132 aa, Arabidopsis thaliana; identical to SEQ ID NO: 34903
  peptide (1)..(132): Ceres Seq. ID no. 13504916
  misc_feature (5)..(132): Pfam Name: Cofilin/tropomyosin-type actin-binding protein Pfam Description: Cofilin/tropomyosin-type actin-binding protein
  misc_feature (5)..(132): Pfam Name: Cofilin/tropomyosin-type actin-binding protein Pfam Description: Cofilin/tropomyosin-type actin-binding protein
  misc_feature (1)..(132): Homolog of NCBI NO: 30697303 NR Description: actin depolymerizing factor 4 - like protein
  misc_feature (1)..(132): Homolog of NCBI NO: 18408116 NR Description: actin depolymerizing factor 2 (ADF2) [Arabidopsis
  misc_feature (1)..(132): Homolog of NCBI NO: 38564721 NR Description: putative actin-depolymerizing factor 2
  misc_feature (1)..(132): Homolog of NCBI NO: 17366768 NR Description: Actin-depolymerizing factor 1 (ADF 1)
  misc_feature (1)..(131): Homolog of NCBI NO: 17366765 NR Description: Actin-depolymerizing factor 2 (ADF 2)
  misc_feature (1)..(132): Homolog of NCBI NO: 30697303 NR Description: actin depolymerizing factor 4 - like protein
  misc_feature (1)..(132): Homolog of NCBI NO: 38564721 NR Description: putative actin-depolymerizing factor 2
  misc_feature (1)..(131): Homolog of NCBI NO: 17366765 NR Description: Actin-depolymerizing factor 2 (ADF 2)
  misc_feature (1)..(132): Homolog of NCBI NO: 30697295 NR Description: actin depolymerizing factor 3 - like protein
  misc_feature (1)..(132): Homolog of NCBI NO: 15231309 NR Description: actin depolymerizing factor 1 (ADF1) [Arabidopsis
  misc_feature (1)..(132): Homolog of NCBI NO: 30697300 NR Description: actin depolymerizing factor 4 - like protein
  misc_feature (1)..(132): Homolog of NCBI NO: 4185511 NR Description: actin depolymerizing factor 4 [Arabidopsis
  misc_feature (1)..(132): Homolog of NCBI NO: 30697298 NR Description: actin depolymerizing factor 3 - like protein
  misc_feature (1)..(132): Homolog of NCBI NO: 17366768 NR Description: Actin-depolymerizing factor 1 (ADF 1)
  misc_feature (1)..(132): Homolog of NCBI NO: 18408116 NR Description: actin depolymerizing factor 2 (ADF2) [Arabidopsis
  misc_feature (1)..(132): Homolog of NCBI NO: 30697298 NR Description: actin depolymerizing factor 3 - like protein
  misc_feature (1)..(132): Homolog of NCBI NO: 4185511 NR Description: actin depolymerizing factor 4 [Arabidopsis
  misc_feature (1)..(132): Homolog of NCBI NO: 30697300 NR Description: actin depolymerizing factor 4 - like protein
  misc_feature (1)..(132): Homolog of NCBI NO: 15231309 NR Description: actin depolymerizing factor 1 (ADF1) [Arabidopsis
  misc_feature (1)..(132): Homolog of NCBI NO: 30697295 NR Description: actin depolymerizing factor 3 - like protein

SEQ ID NO: 43876 - DNA, 1756 bp, Arabidopsis thaliana
  misc_feature (1)..(1756): Ceres Seq. ID no. 12559094
  misc_feature: MA Experiment ID: 20000179 Result: Down-regulated in Transcription
  misc_feature: MA Experiment 20000179 PARAMETER Experiment Name: At_Germinating_Seeds_P Parameter: Age (hr) Value: 6 vs. 0
  misc_feature: MA Experiment 20000179 PARAMETER Experiment Name: At_Germinating_Seeds_P Parameter: Tissue Value: Germinating Seeds
  misc_feature: MA Experiment ID: 20000180 Result: Down-regulated in Transcription
  misc_feature: MA Experiment 20000180 PARAMETER Experiment Name: At_Germinating_Seeds_P Parameter: Age (hr) Value: 24 vs. 0
  misc_feature: MA Experiment 20000180 PARAMETER Experiment Name: At_Germinating_Seeds_P Parameter: Tissue Value: Germinating Seeds
  misc_feature: MA Experiment ID: 20000182 Result: Up-regulated in Transcription
  misc_feature: MA Experiment 20000182 PARAMETER Experiment Name: At_2mM_SA_P Parameter: Age (day) Value: 14
  misc_feature: MA Experiment 20000182 PARAMETER Experiment Name: At_2mM_SA_P Parameter: Organism Value: A. thaliana
  misc_feature: MA Experiment 20000182 PARAMETER Experiment Name: At_2mM_SA_P Parameter: Plant Line Value: WS
  misc_feature: MA Experiment 20000182 PARAMETER Experiment Name: At_2mM_SA_P Parameter: Timepoint (hr) Value: 6
  misc_feature: MA Experiment 20000182 PARAMETER Experiment Name: At_2mM_SA_P Parameter: Tissue Value: Aerial
  misc_feature: MA Experiment 20000182 PARAMETER Experiment Name: At_2mM_SA_P Parameter: Treatment Value: 2mM SA vs. No Treatment
  misc_feature: MA Experiment ID: 20000185 Result: Up-regulated in Transcription
  misc_feature: MA Experiment 20000185 PARAMETER Experiment Name: At_Roots__P Parameter: Age (day) Value: 7 vs. 21
  misc_feature: MA Experiment 20000185 PARAMETER Experiment Name: At_Roots__P Parameter: Organism Value: A. thaliana
  misc_feature: MA Experiment 20000185 PARAMETER Experiment Name: At_Roots__P Parameter: Tissue Value: Roots vs. Whole Plant
  misc_feature: MA Experiment ID: 20000264 Result: Up-regulated in Transcription
  misc_feature: MA Experiment 20000264 PARAMETER Experiment Name: At_Open_Flower_P Parameter: Age (day) Value: 21
  misc_feature: MA Experiment 20000264 PARAMETER Experiment Name: At_Open_Flower_P Parameter: Plant Line Value: WS
  misc_feature: MA Experiment 20000264 PARAMETER Experiment Name: At_Open_Flower_P Parameter: Tissue Value: Open Flower vs. Whole Plant
  misc_feature: MA Experiment ID: 20000265 Result: Up-regulated in Transcription
  misc_feature: MA Experiment 20000265 PARAMETER Experiment Name: At_Open_Flower_P Parameter: Age (day) Value: 21
  misc_feature: MA Experiment 20000265 PARAMETER Experiment Name: At_Open_Flower_P Parameter: Plant Line Value: WS
  misc_feature: MA Experiment 20000265 PARAMETER Experiment Name: At_Open_Flower_P Parameter: Tissue Value: Closed Flower vs. Whole Plant
  misc_feature: MA Experiment ID: 20000286 Result: Up-regulated in Transcription
  misc_feature: MA Experiment 20000286 PARAMETER Experiment Name: At_Open_Flower_P Parameter: Age (day) Value: 21
  misc_feature: MA Experiment 20000286 PARAMETER Experiment Name: At_Open_Flower_P Parameter: Plant Line Value: WS
  misc_feature: MA Experiment 20000286 PARAMETER Experiment Name: At_Open_Flower_P Parameter: Tissue Value: Half Open vs. Whole Plant
  misc_feature: MA Experiment ID: 20000439 Result: Up-regulated in Transcription
  misc_feature: MA Experiment 20000439 PARAMETER Experiment Name: At_Roots__P Parameter: Age (day) Value: 14 vs. 21
  misc_feature: MA Experiment 20000439 PARAMETER Experiment Name: At_Roots__P Parameter: Organism Value: A. thaliana
  misc_feature: MA Experiment 20000439 PARAMETER Experiment Name: At_Roots__P Parameter: Tissue Value: Roots vs. Whole Plant
  misc_feature: MA Experiment ID: 20000445 Result: Up-regulated in Transcription
  misc_feature: MA Experiment 20000445 PARAMETER Experiment Name: At_100uM_NAA__P Parameter: Age (day) Value: 14
  misc_feature: MA Experiment 20000445 PARAMETER Experiment Name: At_100uM_NAA__P Parameter: Organism Value: A. thaliana
  misc_feature: MA Experiment 20000445 PARAMETER Experiment Name: At_100uM_NAA__P Parameter: Plant Line Value: WS
  misc_feature: MA Experiment 20000445 PARAMETER Experiment Name: At_100uM_NAA__P Parameter: Timepoint (hr) Value: 6
  misc_feature: MA Experiment 20000445 PARAMETER Experiment Name: At_100uM_NAA__P Parameter: Tissue Value: Aerial
  misc_feature: MA Experiment 20000445 PARAMETER Experiment Name: At_100uM_NAA__P Parameter: Treatment Value: 100uM NAA vs. No Treatment
  misc_feature: MA Experiment ID: 20000794 Result: Up-regulated in Transcription
  misc_feature: MA Experiment 20000794 PARAMETER Experiment Name: At_Petals_P Parameter: Age (day) Value: 23-25 days
  misc_feature: MA Experiment 20000794 PARAMETER Experiment Name: At_Petals_P Parameter: Plant Line Value: WS
  misc_feature: MA Experiment 20000794 PARAMETER Experiment Name: At_Petals_P Parameter: Tissue Value: Petals vs. Whole plant
  misc_feature: MA Experiment ID: 20001451 Result: Up-regulated in Transcription
  misc_feature: MA Experiment 20001451 PARAMETER Experiment Name: At_Far-red-induction_P Parameter: Age (day) Value: 7
  misc_feature: MA Experiment 20001451 PARAMETER Experiment Name: At_Far-red-induction_P Parameter: Light Value: Far-red vs. White
  misc_feature: MA Experiment 20001451 PARAMETER Experiment Name: At_Far-red-induction_P Parameter: Organism Value: A. thaliana
  misc_feature: MA Experiment 20001451 PARAMETER Experiment Name: At_Far-red-induction_P Parameter: Plant Line Value: Columbia
  misc_feature: MA Experiment 20001451 PARAMETER Experiment Name: At_Far-red-induction_P Parameter: Timepoint (hr) Value: 24
  misc_feature: MA Experiment 20001451 PARAMETER Experiment Name: At_Far-red-induction_P Parameter: Tissue Value: Whole Plant
cgtacatctcttatttaattcctcaccttgccaaatcacaattctcctcttcaagtcttaaccaaacccaaagtccttcaacaagaaaatccaatggctgatccggcaacgagttctccgttgttggatgaccatgtaggtggagaagatgaaagaggaaggagatcaagatcatcaactttggttcaaaaagtgatcgacgtggaagaagcaaaagctcaaatgatttactctttgccaatgatactcaccaatgttttctactactgtattcctataacttctgtgatgtttgcttctcacctcggtcaactcgagctcgccggtgccacccttgccaattcttgggccaccgtctccggttttgccttcatggtagggttaagtggatcacttgagacattatgtggacaaggctttggtgcaaaaagatacaggatgttgggagttcatctacaatcatcttgcatcgtttcattagttttcagcatcctcatcaccatcttctggttcttcacagaatcgatttttggacttctcagacaagatcctagcatttcaaaacaagctgcactctatatgaagtaccaagctcccggtttactagcttacgggtttttacaaaatattttgagattttgccaaacacaatcgatcattgctccactagtcatcttctcgtttgttcccttggtgataaacattgctaccgcatatgttcttgtttatgtagctgggcttggattcattggtgctccaatagctacatctatttcattgtggatagctttcctttcgcttggaacttatgtgatgtgttcagaaaagtttaaggaaacatggactggattttcgttggaatcattccgttatatcgtaataaacttgacattaagcctcccttctgctgctatggtatgtttggaatattgggcattcgagattcttgtgttcttggcaggagtgatgccaaacccggaaatcaatacttctttggtcgctatatgcgtcaacacggaggcgattagctacatgttaacatacggacttagtgcagctgcaagtacgcgtgtgtccaatgaacttggagcaggaaatgtaaaaggcgcaaagaaggcgacctctgtgtccgtaaagttgtctttagttcttgctctcggcgttgtaattgttttactcgtaggtcatgatggttgggttgggttatttagcgatagctatgtgattaaagaggagtttgcatcattgaggttttttcttgctgcctctataactcttgattcaatccaaggagttttatcaggagttgcaagaggatgcggatggcagcgtttagtcacggttataaatttggcgacattctacttaattggaatgccgattgccgccttttgtggtttcaagttgaagttttatgccaagggtttgtggattggtttgatatgtggaatattttgccaatcatcatctcttttgcttatgacaatattccggaagtggacaaagctgaatgttgctacggtctgaaaactctagttacgttccatttttctacggaggcacatttattttcttaagcagatatggaatcagttatcaagatatatatttggaactcatgatcattttccaaacgcttagttaagatttatctttcttagttttctttttattcttttggagtgtaagggaaataatctggttcacaaagttggtcatggcttgaatattacagcatcattctaagctatctttg

SEQ ID NO: 43877 - protein, 477 aa, Arabidopsis thaliana
  peptide (1)..(477): Ceres Seq. ID no. 12559095
  misc_feature (38)..(469): Homolog of NCBI NO: 15226290 NR Description: hypothetical protein; protein id: At2g34360.1
  misc_feature (38)..(471): Homolog of NCBI NO: 15219524 NR Description: putative integral membrane protein
  misc_feature (2)..(471): Homolog of NCBI NO: 38346676 NR Description: OSJNBa0069D17.7 [Oryza sativa (japonica
  misc_feature (20)..(469): Homolog of NCBI NO: 15237158 NR Description: MATE efflux family protein, putative
  misc_feature (1)..(472): Homolog of NCBI NO: 16797803 NR Description: hypothetical membrane protein-1 [Marchantia
  misc_feature (5)..(98): Homolog of NCBI NO: 34899388 NR Description: putative integral membrane protein
  misc_feature (96)..(443): Homolog of NCBI NO: 34899388 NR Description: putative integral membrane protein
  misc_feature (5)..(472): Homolog of NCBI NO: 34394668 NR Description: putative MATE efflux protein family protein
  misc_feature (1)..(477): Homolog of NCBI NO: 15229468 NR Description: unknown protein
  misc_feature (1)..(477): Homolog of NCBI NO: 18403810 NR Description: expressed protein
MADPATSSPLLDDHVGGEDERGRRSRSSTLVQKVIDVEEAKAQMIYSLPMILTNVFYYCIPITSVMFASHLGQLELAGATLANSWATVSGFAFMVGLSGSLETLCGQGFGAKRYRMLGVHLQSSCIVSLVFSILITIFWFFTESIFGLLRQDPSISKQAALYMKYQAPGLLAYGFLQNILRFCQTQSIIAPLVIFSFVPLVINIATAYVLVYVAGLGFIGAPIATSISLWIAFLSLGTYVMCSEKFKETWTGFSLESFRYIVINLTLSLPSAAMVCLEYWAFEILVFLAGVMPNPEINTSLVAICVNTEAISYMLTYGLSAAASTRVSNELGAGNVKGAKKATSVSVKLSLVLALGVVIVLLVGHDGWVGLFSDSYVIKEEFASLRFFLAASITLDSIQGVLSGVARGCGWQRLVTVINLATFYLIGMPIAAFCGFKLKFYAKGLWIGLICGIFCQSSSLLLMTIFRKWTKLNVATV

SEQ ID NO: 43878 - protein, 434 aa, Arabidopsis thaliana
  peptide (1)..(434): Ceres Seq. ID no. 12559096
  misc_feature (1)..(426): Homolog of NCBI NO: 15226290 NR Description: hypothetical protein; protein id: At2g34360.1
  misc_feature (1)..(428): Homolog of NCBI NO: 15219524 NR Description: putative integral membrane protein
  misc_feature (1)..(428): Homolog of NCBI NO: 38346676 NR Description: OSJNBa0069D17.7 [Oryza sativa (japonica
  misc_feature (1)..(426): Homolog of NCBI NO: 15237158 NR Description: MATE efflux family protein, putative
  misc_feature (1)..(429): Homolog of NCBI NO: 16797803 NR Description: hypothetical membrane protein-1 [Marchantia
  misc_feature (1)..(55): Homolog of NCBI NO: 34899388 NR Description: putative integral membrane protein
  misc_feature (53)..(400): Homolog of NCBI NO: 34899388 NR Description: putative integral membrane protein
  misc_feature (1)..(429): Homolog of NCBI NO: 34394668 NR Description: putative MATE efflux protein family protein
  misc_feature (1)..(434): Homolog of NCBI NO: 15229468 NR Description: unknown protein
  misc_feature (1)..(434): Homolog of NCBI NO: 18403810 NR Description: expressed protein
MIYSLPMILTNVFYYCIPITSVMFASHLGQLELAGATLANSWATVSGFAFMVGLSGSLETLCGQGFGAKRYRMLGVHLQSSCIVSLVFSILITIFWFFTESIFGLLRQDPSISKQAALYMKYQAPGLLAYGFLQNILRFCQTQSIIAPLVIFSFVPLVINIATAYVLVYVAGLGFIGAPIATSISLWIAFLSLGTYVMCSEKFKETWTGFSLESFRYIVINLTLSLPSAAMVCLEYWAFEILVFLAGVMPNPEINTSLVAICVNTEAISYMLTYGLSAAASTRVSNELGAGNVKGAKKATSVSVKLSLVLALGVVIVLLVGHDGWVGLFSDSYVIKEEFASLRFFLAASITLDSIQGVLSGVARGCGWQRLVTVINLATFYLIGMPIAAFCGFKLKFYAKGLWIGLICGIFCQSSSLLLMTIFRKWTKLNVATV

SEQ ID NO: 43879 - protein, 428 aa, Arabidopsis thaliana
  peptide (1)..(428): Ceres Seq. ID no. 12559097
  misc_feature (1)..(420): Homolog of NCBI NO: 15226290 NR Description: hypothetical protein; protein id: At2g34360.1
  misc_feature (1)..(422): Homolog of NCBI NO: 15219524 NR Description: putative integral membrane protein
  misc_feature (1)..(422): Homolog of NCBI NO: 38346676 NR Description: OSJNBa0069D17.7 [Oryza sativa (japonica
  misc_feature (1)..(420): Homolog of NCBI NO: 15237158 NR Description: MATE efflux family protein, putative
  misc_feature (1)..(423): Homolog of NCBI NO: 16797803 NR Description: hypothetical membrane protein-1 [Marchantia
  misc_feature (1)..(49): Homolog of NCBI NO: 34899388 NR Description: putative integral membrane protein
  misc_feature (47)..(394): Homolog of NCBI NO: 34899388 NR Description: putative integral membrane protein
  misc_feature (1)..(423): Homolog of NCBI NO: 34394668 NR Description: putative MATE efflux protein family protein
  misc_feature (1)..(428): Homolog of NCBI NO: 15229468 NR Description: unknown protein
  misc_feature (1)..(428): Homolog of NCBI NO: 18403810 NR Description: expressed protein
MILTNVFYYCIPITSVMFASHLGQLELAGATLANSWATVSGFAFMVGLSGSLETLCGQGFGAKRYRMLGVHLQSSCIVSLVFSILITIFWFFTESIFGLLRQDPSISKQAALYMKYQAPGLLAYGFLQNILRFCQTQSIIAPLVIFSFVPLVINIATAYVLVYVAGLGFIGAPIATSISLWIAFLSLGTYVMCSEKFKETWTGFSLESFRYIVINLTLSLPSAAMVCLEYWAFEILVFLAGVMPNPEINTSLVAICVNTEAISYMLTYGLSAAASTRVSNELGAGNVKGAKKATSVSVKLSLVLALGVVIVLLVGHDGWVGLFSDSYVIKEEFASLRFFLAASITLDSIQGVLSGVARGCGWQRLVTVINLATFYLIGMPIAAFCGFKLKFYAKGLWIGLICGIFCQSSSLLLMTIFRKWTKLNVATV

SEQ ID NO: 43880 - DNA, 636 bp, Arabidopsis thaliana
  misc_feature (1)..(636): Ceres Seq. ID no. 13575604
  misc_feature: MA Experiment ID: 108569 Result: Down-regulated in Transcription
  misc_feature: MA Experiment 108569 PARAMETER Experiment Name: At_0.001%_MeJA__cDNA_P Parameter: Timepoint (hr) Value: 6
  misc_feature: MA Experiment 108569 PARAMETER Experiment Name: At_0.001%_MeJA__cDNA_P Parameter: Tissue Value: Aerial
  misc_feature: MA Experiment 108569 PARAMETER Experiment Name: At_0.001%_MeJA__cDNA_P Parameter: Treatment Value: 0.001% MeJA vs. No Treatment
  misc_feature: MA Experiment ID: 20000087 Result: Up-regulated in Transcription
  misc_feature: MA Experiment 20000087 PARAMETER Experiment Name: At_100uM_ABA_Mutants_cDNA_P Parameter: Plant Line Value: WS
  misc_feature: MA Experiment 20000087 PARAMETER Experiment Name: At_100uM_ABA_Mutants_cDNA_P Parameter: Timepoint (hr) Value: 6
  misc_feature: MA Experiment 20000087 PARAMETER Experiment Name: At_100uM_ABA_Mutants_cDNA_P Parameter: Tissue Value: Aerial
  misc_feature: MA Experiment 20000087 PARAMETER Experiment Name: At_100uM_ABA_Mutants_cDNA_P Parameter: Treatment Value: 100uM ABA vs. No Treatment
  misc_feature: MA Experiment ID: 20000111 Result: Up-regulated in Transcription
  misc_feature: MA Experiment 20000111 PARAMETER Experiment Name: At_42deg_Heat_cDNA_P Parameter: Temperature (deg C) Value: 42 vs. 22
  misc_feature: MA Experiment 20000111 PARAMETER Experiment Name: At_42deg_Heat_cDNA_P Parameter: Timepoint (hr) Value: 6
  misc_feature: MA Experiment 20000111 PARAMETER Experiment Name: At_42deg_Heat_cDNA_P Parameter: Tissue Value: Aerial
  misc_feature: MA Experiment ID: 20000113 Result: Up-regulated in Transcription
  misc_feature: MA Experiment 20000113 PARAMETER Experiment Name: At_42deg_Heat_cDNA_P Parameter: Temperature (deg C) Value: 42 vs. 22
  misc_feature: MA Experiment 20000113 PARAMETER Experiment Name: At_42deg_Heat_cDNA_P Parameter: Timepoint (hr) Value: 8
  misc_feature: MA Experiment 20000113 PARAMETER Experiment Name: At_42deg_Heat_cDNA_P Parameter: Tissue Value: Aerial
  misc_feature: MA Experiment ID: 20000496 Result: Up-regulated in Transcription
  misc_feature: MA Experiment 20000496 PARAMETER Experiment Name: At_Guard_Cells_P Parameter: Harvest Date Value: 7/19/2002
  misc_feature: MA Experiment 20000496 PARAMETER Experiment Name: At_Guard_Cells_P Parameter: Organism Value: Canola
  misc_feature: MA Experiment 20000496 PARAMETER Experiment Name: At_Guard_Cells_P Parameter: Tissue Value: Guard Cells vs. Leaves
gaaacactatcgaacctcaaaatctctgttgccggaaattttcttcaccgaaactgaaagaagtcnaaagagagaagagaagaaattgaagcaatggagggagcagaggaagctggggctgagatagcggttgattcaaaggacttgcagcaacaaagcaaagctttcgacaagctcaccgatcgtgtcgaggatcgccagctcgattcctctcgtgttcaatcggctatggcttcgattgctgcttctagggaggctgatctgaatgctaagaggttgagggagaaagaactggcctctgtgaagatcaatcctgcagatgttgagtttattgtaaacgaacttgagatagaaaagaatgtggcggaaagaactctaagggagcacaaaggtgatgcggttgctgcgactaggcaattgctttcacgatatcctctatgatggagcaggaccattctttacttccaaggttttttgtatgtttgagaggttgagagcaagtctcctaatatttaaccgagttaaaattgtctattggtgaaccgatctctttgagaagccctgaatccagttacaatcgattttggggtggtgttttgtggttctatctgaagtttgaagttcaatcttattatc

SEQ ID NO: 43881 - protein, 115 aa, Arabidopsis thaliana; identical to SEQ ID NO: 26995
  peptide (1)..(115): Ceres Seq. ID no. 13575605
  misc_feature (1)..(111): Homolog of NCBI NO: 21358275 NR Description: CG9922-PA [Drosophila melanogaster]
  misc_feature (1)..(105): Homolog of NCBI NO: 6841494 NR Description: HSPC136 [Homo sapiens]
  misc_feature (1)..(105): Homolog of NCBI NO: 3329429 NR Description: huntingtin interacting protein HYPK [Homo sapiens]
  misc_feature (1)..(105): Homolog of NCBI NO: 27734984 NR Description: Huntingtin interacting protein K [Homo sapiens]
  misc_feature (1)..(105): Homolog of NCBI NO: 34856780 NR Description: similar to RIKEN cDNA 2310003F16 [Rattus
  misc_feature (1)..(105): Homolog of NCBI NO: 27229055 NR Description: RIKEN cDNA 2310003F16 [Mus musculus]
  misc_feature (1)..(105): Homolog of NCBI NO: 7020527 NR Description: unnamed protein product [Homo sapiens]
  misc_feature (1)..(115): Homolog of NCBI NO: 18397632 NR Description: expressed protein [Arabidopsis thaliana]

SEQ ID NO: 43882 - protein, 70 aa, Arabidopsis thaliana; identical to SEQ ID NO: 26996
  peptide (1)..(70): Ceres Seq. ID no. 13575606
  misc_feature (1)..(66): Homolog of NCBI NO: 21358275 NR Description: CG9922-PA [Drosophila melanogaster]
  misc_feature (1)..(60): Homolog of NCBI NO: 6841494 NR Description: HSPC136 [Homo sapiens]
  misc_feature (1)..(60): Homolog of NCBI NO: 3329429 NR Description: huntingtin interacting protein HYPK [Homo sapiens]
  misc_feature (1)..(60): Homolog of NCBI NO: 27734984 NR Description: Huntingtin interacting protein K [Homo sapiens]
  misc_feature (1)..(60): Homolog of NCBI NO: 34856780 NR Description: similar to RIKEN cDNA 2310003F16 [Rattus
  misc_feature (1)..(60): Homolog of NCBI NO: 27229055 NR Description: RIKEN cDNA 2310003F16 [Mus musculus]
  misc_feature (1)..(60): Homolog of NCBI NO: 7020527 NR Description: unnamed protein product [Homo sapiens]
  misc_feature (1)..(70): Homolog of NCBI NO: 18397632 NR Description: expressed protein [Arabidopsis thaliana]

SEQ ID NO: 43883 - DNA, 1830 bp, Arabidopsis thaliana; identical to SEQ ID NO: 37266
  misc_feature (1)..(1830): Ceres Seq. ID no. 13592216
  misc_feature: MA Experiment ID: 20000180 Result: Up-regulated in Transcription
  misc_feature: MA Experiment 20000180 PARAMETER Experiment Name: At_Germinating_Seeds_P Parameter: Age (hr) Value: 24 vs. 0
  misc_feature: MA Experiment 20000180 PARAMETER Experiment Name: At_Germinating_Seeds_P Parameter: Tissue Value: Germinating Seeds
  misc_feature: MA Experiment ID: 20000227 Result: Up-regulated in Transcription
  misc_feature: MA Experiment 20000227 PARAMETER Experiment Name: At_Root-Tips-vs-Tops_P Parameter: Tissue Value: Root Tips vs. Root Tops
  misc_feature: MA Experiment ID: 20000234 Result: Down-regulated in Transcription
  misc_feature: MA Experiment 20000234 PARAMETER Experiment Name: At_Siliques_P Parameter: Age (day) Value: 21
  misc_feature: MA Experiment 20000234 PARAMETER Experiment Name: At_Siliques_P Parameter: Organism Value: A. thaliana
  misc_feature: MA Experiment 20000234 PARAMETER Experiment Name: At_Siliques_P Parameter: Plant Line Value: WS
  misc_feature: MA Experiment 20000234 PARAMETER Experiment Name: At_Siliques_P Parameter: Tissue Value: Less Than 5mm Siliques vs. Whole Plant
  misc_feature: MA Experiment ID: 20000264 Result: Up-regulated in Transcription
  misc_feature: MA Experiment 20000264 PARAMETER Experiment Name: At_Open_Flower_P Parameter: Age (day) Value: 21
  misc_feature: MA Experiment 20000264 PARAMETER Experiment Name: At_Open_Flower_P Parameter: Plant Line Value: WS
  misc_feature: MA Experiment 20000264 PARAMETER Experiment Name: At_Open_Flower_P Parameter: Tissue Value: Open Flower vs. Whole Plant
  misc_feature: MA Experiment ID: 20000265 Result: Up-regulated in Transcription
  misc_feature: MA Experiment 20000265 PARAMETER Experiment Name: At_Open_Flower_P Parameter: Age (day) Value: 21
  misc_feature: MA Experiment 20000265 PARAMETER Experiment Name: At_Open_Flower_P Parameter: Plant Line Value: WS
  misc_feature: MA Experiment 20000265 PARAMETER Experiment Name: At_Open_Flower_P Parameter: Tissue Value: Closed Flower vs. Whole Plant
  misc_feature: MA Experiment ID: 20000286 Result: Up-regulated in Transcription
  misc_feature: MA Experiment 20000286 PARAMETER Experiment Name: At_Open_Flower_P Parameter: Age (day) Value: 21
  misc_feature: MA Experiment 20000286 PARAMETER Experiment Name: At_Open_Flower_P Parameter: Plant Line Value: WS
  misc_feature: MA Experiment 20000286 PARAMETER Experiment Name: At_Open_Flower_P Parameter: Tissue Value: Half Open vs. Whole Plant
  misc_feature: MA Experiment ID: 20000438 Result: Down-regulated in Transcription
  misc_feature: MA Experiment 20000438 PARAMETER Experiment Name: At_Shoots__P Parameter: Age (day) Value: 14
  misc_feature: MA Experiment 20000438 PARAMETER Experiment Name: At_Shoots__P Parameter: Tissue Value: Shoots vs. Whole Plant
  misc_feature: MA Experiment ID: 20000794 Result: Up-regulated in Transcription
  misc_feature: MA Experiment 20000794 PARAMETER Experiment Name: At_Petals_P Parameter: Age (day) Value: 23-25 days
  misc_feature: MA Experiment 20000794 PARAMETER Experiment Name: At_Petals_P Parameter: Plant Line Value: WS
  misc_feature: MA Experiment 20000794 PARAMETER Experiment Name: At_Petals_P Parameter: Tissue Value: Petals vs. Whole plant
  misc_feature: MA Experiment ID: 20001555 Result: Up-regulated in Transcription
  misc_feature: MA Experiment 20001555 PARAMETER Experiment Name: At_Drought_Soil_Dry_P Parameter: Age (day) Value: 24
  misc_feature: MA Experiment 20001555 PARAMETER Experiment Name: At_Drought_Soil_Dry_P Parameter: Organism Value: A. thaliana
  misc_feature: MA Experiment 20001555 PARAMETER Experiment Name: At_Drought_Soil_Dry_P Parameter: Plant Line Value: WS
  misc_feature: MA Experiment 20001555 PARAMETER Experiment Name: At_Drought_Soil_Dry_P Parameter: Post Timepoint (hr) Value: None
  misc_feature: MA Experiment 20001555 PARAMETER Experiment Name: At_Drought_Soil_Dry_P Parameter: Post-Treatment Value: None
  misc_feature: MA Experiment 20001555 PARAMETER Experiment Name: At_Drought_Soil_Dry_P Parameter: Timepoint (day) Value: 10
  misc_feature: MA Experiment 20001555 PARAMETER Experiment Name: At_Drought_Soil_Dry_P Parameter: Treatment Value: Drought vs. No Drought
  misc_feature: MA Experiment ID: 20001904 Result: Up-regulated in Transcription
  misc_feature: MA Experiment 20001904 PARAMETER Experiment Name: At_Drought_Reproduction_P Parameter: Age (day) Value: 37
  misc_feature: MA Experiment 20001904 PARAMETER Experiment Name: At_Drought_Reproduction_P Parameter: Organism Value: A. thaliana
  misc_feature: MA Experiment 20001904 PARAMETER Experiment Name: At_Drought_Reproduction_P Parameter: Plant Line Value: WS
  misc_feature: MA Experiment 20001904 PARAMETER Experiment Name: At_Drought_Reproduction_P Parameter: Timepoint (day) Value: 7
  misc_feature: MA Experiment 20001904 PARAMETER Experiment Name: At_Drought_Reproduction_P Parameter: Tissue Value: Rosettes
  misc_feature: MA Experiment 20001904 PARAMETER Experiment Name: At_Drought_Reproduction_P Parameter: Treatment Value: Drought vs. No Drought
  misc_feature: MA Experiment ID: 20001905 Result: Up-regulated in Transcription
  misc_feature: MA Experiment 20001905 PARAMETER Experiment Name: At_Drought_Reproduction_P Parameter: Age (day) Value: 40
  misc_feature: MA Experiment 20001905 PARAMETER Experiment Name: At_Drought_Reproduction_P Parameter: Organism Value: A. thaliana
  misc_feature: MA Experiment 20001905 PARAMETER Experiment Name: At_Drought_Reproduction_P Parameter: Plant Line Value: WS
  misc_feature: MA Experiment 20001905 PARAMETER Experiment Name: At_Drought_Reproduction_P Parameter: Timepoint (day) Value: 10
  misc_feature: MA Experiment 20001905 PARAMETER Experiment Name: At_Drought_Reproduction_P Parameter: Tissue Value: Rosettes
  misc_feature: MA Experiment 20001905 PARAMETER Experiment Name: At_Drought_Reproduction_P Parameter: Treatment Value: Drought vs. No Drought
  misc_feature: MA Experiment ID: 20001911 Result: Down-regulated in Transcription
  misc_feature: MA Experiment 20001911 PARAMETER Experiment Name: At_Drought_Reproduction_P Parameter: Age (day) Value: 40
  misc_feature: MA Experiment 20001911 PARAMETER Experiment Name: At_Drought_Reproduction_P Parameter: Organism Value: A. thaliana
  misc_feature: MA Experiment 20001911 PARAMETER Experiment Name: At_Drought_Reproduction_P Parameter: Plant Line Value: WS
  misc_feature: MA Experiment 20001911 PARAMETER Experiment Name: At_Drought_Reproduction_P Parameter: Timepoint (day) Value: 10
  misc_feature: MA Experiment 20001911 PARAMETER Experiment Name: At_Drought_Reproduction_P Parameter: Tissue Value: Flowers
  misc_feature: MA Experiment 20001911 PARAMETER Experiment Name: At_Drought_Reproduction_P Parameter: Treatment Value: Drought vs. No Drought

SEQ ID NO: 43884 - protein, 508 aa, Arabidopsis thaliana; identical to SEQ ID NO: 37267
  peptide (1)..(508): Ceres Seq. ID no. 13592217
  misc_feature (32)..(361): Pfam Name: Eukaryotic aspartyl protease Pfam Description: Eukaryotic aspartyl protease
  misc_feature (32)..(361): Pfam Name: Eukaryotic aspartyl protease Pfam Description: Eukaryotic aspartyl protease
  misc_feature (1)..(508): Homolog of NCBI NO: 7435838 NR Description: probable aspartic proteinase (EC 3.4.23.-) 1 -
  misc_feature (1)..(508): Homolog of NCBI NO: 21616053 NR Description: aspartic proteinase [Theobroma cacao]
  misc_feature (1)..(508): Homolog of NCBI NO: 21616053 NR Description: aspartic proteinase [Theobroma cacao]
  misc_feature (1)..(508): Homolog of NCBI NO: 15233518 NR Description: aspartic protease -related [Arabidopsis thaliana]
  misc_feature (1)..(508): Homolog of NCBI NO: 7435838 NR Description: probable aspartic proteinase (EC 3.4.23.-) 1 -
  misc_feature (1)..(508): Homolog of NCBI NO: 15233518 NR Description: aspartic protease -related [Arabidopsis thaliana]

SEQ ID NO: 43885 - protein, 433 aa, Arabidopsis thaliana; identical to SEQ ID NO: 37268
  peptide (1)..(433): Ceres Seq. ID no. 13592218
  misc_feature (1)..(286): Pfam Name: Eukaryotic aspartyl protease Pfam Description: Eukaryotic aspartyl protease
  misc_feature (1)..(286): Pfam Name: Eukaryotic aspartyl protease Pfam Description: Eukaryotic aspartyl protease
  misc_feature (1)..(433): Homolog of NCBI NO: 7435838 NR Description: probable aspartic proteinase (EC 3.4.23.-) 1 -
  misc_feature (1)..(433): Homolog of NCBI NO: 21616053 NR Description: aspartic proteinase [Theobroma cacao]
  misc_feature (1)..(433): Homolog of NCBI NO: 21616053 NR Description: aspartic proteinase [Theobroma cacao]
  misc_feature (1)..(433): Homolog of NCBI NO: 15233518 NR Description: aspartic protease -related [Arabidopsis thaliana]
  misc_feature (1)..(433): Homolog of NCBI NO: 7435838 NR Description: probable aspartic proteinase (EC 3.4.23.-) 1 -
  misc_feature (1)..(433): Homolog of NCBI NO: 15233518 NR Description: aspartic protease -related [Arabidopsis thaliana]

SEQ ID NO: 43886 - protein, 295 aa, Arabidopsis thaliana; identical to SEQ ID NO: 37269
  peptide (1)..(295): Ceres Seq. ID no. 13592219
  misc_feature (1)..(148): Pfam Name: Eukaryotic aspartyl protease Pfam Description: Eukaryotic aspartyl protease
  misc_feature (1)..(148): Pfam Name: Eukaryotic aspartyl protease Pfam Description: Eukaryotic aspartyl protease
  misc_feature (1)..(295): Homolog of NCBI NO: 7435838 NR Description: probable aspartic proteinase (EC 3.4.23.-) 1 -
  misc_feature (1)..(295): Homolog of NCBI NO: 21616053 NR Description: aspartic proteinase [Theobroma cacao]
  misc_feature (1)..(295): Homolog of NCBI NO: 21616053 NR Description: aspartic proteinase [Theobroma cacao]
  misc_feature (1)..(295): Homolog of NCBI NO: 15233518 NR Description: aspartic protease -related [Arabidopsis thaliana]
  misc_feature (1)..(295): Homolog of NCBI NO: 7435838 NR Description: probable aspartic proteinase (EC 3.4.23.-) 1 -
  misc_feature (1)..(295): Homolog of NCBI NO: 15233518 NR Description: aspartic protease -related [Arabidopsis thaliana]

SEQ ID NO: 43887 - DNA, 1932 bp, Arabidopsis thaliana
  misc_feature (1)..(1932): Ceres Seq. ID no. 13593583
  misc_feature: MA Experiment ID: 20000179 Result: Up-regulated in Transcription
  misc_feature: MA Experiment 20000179 PARAMETER Experiment Name: At_Germinating_Seeds_P Parameter: Age (hr) Value: 6 vs. 0
  misc_feature: MA Experiment 20000179 PARAMETER Experiment Name: At_Germinating_Seeds_P Parameter: Tissue Value: Germinating Seeds
  misc_feature: MA Experiment ID: 20000180 Result: Up-regulated in Transcription
  misc_feature: MA Experiment 20000180 PARAMETER Experiment Name: At_Germinating_Seeds_P Parameter: Age (hr) Value: 24 vs. 0
  misc_feature: MA Experiment 20000180 PARAMETER Experiment Name: At_Germinating_Seeds_P Parameter: Tissue Value: Germinating Seeds
  misc_feature: MA Experiment ID: 20000184 Result: Up-regulated in Transcription
  misc_feature: MA Experiment 20000184 PARAMETER Experiment Name: At_Shoots__P Parameter: Age (day) Value: 7
  misc_feature: MA Experiment 20000184 PARAMETER Experiment Name: At_Shoots__P Parameter: Tissue Value: Shoots vs. Whole Plant
  misc_feature: MA Experiment ID: 20000185 Result: Down-regulated in Transcription
  misc_feature: MA Experiment 20000185 PARAMETER Experiment Name: At_Roots__P Parameter: Age (day) Value: 7 vs. 21
  misc_feature: MA Experiment 20000185 PARAMETER Experiment Name: At_Roots__P Parameter: Organism Value: A. thaliana
  misc_feature: MA Experiment 20000185 PARAMETER Experiment Name: At_Roots__P Parameter: Tissue Value: Roots vs. Whole Plant
  misc_feature: MA Experiment ID: 20000234 Result: Up-regulated in Transcription
  misc_feature: MA Experiment 20000234 PARAMETER Experiment Name: At_Siliques_P Parameter: Age (day) Value: 21
  misc_feature: MA Experiment 20000234 PARAMETER Experiment Name: At_Siliques_P Parameter: Organism Value: A. thaliana
  misc_feature: MA Experiment 20000234 PARAMETER Experiment Name: At_Siliques_P Parameter: Plant Line Value: WS
  misc_feature: MA Experiment 20000234 PARAMETER Experiment Name: At_Siliques_P Parameter: Tissue Value: Less Than 5mm Siliques vs. Whole Plant
  misc_feature: MA Experiment ID: 20000235 Result: Up-regulated in Transcription
  misc_feature: MA Experiment 20000235 PARAMETER Experiment Name: At_Siliques_P Parameter: Age (day) Value: 21
  misc_feature: MA Experiment 20000235 PARAMETER Experiment Name: At_Siliques_P Parameter: Organism Value: A. thaliana
  misc_feature: MA Experiment 20000235 PARAMETER Experiment Name: At_Siliques_P Parameter: Plant Line Value: WS
  misc_feature: MA Experiment 20000235 PARAMETER Experiment Name: At_Siliques_P Parameter: Tissue Value: 5-10mm Siliques vs. Whole Plant
  misc_feature: MA Experiment ID: 20000264 Result: Up-regulated in Transcription
  misc_feature: MA Experiment 20000264 PARAMETER Experiment Name: At_Open_Flower_P Parameter: Age (day) Value: 21
  misc_feature: MA Experiment 20000264 PARAMETER Experiment Name: At_Open_Flower_P Parameter: Plant Line Value: WS
  misc_feature: MA Experiment 20000264 PARAMETER Experiment Name: At_Open_Flower_P Parameter: Tissue Value: Open Flower vs. Whole Plant
  misc_feature: MA Experiment ID: 20000437 Result: Down-regulated in Transcription
  misc_feature: MA Experiment 20000437 PARAMETER Experiment Name: At_Drought_P Parameter: Age (day) Value: 8
  misc_feature: MA Experiment 20000437 PARAMETER Experiment Name: At_Drought_P Parameter: Organism Value: A. thaliana
  misc_feature: MA Experiment 20000437 PARAMETER Experiment Name: At_Drought_P Parameter: Plant Line Value: WS
  misc_feature: MA Experiment 20000437 PARAMETER Experiment Name: At_Drought_P Parameter: Timepoint (hr) Value: 24
  misc_feature: MA Experiment 20000437 PARAMETER Experiment Name: At_Drought_P Parameter: Tissue Value: Whole Plant
  misc_feature: MA Experiment 20000437 PARAMETER Experiment Name: At_Drought_P Parameter: Treatment Value: Drought vs. No Drought
  misc_feature: MA Experiment ID: 20000438 Result: Up-regulated in Transcription
  misc_feature: MA Experiment 20000438 PARAMETER Experiment Name: At_Shoots__P Parameter: Age (day) Value: 14
  misc_feature: MA Experiment 20000438 PARAMETER Experiment Name: At_Shoots__P Parameter: Tissue Value: Shoots vs. Whole Plant
  misc_feature: MA Experiment ID: 20000439 Result: Down-regulated in Transcription
  misc_feature: MA Experiment 20000439 PARAMETER Experiment Name: At_Roots__P Parameter: Age (day) Value: 14 vs. 21
  misc_feature: MA Experiment 20000439 PARAMETER Experiment Name: At_Roots__P Parameter: Organism Value: A. thaliana
  misc_feature: MA Experiment 20000439 PARAMETER Experiment Name: At_Roots__P Parameter: Tissue Value: Roots vs. Whole Plant
  misc_feature: MA Experiment ID: 20001248 Result: Down-regulated in Transcription
  misc_feature: MA Experiment 20001248 PARAMETER Experiment Name: At_Far-red-induction_P Parameter: Age (day) Value: 7
  misc_feature: MA Experiment 20001248 PARAMETER Experiment Name: At_Far-red-induction_P Parameter: Light Value: Far-red vs. White
  misc_feature: MA Experiment 20001248 PARAMETER Experiment Name: At_Far-red-induction_P Parameter: Organism Value: A. thaliana
  misc_feature: MA Experiment 20001248 PARAMETER Experiment Name: At_Far-red-induction_P Parameter: Plant Line Value: Columbia
  misc_feature: MA Experiment 20001248 PARAMETER Experiment Name: At_Far-red-induction_P Parameter: Timepoint (hr) Value: 4
  misc_feature: MA Experiment 20001248 PARAMETER Experiment Name: At_Far-red-induction_P Parameter: Tissue Value: Whole Plant
  misc_feature: MA Experiment ID: 20001450 Result: Down-regulated in Transcription
  misc_feature: MA Experiment 20001450 PARAMETER Experiment Name: At_Far-red-induction_P Parameter: Age (day) Value: 7
  misc_feature: MA Experiment 20001450 PARAMETER Experiment Name: At_Far-red-induction_P Parameter: Light Value: Far-red vs. White
  misc_feature: MA Experiment 20001450 PARAMETER Experiment Name: At_Far-red-induction_P Parameter: Organism Value: A. thaliana
  misc_feature: MA Experiment 20001450 PARAMETER Experiment Name: At_Far-red-induction_P Parameter: Plant Line Value: Columbia
  misc_feature: MA Experiment 20001450 PARAMETER Experiment Name: At_Far-red-induction_P Parameter: Timepoint (hr) Value: 8
  misc_feature: MA Experiment 20001450 PARAMETER Experiment Name: At_Far-red-induction_P Parameter: Tissue Value: Whole Plant
  misc_feature: MA Experiment ID: 20001559 Result: Down-regulated in Transcription
  misc_feature: MA Experiment 20001559 PARAMETER Experiment Name: At_Drought_Soil_Dry_P Parameter: Age (day) Value: 28
  misc_feature: MA Experiment 20001559 PARAMETER Experiment Name: At_Drought_Soil_Dry_P Parameter: Organism Value: A. thaliana
  misc_feature: MA Experiment 20001559 PARAMETER Experiment Name: At_Drought_Soil_Dry_P Parameter: Plant Line Value: WS
  misc_feature: MA Experiment 20001559 PARAMETER Experiment Name: At_Drought_Soil_Dry_P Parameter: Post Timepoint (hr) Value: 29
  misc_feature: MA Experiment 20001559 PARAMETER Experiment Name: At_Drought_Soil_Dry_P Parameter: Post-Treatment Value: Re-Water vs. No Drought
  misc_feature: MA Experiment 20001559 PARAMETER Experiment Name: At_Drought_Soil_Dry_P Parameter: Timepoint (day) Value: 14
  misc_feature: MA Experiment 20001559 PARAMETER Experiment Name: At_Drought_Soil_Dry_P Parameter: Treatment Value: Drought vs. No Drought
  misc_feature: MA Experiment ID: 20001904 Result: Down-regulated in Transcription
  misc_feature: MA Experiment 20001904 PARAMETER Experiment Name: At_Drought_Reproduction_P Parameter: Age (day) Value: 37
  misc_feature: MA Experiment 20001904 PARAMETER Experiment Name: At_Drought_Reproduction_P Parameter: Organism Value: A. thaliana
  misc_feature: MA Experiment 20001904 PARAMETER Experiment Name: At_Drought_Reproduction_P Parameter: Plant Line Value: WS
  misc_feature: MA Experiment 20001904 PARAMETER Experiment Name: At_Drought_Reproduction_P Parameter: Timepoint (day) Value: 7
  misc_feature: MA Experiment 20001904 PARAMETER Experiment Name: At_Drought_Reproduction_P Parameter: Tissue Value: Rosettes
  misc_feature: MA Experiment 20001904 PARAMETER Experiment Name: At_Drought_Reproduction_P Parameter: Treatment Value: Drought vs. No Drought
  misc_feature: MA Experiment ID: 20001905 Result: Down-regulated in Transcription
  misc_feature: MA Experiment 20001905 PARAMETER Experiment Name: At_Drought_Reproduction_P Parameter: Age (day) Value: 40
  misc_feature: MA Experiment 20001905 PARAMETER Experiment Name: At_Drought_Reproduction_P Parameter: Organism Value: A. thaliana
  misc_feature: MA Experiment 20001905 PARAMETER Experiment Name: At_Drought_Reproduction_P Parameter: Plant Line Value: WS
  misc_feature: MA Experiment 20001905 PARAMETER Experiment Name: At_Drought_Reproduction_P Parameter: Timepoint (day) Value: 10
  misc_feature: MA Experiment 20001905 PARAMETER Experiment Name: At_Drought_Reproduction_P Parameter: Tissue Value: Rosettes
  misc_feature: MA Experiment 20001905 PARAMETER Experiment Name: At_Drought_Reproduction_P Parameter: Treatment Value: Drought vs. No Drought
tctacctcctcctcattttctcctcttgattcactaattcttcttcttcttcttcttttcagacatgactcttccttatcgtttctcttccgttagaaaccactcacttctacttaagacttctcatctctgcacacccagatcagctcttggttgttgtttctctcccaaggaatcccctttcttcaggaagaacactgcccaattcctttctcctcagaaacacacttctcttcctctgaaacttgtctgccctttagctagtttctcttcttatgcggattctgagggagaagagcaacaccatgctgatcaaccgatacagaaccctcacgaatcttctaccgtttcaaacgaatcagatgggaaaggtaatgcagaagctactggagacttttctggaatggctcaagcctttcacatttcttccacaacagcaagggcaatctctatagtcatcgccttctctgctctcacccttccaatcttcatgaagtccctgggacaaggactggctctcaagaccaagcttctctcttacgcaacactactctttggtttctacatggcctggaacatcggagctaatgatgtcgcaaatgccatggggacttctgttggatctggagccttgacaatccggcaagctgtgatgacagctgcagttctcgaattctcaggtgctcttttgatgggaactcacgtgactagcacgatgcagaaaggaattctcatggctaatgtgttccaagggaaagatatgttgctctttgctggtctcctctcttccttagctgcagctggaacttggttacaggtagcttcttactatggatggccagtatcaacaactcactgtatcgtcggatcaatggttgggtttgggcttgtatatggaggagctggtgccgttttctggagttccctagctaaagtagcttcatcttgggtcatctctcctatactgggagctcttgtctccttcctagtctacaaatgcatcaggagatttgtttacagtgcaccaaacccaggacaagcagcggctgctgccgctcccgtcgctgtatttgtaggtgtggccagtatctcctcagccgcattgcctctaagtaagatctttccaatagctctatcacaagccttagcctgtggagtagcaggagccatagtattcgacagaatcatccgcaaacagctcggtcacctcctagctaaaacaaaatcaccagaaacatctcaaaaccaacccaaaaccattggtttcctctccgatatcgcaggaccaacaggtacacaactcgaaatagtctacggaatctttggctatatgcaagtcctctccgcttgcttcatgtcattcgctcacggaggcaacgacgtctccaacgcaatcggaccattagccgccgcattaagcattctccaaaacggagcagctgcaggaggagccgagatcgttatcccaatggatgttctcgcttggggaggattcggaatcgttgctggtctcacaatgtggggatacagagtcatcgcaacgatagggaagaagatcactgagctaacaccaacaagaggattcgctgcggaattcgccgccgcgtcggttgttttgtttgcttcgaaattagggcttccgatttctgcgactcatacacttgttggtgctgtgatgggtgttggtttcgctagagggcttaatagtgtgagagctgagactgtgagagagatcgttgcttcgtggcttgtcaccattcccgttggtgctacactcgccgttatctacacttggattttcaccaagatcttatcttttgtattgtgagtttctgtttcttttggttttgttatacgaagaacatgaaattgatcttcttcttctatgttcgtttgaatgattcgagtttgaaaaaaccctaaagttatcat

SEQ ID NO: 43888 - protein, 587 aa, Arabidopsis thaliana
  peptide (1)..(587): Ceres Seq. ID no. 13593584
  misc_feature (172)..(572): Pfam Name: Phosphate transporter family Pfam Description: Phosphate transporter family
  misc_feature (416)..(575): Homolog of NCBI NO: 28897192 NR Description: pho4 family protein [Vibrio parahaemolyticus RIMD
  misc_feature (156)..(337): Homolog of NCBI NO: 28897192 NR Description: pho4 family protein [Vibrio parahaemolyticus RIMD
  misc_feature (162)..(575): Homolog of NCBI NO: 15618590 NR Description: Phosphate Permease [Chlamydophila pneumoniae
  misc_feature (416)..(575): Homolog of NCBI NO: 15642438 NR Description: pho4 family protein [Vibrio cholerae]
  misc_feature (148)..(337): Homolog of NCBI NO: 15642438 NR Description: pho4 family protein [Vibrio cholerae]
  misc_feature (15)..(587): Homolog of NCBI NO: 22450125 NR Description: phosphate hydrogen transporter [Spinacia oleracea]
  misc_feature (49)..(587): Homolog of NCBI NO: 24079961 NR Description: phosphate transporter PHT2-1 [Medicago truncatula]
  misc_feature (43)..(587): Homolog of NCBI NO: 7522208 NR Description: probable phosphate permease - common ice plant
  misc_feature (1)..(587): Homolog of NCBI NO: 30688383 NR Description: phosphate transporter -related [Arabidopsis
  misc_feature (1)..(587): Homolog of NCBI NO: 30688378 NR Description: phosphate transporter -related [Arabidopsis
MTLPYRFSSVRNHSLLLKTSHLCTPRSALGCCFSPKESPFFRKNTAQFLSPQKHTSLPLKLVCPLASFSSYADSEGEEQHHADQPIQNPHESSTVSNESDGKGNAEATGDFSGMAQAFHISSTTARAISIVIAFSALTLPIFMKSLGQGLALKTKLLSYATLLFGFYMAWNIGANDVANAMGTSVGSGALTIRQAVMTAAVLEFSGALLMGTHVTSTMQKGILMANVFQGKDMLLFAGLLSSLAAAGTWLQVASYYGWPVSTTHCIVGSMVGFGLVYGGAGAVFWSSLAKVASSWVISPILGALVSFLVYKCIRRFVYSAPNPGQAAAAAAPVAVFVGVASISSAALPLSKIFPIALSQALACGVAGAIVFDRIIRKQLGHLLAKTKSPETSQNQPKTIGFLSDIAGPTGTQLEIVYGIFGYMQVLSACFMSFAHGGNDVSNAIGPLAAALSILQNGAAAGGAEIVIPMDVLAWGGFGIVAGLTMWGYRVIATIGKKITELTPTRGFAAEFAAASVVLFASKLGLPISATHTLVGAVMGVGFARGLNSVRAETVREIVASWLVTIPVGATLAVIYTWIFTKILSFVL

SEQ ID NO: 43889 - protein, 474 aa, Arabidopsis thaliana
  peptide (1)..(474): Ceres Seq. ID no. 13593585
  misc_feature (59)..(459): Pfam Name: Phosphate transporter family Pfam Description: Phosphate transporter family
  misc_feature (303)..(462): Homolog of NCBI NO: 28897192 NR Description: pho4 family protein [Vibrio parahaemolyticus RIMD
  misc_feature (43)..(224): Homolog of NCBI NO: 28897192 NR Description: pho4 family protein [Vibrio parahaemolyticus RIMD
  misc_feature (49)..(462): Homolog of NCBI NO: 15618590 NR Description: Phosphate Permease [Chlamydophila pneumoniae
  misc_feature (303)..(462): Homolog of NCBI NO: 15642438 NR Description: pho4 family protein [Vibrio cholerae]
  misc_feature (35)..(224): Homolog of NCBI NO: 15642438 NR Description: pho4 family protein [Vibrio cholerae]
  misc_feature (1)..(474): Homolog of NCBI NO: 22450125 NR Description: phosphate hydrogen transporter [Spinacia oleracea]
  misc_feature (1)..(474): Homolog of NCBI NO: 24079961 NR Description: phosphate transporter PHT2-1 [Medicago truncatula]
  misc_feature (1)..(474): Homolog of NCBI NO: 7522208 NR Description: probable phosphate permease - common ice plant
  misc_feature (1)..(474): Homolog of NCBI NO: 30688383 NR Description: phosphate transporter -related [Arabidopsis
  misc_feature (1)..(474): Homolog of NCBI NO: 30688378 NR Description: phosphate transporter -related [Arabidopsis
MAQAFHISSTTARAISIVIAFSALTLPIFMKSLGQGLALKTKLLSYATLLFGFYMAWNIGANDVANAMGTSVGSGALTIRQAVMTAAVLEFSGALLMGTHVTSTMQKGILMANVFQGKDMLLFAGLLSSLAAAGTWLQVASYYGWPVSTTHCIVGSMVGFGLVYGGAGAVFWSSLAKVASSWVISPILGALVSFLVYKCIRRFVYSAPNPGQAAAAAAPVAVFVGVASISSAALPLSKIFPIALSQALACGVAGAIVFDRIIRKQLGHLLAKTKSPETSQNQPKTIGFLSDIAGPTGTQLEIVYGIFGYMQVLSACFMSFAHGGNDVSNAIGPLAAALSILQNGAAAGGAEIVIPMDVLAWGGFGIVAGLTMWGYRVIATIGKKITELTPTRGFAAEFAAASVVLFASKLGLPISATHTLVGAVMGVGFARGLNSVRAETVREIVASWLVTIPVGATLAVIYTWIFTKILSFVL

SEQ ID NO: 43890 - protein, 445 aa, Arabidopsis thaliana
  peptide (1)..(445): Ceres Seq. ID no. 13593586
  misc_feature (30)..(430): Pfam Name: Phosphate transporter family Pfam Description: Phosphate transporter family
  misc_feature (274)..(433): Homolog of NCBI NO: 28897192 NR Description: pho4 family protein [Vibrio parahaemolyticus RIMD
  misc_feature (14)..(195): Homolog of NCBI NO: 28897192 NR Description: pho4 family protein [Vibrio parahaemolyticus RIMD
  misc_feature (20)..(433): Homolog of NCBI NO: 15618590 NR Description: Phosphate Permease [Chlamydophila pneumoniae
  misc_feature (274)..(433): Homolog of NCBI NO: 15642438 NR Description: pho4 family protein [Vibrio cholerae]
  misc_feature (6)..(195): Homolog of NCBI NO: 15642438 NR Description: pho4 family protein [Vibrio cholerae]
  misc_feature (1)..(445): Homolog of NCBI NO: 22450125 NR Description: phosphate hydrogen transporter [Spinacia oleracea]
  misc_feature (1)..(445): Homolog of NCBI NO: 24079961 NR Description: phosphate transporter PHT2-1 [Medicago truncatula]
  misc_feature (1)..(445): Homolog of NCBI NO: 7522208 NR Description: probable phosphate permease - common ice plant
  misc_feature (1)..(445): Homolog of NCBI NO: 30688383 NR Description: phosphate transporter -related [Arabidopsis
  misc_feature (1)..(445): Homolog of NCBI NO: 30688378 NR Description: phosphate transporter -related [Arabidopsis
MKSLGQGLALKTKLLSYATLLFGFYMAWNIGANDVANAMGTSVGSGALTIRQAVMTAAVLEFSGALLMGTHVTSTMQKGILMANVFQGKDMLLFAGLLSSLAAAGTWLQVASYYGWPVSTTHCIVGSMVGFGLVYGGAGAVFWSSLAKVASSWVISPILGALVSFLVYKCIRRFVYSAPNPGQAAAAAAPVAVFVGVASISSAALPLSKIFPIALSQALACGVAGAIVFDRIIRKQLGHLLAKTKSPETSQNQPKTIGFLSDIAGPTGTQLEIVYGIFGYMQVLSACFMSFAHGGNDVSNAIGPLAAALSILQNGAAAGGAEIVIPMDVLAWGGFGIVAGLTMWGYRVIATIGKKITELTPTRGFAAEFAAASVVLFASKLGLPISATHTLVGAVMGVGFARGLNSVRAETVREIVASWLVTIPVGATLAVIYTWIFTKILSFVL

SEQ ID NO: 43891 - DNA, 2093 bp, Arabidopsis thaliana
  misc_feature (1)..(2093): Ceres Seq. ID no. 12639093
  misc_feature: MA Experiment ID: 20000234 Result: Down-regulated in Transcription
  misc_feature: MA Experiment 20000234 PARAMETER Experiment Name: At_Siliques_P Parameter: Age (day) Value: 21
  misc_feature: MA Experiment 20000234 PARAMETER Experiment Name: At_Siliques_P Parameter: Organism Value: A. thaliana
  misc_feature: MA Experiment 20000234 PARAMETER Experiment Name: At_Siliques_P Parameter: Plant Line Value: WS
  misc_feature: MA Experiment 20000234 PARAMETER Experiment Name: At_Siliques_P Parameter: Tissue Value: Less Than 5mm Siliques vs. Whole Plant
  misc_feature: MA Experiment ID: 20000264 Result: Down-regulated in Transcription
  misc_feature: MA Experiment 20000264 PARAMETER Experiment Name: At_Open_Flower_P Parameter: Age (day) Value: 21
  misc_feature: MA Experiment 20000264 PARAMETER Experiment Name: At_Open_Flower_P Parameter: Plant Line Value: WS
  misc_feature: MA Experiment 20000264 PARAMETER Experiment Name: At_Open_Flower_P Parameter: Tissue Value: Open Flower vs. Whole Plant
  misc_feature: MA Experiment ID: 20000439 Result: Down-regulated in Transcription
  misc_feature: MA Experiment 20000439 PARAMETER Experiment Name: At_Roots__P Parameter: Age (day) Value: 14 vs. 21
  misc_feature: MA Experiment 20000439 PARAMETER Experiment Name: At_Roots__P Parameter: Organism Value: A. thaliana
  misc_feature: MA Experiment 20000439 PARAMETER Experiment Name: At_Roots__P Parameter: Tissue Value: Roots vs. Whole Plant
  misc_feature: MA Experiment ID: 20000495 Result: Down-regulated in Transcription
  misc_feature: MA Experiment 20000495 PARAMETER Experiment Name: At_Guard_Cells_P Parameter: Harvest Date Value: 8/2/2002
  misc_feature: MA Experiment 20000495 PARAMETER Experiment Name: At_Guard_Cells_P Parameter: Organism Value: A. thaliana
  misc_feature: MA Experiment 20000495 PARAMETER Experiment Name: At_Guard_Cells_P Parameter: Tissue Value: Guard Cells vs. Leaves
gaattacacacacacaactttattatctgtacacgtatatgtgtgtgtgtatatatatacatactcatccacaaaaactcgactgattgatttctccatgaacaacgtcctcctttgatttcacctttttttgttgtcttcttctttcgaaatcaatcatgagattcagatctctcatctctctcctcttccttctcttcttcacttcatctgcttacgctcgattcgtctccctaaacccatcttcaacgagtctaatctccgatggaatcgacggtggttcaaatctcgccggttccggatcggttatcaagtcggttgtttcggctccggctgaggaaaaggaggaagcttgtgagcagacatacgggtttatgccgtgtactaagaccgctcttggaaacgtgtttctgattttggtttatggatttctcatgtttacggctgcgacgtatctctctgctggaagtgagcttcttcttgagatccttggacctggaattgtcggtggtttgtttcttccgatgcttggtgctcttcctgacgctatgcttatcatggtgtctggactatctggagatgcagcaactgctcaaagccaagtctctgtgggaatgggtttgcttgctggttccactgttatgcttctcactgttatctggggaacttgtactgtggttggcaagtgtgatcttcgtgattcaattgctgtaaacaaccaagacaccaaaggctttcacctaaaagattctggtgtaactgttgatatttggaccagctatgctgcaagaataatggctatatcagttattccgttcgtcattgtccagcttccgcagatgttgggctcaacctctggaagacaattgtccgtgttgattgctctaatcctttcagttcttatgttgatctcttactgtgtatatcaggtattccaaccatggatccaaaggagacggcttgcttttgcaaaacacaagcatgttatatcaggaatactaaggcacttgaaacaacatgctctgggaaggcttcttgatgatgaaggtcagcctgatgaacatgtcattcgaaagttgtttttgacaattgatgcaaacaatgacggacacttgtcagcggctgaactaaaggcgcttatcattgggatcagctttgaggatatagattttgacaaggatgatgctgtgggaaaagttctccaagattttgataagactcttgatgagcaagttgatcaagaagagtttgtccgtggaattaagcaatggcttatccaggcaatgggaggtgctccatctggtcctgaagctggccctcgaacaatgaaattccttgacaatttccatgtgcaaacaaagagagagcatgctttgttgggagataacgagaatggtgagaatgatgaggaaggcggtgaggttgcagacccaaaatggatcaccattaaagcagctctgctgctactgttaggagctgccattgcagctgcatttgctgatcctttagtcgacactgttaacaacttctccgcagccacagggattccgtctttcttcatttccttcatcgctttgcctttggccaccaattcaagtgaagccgtgtctgccatcatcttcgcatcccgcaaaaagatcagaaccgcctctttaactttctccgagctatgtggtggagtgacaatgaacaacattctgtgtctctcggtgttcttagcaatcgtctacgttcgaggactgacatggaacttctcatcagaagtgttggtgattctcatcgtttgtctggtgatgggcggtttcgcgagtttccgcacaacttatcctctttggacatgtttcatagcttacttgctttacccattctccttgggtctggtctatattcttgattactggtttggctggtcgtagatatcactctctgttcaaagagtttgttctaatgagtgagtgtcttcgcgcgtggtttcgtttcttctctacatatatatatatatatggattctcgagtgtaaaaacttaaattctgagatttgtgtattggaaacagagtcttattgaagctaatacagtaatatctttcttgtt

SEQ ID NO: 43892 - protein, 585 aa, Arabidopsis thaliana
  peptide (1)..(585): Ceres Seq. ID no. 12639094
  misc_feature (441)..(575): Pfam Name: Sodium/calcium exchanger protein Pfam Description: Sodium/calcium exchanger protein
  misc_feature (441)..(575): Pfam Name: Sodium/calcium exchanger protein Pfam Description: Sodium/calcium exchanger protein
  misc_feature (429)..(546): Homolog of NCBI NO: 15218787 NR Description: unknown protein; protein id: At1g29020.1
  misc_feature (3)..(374): Homolog of NCBI NO: 15218787 NR Description: unknown protein; protein id: At1g29020.1
  misc_feature (25)..(223): Homolog of NCBI NO: 15218787 NR Description: unknown protein; protein id: At1g29020.1
  misc_feature (232)..(576): Homolog of NCBI NO: 15218787 NR Description: unknown protein; protein id: At1g29020.1
  misc_feature (10)..(577): Homolog of NCBI NO: 26449859 NR Description: unknown protein [Arabidopsis thaliana]
  misc_feature (429)..(546): Homolog of NCBI NO: 15218787 NR Description: unknown protein; protein id: At1g29020.1
  misc_feature (25)..(223): Homolog of NCBI NO: 15218787 NR Description: unknown protein; protein id: At1g29020.1
  misc_feature (10)..(577): Homolog of NCBI NO: 26449859 NR Description: unknown protein [Arabidopsis thaliana]
  misc_feature (1)..(585): Homolog of NCBI NO: 30695448 NR Description: expressed protein [Arabidopsis thaliana]
  misc_feature (1)..(585): Homolog of NCBI NO: 25405975 NR Description: protein F12M16.12 [imported] - Arabidopsis
  misc_feature (93)..(585): Homolog of NCBI NO: 13605639 NR Description: At1g53210/F12M16_12 [Arabidopsis thaliana]
  misc_feature (141)..(585): Homolog of NCBI NO: 34903912 NR Description: unnamed protein product [Oryza sativa (japonica
  misc_feature (9)..(134): Homolog of NCBI NO: 34903912 NR Description: unnamed protein product [Oryza sativa (japonica
  misc_feature (232)..(576): Homolog of NCBI NO: 15218787 NR Description: unknown protein; protein id: At1g29020.1
  misc_feature (3)..(374): Homolog of NCBI NO: 15218787 NR Description: unknown protein; protein id: At1g29020.1
  misc_feature (9)..(134): Homolog of NCBI NO: 34903912 NR Description: unnamed protein product [Oryza sativa (japonica
  misc_feature (141)..(585): Homolog of NCBI NO: 34903912 NR Description: unnamed protein product [Oryza sativa (japonica
  misc_feature (93)..(585): Homolog of NCBI NO: 13605639 NR Description: At1g53210/F12M16_12 [Arabidopsis thaliana]
  misc_feature (1)..(585): Homolog of NCBI NO: 25405975 NR Description: protein F12M16.12 [imported] - Arabidopsis
  misc_feature (1)..(585): Homolog of NCBI NO: 30695448 NR Description: expressed protein [Arabidopsis thaliana]
MRFRSLISLLFLLFFTSSAYARFVSLNPSSTSLISDGIDGGSNLAGSGSVIKSVVSAPAEEKEEACEQTYGFMPCTKTALGNVFLILVYGFLMFTAATYLSAGSELLLEILGPGIVGGLFLPMLGALPDAMLIMVSGLSGDAATAQSQVSVGMGLLAGSTVMLLTVIWGTCTVVGKCDLRDSIAVNNQDTKGFHLKDSGVTVDIWTSYAARIMAISVIPFVIVQLPQMLGSTSGRQLSVLIALILSVLMLISYCVYQVFQPWIQRRRLAFAKHKHVISGILRHLKQHALGRLLDDEGQPDEHVIRKLFLTIDANNDGHLSAAELKALIIGISFEDIDFDKDDAVGKVLQDFDKTLDEQVDQEEFVRGIKQWLIQAMGGAPSGPEAGPRTMKFLDNFHVQTKREHALLGDNENGENDEEGGEVADPKWITIKAALLLLLGAAIAAAFADPLVDTVNNFSAATGIPSFFISFIALPLATNSSEAVSAIIFASRKKIRTASLTFSELCGGVTMNNILCLSVFLAIVYVRGLTWNFSSEVLVILIVCLVMGGFASFRTTYPLWTCFIAYLLYPFSLGLVYILDYWFGWS

SEQ ID NO: 43893 - protein, 513 aa, Arabidopsis thaliana
  peptide (1)..(513): Ceres Seq. ID no. 12639095
  misc_feature (369)..(503): Pfam Name: Sodium/calcium exchanger protein Pfam Description: Sodium/calcium exchanger protein
  misc_feature (369)..(503): Pfam Name: Sodium/calcium exchanger protein Pfam Description: Sodium/calcium exchanger protein
  misc_feature (357)..(474): Homolog of NCBI NO: 15218787 NR Description: unknown protein; protein id: At1g29020.1
  misc_feature (1)..(302): Homolog of NCBI NO: 15218787 NR Description: unknown protein; protein id: At1g29020.1
  misc_feature (1)..(151): Homolog of NCBI NO: 15218787 NR Description: unknown protein; protein id: At1g29020.1
  misc_feature (160)..(504): Homolog of NCBI NO: 15218787 NR Description: unknown protein; protein id: At1g29020.1
  misc_feature (1)..(505): Homolog of NCBI NO: 26449859 NR Description: unknown protein [Arabidopsis thaliana]
  misc_feature (357)..(474): Homolog of NCBI NO: 15218787 NR Description: unknown protein; protein id: At1g29020.1
  misc_feature (1)..(151): Homolog of NCBI NO: 15218787 NR Description: unknown protein; protein id: At1g29020.1
  misc_feature (1)..(505): Homolog of NCBI NO: 26449859 NR Description: unknown protein [Arabidopsis thaliana]
  misc_feature (1)..(513): Homolog of NCBI NO: 30695448 NR Description: expressed protein [Arabidopsis thaliana]
  misc_feature (1)..(513): Homolog of NCBI NO: 25405975 NR Description: protein F12M16.12 [imported] - Arabidopsis
  misc_feature (21)..(513): Homolog of NCBI NO: 13605639 NR Description: At1g53210/F12M16_12 [Arabidopsis thaliana]
  misc_feature (69)..(513): Homolog of NCBI NO: 34903912 NR Description: unnamed protein product [Oryza sativa (japonica
  misc_feature (1)..(62): Homolog of NCBI NO: 34903912 NR Description: unnamed protein product [Oryza sativa (japonica
  misc_feature (160)..(504): Homolog of NCBI NO: 15218787 NR Description: unknown protein; protein id: At1g29020.1
  misc_feature (1)..(302): Homolog of NCBI NO: 15218787 NR Description: unknown protein; protein id: At1g29020.1
  misc_feature (1)..(62): Homolog of NCBI NO: 34903912 NR Description: unnamed protein product [Oryza sativa (japonica
  misc_feature (69)..(513): Homolog of NCBI NO: 34903912 NR Description: unnamed protein product [Oryza sativa (japonica
  misc_feature (21)..(513): Homolog of NCBI NO: 13605639 NR Description: At1g53210/F12M16_12 [Arabidopsis thaliana]
  misc_feature (1)..(513): Homolog of NCBI NO: 25405975 NR Description: protein F12M16.12 [imported] - Arabidopsis
  misc_feature (1)..(513): Homolog of NCBI NO: 30695448 NR Description: expressed protein [Arabidopsis thaliana]
MPCTKTALGNVFLILVYGFLMFTAATYLSAGSELLLEILGPGIVGGLFLPMLGALPDAMLIMVSGLSGDAATAQSQVSVGMGLLAGSTVMLLTVIWGTCTVVGKCDLRDSIAVNNQDTKGFHLKDSGVTVDIWTSYAARIMAISVIPFVIVQLPQMLGSTSGRQLSVLIALILSVLMLISYCVYQVFQPWIQRRRLAFAKHKHVISGILRHLKQHALGRLLDDEGQPDEHVIRKLFLTIDANNDGHLSAAELKALIIGISFEDIDFDKDDAVGKVLQDFDKTLDEQVDQEEFVRGIKQWLIQAMGGAPSGPEAGPRTMKFLDNFHVQTKREHALLGDNENGENDEEGGEVADPKWITIKAALLLLLGAAIAAAFADPLVDTVNNFSAATGIPSFFISFIALPLATNSSEAVSAIIFASRKKIRTASLTFSELCGGVTMNNILCLSVFLAIVYVRGLTWNFSSEVLVILIVCLVMGGFASFRTTYPLWTCFIAYLLYPFSLGLVYILDYWFGWS

SEQ ID NO: 43894 - protein, 493 aa, Arabidopsis thaliana
  peptide (1)..(493): Ceres Seq. ID no. 12639096
  misc_feature (349)..(483): Pfam Name: Sodium/calcium exchanger protein Pfam Description: Sodium/calcium exchanger protein
  misc_feature (349)..(483): Pfam Name: Sodium/calcium exchanger protein Pfam Description: Sodium/calcium exchanger protein
  misc_feature (337)..(454): Homolog of NCBI NO: 15218787 NR Description: unknown protein; protein id: At1g29020.1
  misc_feature (1)..(282): Homolog of NCBI NO: 15218787 NR Description: unknown protein; protein id: At1g29020.1
  misc_feature (1)..(131): Homolog of NCBI NO: 15218787 NR Description: unknown protein; protein id: At1g29020.1
  misc_feature (140)..(484): Homolog of NCBI NO: 15218787 NR Description: unknown protein; protein id: At1g29020.1
  misc_feature (1)..(485): Homolog of NCBI NO: 26449859 NR Description: unknown protein [Arabidopsis thaliana]
  misc_feature (337)..(454): Homolog of NCBI NO: 15218787 NR Description: unknown protein; protein id: At1g29020.1
  misc_feature (1)..(131): Homolog of NCBI NO: 15218787 NR Description: unknown protein; protein id: At1g29020.1
  misc_feature (1)..(485): Homolog of NCBI NO: 26449859 NR Description: unknown protein [Arabidopsis thaliana]
  misc_feature (1)..(493): Homolog of NCBI NO: 30695448 NR Description: expressed protein [Arabidopsis thaliana]
  misc_feature (1)..(493): Homolog of NCBI NO: 25405975 NR Description: protein F12M16.12 [imported] - Arabidopsis
  misc_feature (1)..(493): Homolog of NCBI NO: 13605639 NR Description: At1g53210/F12M16_12 [Arabidopsis thaliana]
  misc_feature (49)..(493): Homolog of NCBI NO: 34903912 NR Description: unnamed protein product [Oryza sativa (japonica
  misc_feature (1)..(42): Homolog of NCBI NO: 34903912 NR Description: unnamed protein product [Oryza sativa (japonica
  misc_feature (140)..(484): Homolog of NCBI NO: 15218787 NR Description: unknown protein; protein id: At1g29020.1
  misc_feature (1)..(282): Homolog of NCBI NO: 15218787 NR Description: unknown protein; protein id: At1g29020.1
  misc_feature (1)..(42): Homolog of NCBI NO: 34903912 NR Description: unnamed protein product [Oryza sativa (japonica
  misc_feature (49)..(493): Homolog of NCBI NO: 34903912 NR Description: unnamed protein product [Oryza sativa (japonica
  misc_feature (1)..(493): Homolog of NCBI NO: 13605639 NR Description: At1g53210/F12M16_12 [Arabidopsis thaliana]
  misc_feature (1)..(493): Homolog of NCBI NO: 25405975 NR Description: protein F12M16.12 [imported] - Arabidopsis
  misc_feature (1)..(493): Homolog of NCBI NO: 30695448 NR Description: expressed protein [Arabidopsis thaliana]
MFTAATYLSAGSELLLEILGPGIVGGLFLPMLGALPDAMLIMVSGLSGDAATAQSQVSVGMGLLAGSTVMLLTVIWGTCTVVGKCDLRDSIAVNNQDTKGFHLKDSGVTVDIWTSYAARIMAISVIPFVIVQLPQMLGSTSGRQLSVLIALILSVLMLISYCVYQVFQPWIQRRRLAFAKHKHVISGILRHLKQHALGRLLDDEGQPDEHVIRKLFLTIDANNDGHLSAAELKALIIGISFEDIDFDKDDAVGKVLQDFDKTLDEQVDQEEFVRGIKQWLIQAMGGAPSGPEAGPRTMKFLDNFHVQTKREHALLGDNENGENDEEGGEVADPKWITIKAALLLLLGAAIAAAFADPLVDTVNNFSAATGIPSFFISFIALPLATNSSEAVSAIIFASRKKIRTASLTFSELCGGVTMNNILCLSVFLAIVYVRGLTWNFSSEVLVILIVCLVMGGFASFRTTYPLWTCFIAYLLYPFSLGLVYILDYWFGWS

SEQ ID NO: 43895 - DNA, 2709 bp, Arabidopsis thaliana
  misc_feature (1)..(2709): Ceres Seq. ID no. 12559100
  misc_feature: MA Experiment ID: 20000314 Result: Down-regulated in Transcription
  misc_feature: MA Experiment 20000314 PARAMETER Experiment Name: At_14day_Shoots-Roots_Sub_P Parameter: Age (day) Value: 14
  misc_feature: MA Experiment 20000314 PARAMETER Experiment Name: At_14day_Shoots-Roots_Sub_P Parameter: Organism Value: A. thaliana
  misc_feature: MA Experiment 20000314 PARAMETER Experiment Name: At_14day_Shoots-Roots_Sub_P Parameter: Plant Line Value: WS
  misc_feature: MA Experiment 20000314 PARAMETER Experiment Name: At_14day_Shoots-Roots_Sub_P Parameter: Tissue Value: Roots vs. Whole Plant
  misc_feature: MA Experiment ID: 20000315 Result: Down-regulated in Transcription
  misc_feature: MA Experiment 20000315 PARAMETER Experiment Name: At_14day_Shoots-Roots_Sub_P Parameter: Age (day) Value: 14
  misc_feature: MA Experiment 20000315 PARAMETER Experiment Name: At_14day_Shoots-Roots_Sub_P Parameter: Organism Value: A. thaliana
  misc_feature: MA Experiment 20000315 PARAMETER Experiment Name: At_14day_Shoots-Roots_Sub_P Parameter: Plant Line Value: WS
  misc_feature: MA Experiment 20000315 PARAMETER Experiment Name: At_14day_Shoots-Roots_Sub_P Parameter: Tissue Value: Shoots vs. Whole Plant
  misc_feature: MA Experiment ID: 20000348 Result: Down-regulated in Transcription
  misc_feature: MA Experiment 20000348 PARAMETER Experiment Name: At_100uM_ABA_Sub_P Parameter: Age (day) Value: 14
  misc_feature: MA Experiment 20000348 PARAMETER Experiment Name: At_100uM_ABA_Sub_P Parameter: Organism Value: A. thaliana
  misc_feature: MA Experiment 20000348 PARAMETER Experiment Name: At_100uM_ABA_Sub_P Parameter: Plant Line Value: WS
  misc_feature: MA Experiment 20000348 PARAMETER Experiment Name: At_100uM_ABA_Sub_P Parameter: Timepoint (hr) Value: 1
  misc_feature: MA Experiment 20000348 PARAMETER Experiment Name: At_100uM_ABA_Sub_P Parameter: Tissue Value: Aerial
  misc_feature: MA Experiment 20000348 PARAMETER Experiment Name: At_100uM_ABA_Sub_P Parameter: Treatment Value: 100uM ABA vs. No Treatment
aggctaaaaacgttatcgtaatctttaatcttcaggcttcttttctaaaattccgactggttaccgagggctagaaaatccggtcaccgtcgccggagacaacctcggtttctaaacgaaaccatcgtgaaggacggaaaaaaggagcttgaagacaaaacaatgacgagcgttttcgacgaacataaaccctccgatgactctcacgagtccaagatcgtcatcaatggagaagaagaggtgttggaggaggagaatgataatccgattgaagaagtccggttaacggtaccgataaccgacgatccaacactaccggtgctaacgtttcgaacatggactcttggacttttctcttgcatattgcttgccttcgtgaaccagttctttggtttccggtcgaaccagctttgggtatcttcagttgcggcacagatcgtgacccttccgctagggaaactcatggcaaagacgctaccgacaaagaaatttgggtttcccgggacgaattggtcgtggtcttttaaccctggtccgttcaatatgaaggaacatgttcttattacaatatttgctaacaccggagctggtggagtttacgccaccagtattattaccattgttaaagcgttttataatcgtcaacttaatgtcgccgccgccatgttgctcactcaaaccactcagttgttgggatatggatgggctggaatcttcaggaagttccttgtggattcaccgtatatgtggtggccgtcaaatttggttcaagtctcactctttagagctttacatgagaaggaggatctacaaaaagggcaacaaacaaggtttagattcttcatcattgtcttctgtgtgagctttgcttactacataatccccggctaccttttcccttccatttccgcaatttcatttgtttgctggatttggaaaagctcagtgaccgctcagattgtcggttctgggctcaagggtttaggtattggttcgttcggtcttgactggtccacagttgctggtttcttaggcagtccgttggctgtaccattcttcgccattgccaatttctttggaggattcttcatctttttatacattgttctacctatcttctactggactaatgcttatgatgctcagaagtttccgttctatacttcacacacctttgatcagactggacacacctataacattacccgtatcctcaatgagaagaatttcgatatcaatctagacgcttacaacggttacagcaagctctatttgagtgtgatgttcgcgttgctctatggactcagctttggttctctttgcgctaccatctctcatgttgccctctatgatggaaagtttatatggggaatgtggaagaaggcaaagacagcaacaaaggacaagtacggtgacgtgcattcgagattgatgaagaagaattatcaatcagtacctcaatggtggttcatcgcagttctagttatttcctttgctttcgcactctatgcttgcgagggctttgacaaacagcttcagctcccatggtggggacttatactcgcttgcgccatcgctttgttcttcacattacctatcggagttatccaagcaactactaaccagcaaatgggtcttaacgttataacagaactgatcatcgggtacttatacccaggaaagccactagccaatgtcgctttcaagacatacggatacatcagtatgtctcaagccttgtactttgtaggagacttcaagcttggtcactacatgaagattcctccaagatcaatgttcatcgtccagcttgttgcaactgtggttgcatcaactgtctgcttcggaacaacctggtggctcattacatccgtcgagaacatatgtaatgtcgatttgctcccggtgggtagtccatggacttgtcctggagatgaagtgttctacaatgcatcaatcatatggggagtgattggtccagggagaatgtttaccaaagaaggtatctatcccgggatgaactggttcttccttatcggtctcctcgctccagttcccttctggtacctatcgaagaagttcccagagaagaaatggctaaaacagatccatgttcccttgatcttctctgcagtaagcgccatgccacaagctaaggctgtgcattactggtcctgggccatcgttggggttgtgttcaactactacatcttcaggaggttcaaaacttggtgggcgaggcacaattacatcctctctgcggcgcttgatgcaggtactgcgattatgggagtgttgatattcttcgcattccagaacaatgatataagcttacctgattggtgggggcttgagaattcagaccattgccctctagcgcattgccctctagccaaaggtgttgttgttgaaggttgtcccgtgttttaagaattgaagtagatgcaacgttgtcctgaaaggggtaactgttgatggcttcggtaaccttatatctgtgtaaaaccctccaagttaagggactcaaacaatgtaaagcactagatttggtttcatgttcttcagtatttaactattccctttgtaagtataagaacagtagccaaataaagtagagctttcttcattccaactatataatcaaaatgtaacaagctccaaaagatatcattcaaatgatataactaaggtttaagatgtgtaccaatt

SEQ ID NO: 43896 - protein, 755 aa, Arabidopsis thaliana
  peptide (1)..(755): Ceres Seq. ID no. 12559101
  misc_feature (418)..(751): Homolog of NCBI NO: 32411453 NR Description: hypothetical protein [Neurospora crassa]
  misc_feature (1)..(729): Homolog of NCBI NO: 18076958 NR Description: Opt1 protein [Yarrowia lipolytica]
  misc_feature (1)..(729): Homolog of NCBI NO: 19115899 NR Description: putative pheromone response and mating-type
  misc_feature (91)..(755): Homolog of NCBI NO: 30722286 NR Description: glutathione transporter GT1 [Brassica juncea]
  misc_feature (30)..(754): Homolog of NCBI NO: 21592665 NR Description: Isp4-like protein [Arabidopsis thaliana]
  misc_feature (30)..(754): Homolog of NCBI NO: 15237689 NR Description: Isp4-like protein
  misc_feature (7)..(754): Homolog of NCBI NO: 25553564 NR Description: putative isp4 protein [Oryza sativa (japonica
  misc_feature (1)..(755): Homolog of NCBI NO: 15236912 NR Description: putative oligopeptide transporter
  misc_feature (29)..(755): Homolog of NCBI NO: 15218331 NR Description: unknown protein; protein id: At1g09930.1
  misc_feature (23)..(755): Homolog of NCBI NO: 34898010 NR Description: EST D25093(R3139) corresponds to a region of the
MTSVFDEHKPSDDSHESKIVINGEEEVLEEENDNPIEEVRLTVPITDDPTLPVLTFRTWTLGLFSCILLAFVNQFFGFRSNQLWVSSVAAQIVTLPLGKLMAKTLPTKKFGFPGTNWSWSFNPGPFNMKEHVLITIFANTGAGGVYATSIITIVKAFYNRQLNVAAAMLLTQTTQLLGYGWAGIFRKFLVDSPYMWWPSNLVQVSLFRALHEKEDLQKGQQTRFRFFIIVFCVSFAYYIIPGYLFPSISAISFVCWIWKSSVTAQIVGSGLKGLGIGSFGLDWSTVAGFLGSPLAVPFFAIANFFGGFFIFLYIVLPIFYWTNAYDAQKFPFYTSHTFDQTGHTYNITRILNEKNFDINLDAYNGYSKLYLSVMFALLYGLSFGSLCATISHVALYDGKFIWGMWKKAKTATKDKYGDVHSRLMKKNYQSVPQWWFIAVLVISFAFALYACEGFDKQLQLPWWGLILACAIALFFTLPIGVIQATTNQQMGLNVITELIIGYLYPGKPLANVAFKTYGYISMSQALYFVGDFKLGHYMKIPPRSMFIVQLVATVVASTVCFGTTWWLITSVENICNVDLLPVGSPWTCPGDEVFYNASIIWGVIGPGRMFTKEGIYPGMNWFFLIGLLAPVPFWYLSKKFPEKKWLKQIHVPLIFSAVSAMPQAKAVHYWSWAIVGVVFNYYIFRRFKTWWARHNYILSAALDAGTAIMGVLIFFAFQNNDISLPDWWGLENSDHCPLAHCPLAKGVVVEGCPVF

SEQ ID NO: 43897 - protein, 655 aa, Arabidopsis thaliana
  peptide (1)..(655): Ceres Seq. ID no. 12559102
  misc_feature (318)..(651): Homolog of NCBI NO: 32411453 NR Description: hypothetical protein [Neurospora crassa]
  misc_feature (1)..(629): Homolog of NCBI NO: 18076958 NR Description: Opt1 protein [Yarrowia lipolytica]
  misc_feature (1)..(629): Homolog of NCBI NO: 19115899 NR Description: putative pheromone response and mating-type
  misc_feature (1)..(655): Homolog of NCBI NO: 30722286 NR Description: glutathione transporter GT1 [Brassica juncea]
  misc_feature (1)..(654): Homolog of NCBI NO: 21592665 NR Description: Isp4-like protein [Arabidopsis thaliana]
  misc_feature (1)..(654): Homolog of NCBI NO: 15237689 NR Description: Isp4-like protein
  misc_feature (1)..(654): Homolog of NCBI NO: 25553564 NR Description: putative isp4 protein [Oryza sativa (japonica
  misc_feature (1)..(655): Homolog of NCBI NO: 15236912 NR Description: putative oligopeptide transporter
  misc_feature (1)..(655): Homolog of NCBI NO: 15218331 NR Description: unknown protein; protein id: At1g09930.1
  misc_feature (1)..(655): Homolog of NCBI NO: 34898010 NR Description: EST D25093(R3139) corresponds to a region of the
MAKTLPTKKFGFPGTNWSWSFNPGPFNMKEHVLITIFANTGAGGVYATSIITIVKAFYNRQLNVAAAMLLTQTTQLLGYGWAGIFRKFLVDSPYMWWPSNLVQVSLFRALHEKEDLQKGQQTRFRFFIIVFCVSFAYYIIPGYLFPSISAISFVCWIWKSSVTAQIVGSGLKGLGIGSFGLDWSTVAGFLGSPLAVPFFAIANFFGGFFIFLYIVLPIFYWTNAYDAQKFPFYTSHTFDQTGHTYNITRILNEKNFDINLDAYNGYSKLYLSVMFALLYGLSFGSLCATISHVALYDGKFIWGMWKKAKTATKDKYGDVHSRLMKKNYQSVPQWWFIAVLVISFAFALYACEGFDKQLQLPWWGLILACAIALFFTLPIGVIQATTNQQMGLNVITELIIGYLYPGKPLANVAFKTYGYISMSQALYFVGDFKLGHYMKIPPRSMFIVQLVATVVASTVCFGTTWWLITSVENICNVDLLPVGSPWTCPGDEVFYNASIIWGVIGPGRMFTKEGIYPGMNWFFLIGLLAPVPFWYLSKKFPEKKWLKQIHVPLIFSAVSAMPQAKAVHYWSWAIVGVVFNYYIFRRFKTWWARHNYILSAALDAGTAIMGVLIFFAFQNNDISLPDWWGLENSDHCPLAHCPLAKGVVVEGCPVF

SEQ ID NO: 43898 - protein, 628 aa, Arabidopsis thaliana
  peptide (1)..(628): Ceres Seq. ID no. 12559103
  misc_feature (291)..(624): Homolog of NCBI NO: 32411453 NR Description: hypothetical protein [Neurospora crassa]
  misc_feature (1)..(602): Homolog of NCBI NO: 18076958 NR Description: Opt1 protein [Yarrowia lipolytica]
  misc_feature (1)..(602): Homolog of NCBI NO: 19115899 NR Description: putative pheromone response and mating-type
  misc_feature (1)..(628): Homolog of NCBI NO: 30722286 NR Description: glutathione transporter GT1 [Brassica juncea]
  misc_feature (1)..(627): Homolog of NCBI NO: 21592665 NR Description: Isp4-like protein [Arabidopsis thaliana]
  misc_feature (1)..(627): Homolog of NCBI NO: 15237689 NR Description: Isp4-like protein
  misc_feature (1)..(627): Homolog of NCBI NO: 25553564 NR Description: putative isp4 protein [Oryza sativa (japonica
  misc_feature (1)..(628): Homolog of NCBI NO: 15236912 NR Description: putative oligopeptide transporter
  misc_feature (1)..(628): Homolog of NCBI NO: 15218331 NR Description: unknown protein; protein id: At1g09930.1
  misc_feature (1)..(628): Homolog of NCBI NO: 34898010 NR Description: EST D25093(R3139) corresponds to a region of the
MKEHVLITIFANTGAGGVYATSIITIVKAFYNRQLNVAAAMLLTQTTQLLGYGWAGIFRKFLVDSPYMWWPSNLVQVSLFRALHEKEDLQKGQQTRFRFFIIVFCVSFAYYIIPGYLFPSISAISFVCWIWKSSVTAQIVGSGLKGLGIGSFGLDWSTVAGFLGSPLAVPFFAIANFFGGFFIFLYIVLPIFYWTNAYDAQKFPFYTSHTFDQTGHTYNITRILNEKNFDINLDAYNGYSKLYLSVMFALLYGLSFGSLCATISHVALYDGKFIWGMWKKAKTATKDKYGDVHSRLMKKNYQSVPQWWFIAVLVISFAFALYACEGFDKQLQLPWWGLILACAIALFFTLPIGVIQATTNQQMGLNVITELIIGYLYPGKPLANVAFKTYGYISMSQALYFVGDFKLGHYMKIPPRSMFIVQLVATVVASTVCFGTTWWLITSVENICNVDLLPVGSPWTCPGDEVFYNASIIWGVIGPGRMFTKEGIYPGMNWFFLIGLLAPVPFWYLSKKFPEKKWLKQIHVPLIFSAVSAMPQAKAVHYWSWAIVGVVFNYYIFRRFKTWWARHNYILSAALDAGTAIMGVLIFFAFQNNDISLPDWWGLENSDHCPLAHCPLAKGVVVEGCPVF

SEQ ID NO: 43899 - DNA, 1813 bp, Arabidopsis thaliana
  misc_feature (1)..(1813): Ceres Seq. ID no. 12559124
  misc_feature: MA Experiment ID: 20000307 Result: Up-regulated in Transcription
  misc_feature: MA Experiment 20000307 PARAMETER Experiment Name: At_Germinating_Seeds_Sub_P Parameter: Age (hr) Value: 24 vs. 0
  misc_feature: MA Experiment 20000307 PARAMETER Experiment Name: At_Germinating_Seeds_Sub_P Parameter: Organism Value: A. thaliana
  misc_feature: MA Experiment 20000307 PARAMETER Experiment Name: At_Germinating_Seeds_Sub_P Parameter: Plant Line Value: WS
  misc_feature: MA Experiment 20000307 PARAMETER Experiment Name: At_Germinating_Seeds_Sub_P Parameter: Tissue Value: Germinating Seeds
  misc_feature: MA Experiment ID: 20000315 Result: Down-regulated in Transcription
  misc_feature: MA Experiment 20000315 PARAMETER Experiment Name: At_14day_Shoots-Roots_Sub_P Parameter: Age (day) Value: 14
  misc_feature: MA Experiment 20000315 PARAMETER Experiment Name: At_14day_Shoots-Roots_Sub_P Parameter: Organism Value: A. thaliana
  misc_feature: MA Experiment 20000315 PARAMETER Experiment Name: At_14day_Shoots-Roots_Sub_P Parameter: Plant Line Value: WS
  misc_feature: MA Experiment 20000315 PARAMETER Experiment Name: At_14day_Shoots-Roots_Sub_P Parameter: Tissue Value: Shoots vs. Whole Plant
  misc_feature: MA Experiment ID: 20000327 Result: Down-regulated in Transcription
  misc_feature: MA Experiment 20000327 PARAMETER Experiment Name: At_42deg_Heat_Sub_P Parameter: Age (day) Value: 14
  misc_feature: MA Experiment 20000327 PARAMETER Experiment Name: At_42deg_Heat_Sub_P Parameter: Organism Value: A. thaliana
  misc_feature: MA Experiment 20000327 PARAMETER Experiment Name: At_42deg_Heat_Sub_P Parameter: Plant Line Value: WS
  misc_feature: MA Experiment 20000327 PARAMETER Experiment Name: At_42deg_Heat_Sub_P Parameter: Temperature (deg C) Value: 42 vs. 22
  misc_feature: MA Experiment 20000327 PARAMETER Experiment Name: At_42deg_Heat_Sub_P Parameter: Timepoint (hr) Value: 1
  misc_feature: MA Experiment 20000327 PARAMETER Experiment Name: At_42deg_Heat_Sub_P Parameter: Tissue Value: Aerial
  misc_feature: MA Experiment ID: 20000328 Result: Down-regulated in Transcription
  misc_feature: MA Experiment 20000328 PARAMETER Experiment Name: At_42deg_Heat_Sub_P Parameter: Age (day) Value: 14
  misc_feature: MA Experiment 20000328 PARAMETER Experiment Name: At_42deg_Heat_Sub_P Parameter: Organism Value: A. thaliana
  misc_feature: MA Experiment 20000328 PARAMETER Experiment Name: At_42deg_Heat_Sub_P Parameter: Plant Line Value: WS
  misc_feature: MA Experiment 20000328 PARAMETER Experiment Name: At_42deg_Heat_Sub_P Parameter: Temperature (deg C) Value: 42 vs. 22
  misc_feature: MA Experiment 20000328 PARAMETER Experiment Name: At_42deg_Heat_Sub_P Parameter: Timepoint (hr) Value: 6
  misc_feature: MA Experiment 20000328 PARAMETER Experiment Name: At_42deg_Heat_Sub_P Parameter: Tissue Value: Aerial
  misc_feature: MA Experiment ID: 20000355 Result: Up-regulated in Transcription
  misc_feature: MA Experiment 20000355 PARAMETER Experiment Name: At_Siliques_Sub_P Parameter: Age (day) Value: 21
  misc_feature: MA Experiment 20000355 PARAMETER Experiment Name: At_Siliques_Sub_P Parameter: Organism Value: A. thaliana
  misc_feature: MA Experiment 20000355 PARAMETER Experiment Name: At_Siliques_Sub_P Parameter: Plant Line Value: WS
  misc_feature: MA Experiment 20000355 PARAMETER Experiment Name: At_Siliques_Sub_P Parameter: Tissue Value: Less Than 5mm Siliques vs. Whole Plant
  misc_feature: MA Experiment ID: 20000440 Result: Up-regulated in Transcription
  misc_feature: MA Experiment 20000440 PARAMETER Experiment Name: At_Closed-Flower__Sub_P Parameter: Tissue Value: Closed Flower vs. Whole Plant
atgggcaccaatcagactcagatctccgatgaatatgttaccggtaacagttccggtgtaggtgggggaatctctgatgtatacggtgaagatagtgccacgttggatcaacttgtcactccttgggttacctctgtcgcaagtgggtatacattgatgcgtgatccacgttacaataaaggacttgcttttactgataaagagagagatgctcattacataactggtcttcttcctcctgtagttttatctcaagatgttcaggagaggaaagtgatgcataatcttcgtcagtatacggttcctttgcaacgttacatggctctcatggatcttcaggaaaggaatgagagattgttttataagcttttgattgataatgtggaggagttgcttccggttgtgtatacaccgacggttggtgaggcttgccaaaagtatgggagcatttataggaggccacaaggtctttacatcagcttgaaagagaagggaaagattcttgaagtattgaagaattggccacagagagggattcaagttattgttgttaccgatggtgagcggattctcggtcttggagatcttggttgccagggaatgggaatccctgttgggaagctttctctttacacagctttgggaggaatccgtccatcggcttgccttccaataaccattgatgtgggtacaaacaatgagaagctgttgaataatgagttttacattggccttaaacagaagagggcaaatggcgaggaatatgcagagtttttgcaggagtttatgtgtgctgttaaacaaaactatggagagaaagtgttggtgcagtttgaagattttgcaaaccaccatgcgtttgagcttctctctaagtactgctcaagtcatctcgttttcaatgatgatatccaaggaactgcatctgtggtgcttgccgggcttattgcggctcagaaagtacttggtaaaagcctagctgaccatacctttttgttcttgggtgctggagaggctggaaccggaatcgctgagctaattgctcttaaaatttcgaaagagactggaaaaccaatcgatgagacccggaagaagatttggcttgtggactccaagggactgattgttagcgaacgcaaagaatcgcttcaacatttcaagcagccatgggcgcatgaccacaagcctgtcaaggagctcttggcagctgttaatgcaatcaagccaactgttcttattggaacctctggtgtgggtaagactttcacaaaggaagtagtggaggccatggctaccttgaacgagaaaccattgattcttgcactctcaaacccaacttctcaagccgagtgcacggcggaagaagcttacacatggaccaagggtcgtgcaatctttgcaagtggaagcccgtttgaccctgttcagtatgatggcaaaaaattcacgcctggccaggcaaacaactgttacattttccctggtctcggtcttggtttgatcatgtccggtgccattcgtgtccgtgatgacatgcttctagcagcttcggaagcgctggcctcccaagtgacggaagagaattttgcgaacggactgatctatccgccttttgcaaacatcagaaagatctctgctaacattgcagccagtgtgggagccaaaacctacgaactcggactggcatcgaatctgcctcgtcctaaggacctcgtaaagatggcagagagctgcatgtacagtcctgtctacagaaacttccgttaaaacattctttttaacattttgggctcagcttttactttttgctttt

SEQ ID NO: 43900 - protein, 588 aa, Arabidopsis thaliana
  peptide (1)..(588): Ceres Seq. ID no. 12559125
  misc_feature (304)..(557): Pfam Name: Malic enzyme, NAD binding domain Pfam Description: Malic enzyme, NAD binding domain
  misc_feature (16)..(588): Homolog of NCBI NO: 34910732 NR Description: P0022F10.12 [Oryza sativa (japonica
  misc_feature (20)..(588): Homolog of NCBI NO: 4239891 NR Description: NADP-malic enzyme [Aloe arborescens]
  misc_feature (18)..(588): Homolog of NCBI NO: 8118507 NR Description: NADP-dependent malic protein [Ricinus communis]
  misc_feature (18)..(588): Homolog of NCBI NO: 7431234 NR Description: malate dehydrogenase
  misc_feature (20)..(588): Homolog of NCBI NO: 1708924 NR Description: NADP-DEPENDENT MALIC ENZYME (NADP-ME)
  misc_feature (21)..(588): Homolog of NCBI NO: 115420 NR Description: NADP-DEPENDENT MALIC ENZYME (NADP-ME)
  misc_feature (21)..(588): Homolog of NCBI NO: 7427668 NR Description: malate dehydrogenase
  misc_feature (21)..(588): Homolog of NCBI NO: 510876 NR Description: NADP dependent malic enzyme [Phaseolus vulgaris]
  misc_feature (1)..(588): Homolog of NCBI NO: 15239146 NR Description: NADP dependent malic enzyme - like protein
  misc_feature (1)..(588): Homolog of NCBI NO: 15239517 NR Description: malate dehydrogenase - like protein; protein id:
MGTNQTQISDEYVTGNSSGVGGGISDVYGEDSATLDQLVTPWVTSVASGYTLMRDPRYNKGLAFTDKERDAHYITGLLPPVVLSQDVQERKVMHNLRQYTVPLQRYMALMDLQERNERLFYKLLIDNVEELLPVVYTPTVGEACQKYGSIYRRPQGLYISLKEKGKILEVLKNWPQRGIQVIVVTDGERILGLGDLGCQGMGIPVGKLSLYTALGGIRPSACLPITIDVGTNNEKLLNNEFYIGLKQKRANGEEYAEFLQEFMCAVKQNYGEKVLVQFEDFANHHAFELLSKYCSSHLVFNDDIQGTASVVLAGLIAAQKVLGKSLADHTFLFLGAGEAGTGIAELIALKISKETGKPIDETRKKIWLVDSKGLIVSERKESLQHFKQPWAHDHKPVKELLAAVNAIKPTVLIGTSGVGKTFTKEVVEAMATLNEKPLILALSNPTSQAECTAEEAYTWTKGRAIFASGSPFDPVQYDGKKFTPGQANNCYIFPGLGLGLIMSGAIRVRDDMLLAASEALASQVTEENFANGLIYPPFANIRKISANIAASVGAKTYELGLASNLPRPKDLVKMAESCMYSPVYRNFR

SEQ ID NO: 43901 - protein, 536 aa, Arabidopsis thaliana
  peptide (1)..(536): Ceres Seq. ID no. 12559126
  misc_feature (252)..(505): Pfam Name: Malic enzyme, NAD binding domain Pfam Description: Malic enzyme, NAD binding domain
  misc_feature (1)..(536): Homolog of NCBI NO: 34910732 NR Description: P0022F10.12 [Oryza sativa (japonica
  misc_feature (1)..(536): Homolog of NCBI NO: 4239891 NR Description: NADP-malic enzyme [Aloe arborescens]
  misc_feature (1)..(536): Homolog of NCBI NO: 8118507 NR Description: NADP-dependent malic protein [Ricinus communis]
  misc_feature (1)..(536): Homolog of NCBI NO: 7431234 NR Description: malate dehydrogenase
  misc_feature (1)..(536): Homolog of NCBI NO: 1708924 NR Description: NADP-DEPENDENT MALIC ENZYME (NADP-ME)
  misc_feature (1)..(536): Homolog of NCBI NO: 115420 NR Description: NADP-DEPENDENT MALIC ENZYME (NADP-ME)
  misc_feature (1)..(536): Homolog of NCBI NO: 7427668 NR Description: malate dehydrogenase
  misc_feature (1)..(536): Homolog of NCBI NO: 510876 NR Description: NADP dependent malic enzyme [Phaseolus vulgaris]
  misc_feature (1)..(536): Homolog of NCBI NO: 15239146 NR Description: NADP dependent malic enzyme - like protein
  misc_feature (1)..(536): Homolog of NCBI NO: 15239517 NR Description: malate dehydrogenase - like protein; protein id:
MRDPRYNKGLAFTDKERDAHYITGLLPPVVLSQDVQERKVMHNLRQYTVPLQRYMALMDLQERNERLFYKLLIDNVEELLPVVYTPTVGEACQKYGSIYRRPQGLYISLKEKGKILEVLKNWPQRGIQVIVVTDGERILGLGDLGCQGMGIPVGKLSLYTALGGIRPSACLPITIDVGTNNEKLLNNEFYIGLKQKRANGEEYAEFLQEFMCAVKQNYGEKVLVQFEDFANHHAFELLSKYCSSHLVFNDDIQGTASVVLAGLIAAQKVLGKSLADHTFLFLGAGEAGTGIAELIALKISKETGKPIDETRKKIWLVDSKGLIVSERKESLQHFKQPWAHDHKPVKELLAAVNAIKPTVLIGTSGVGKTFTKEVVEAMATLNEKPLILALSNPTSQAECTAEEAYTWTKGRAIFASGSPFDPVQYDGKKFTPGQANNCYIFPGLGLGLIMSGAIRVRDDMLLAASEALASQVTEENFANGLIYPPFANIRKISANIAASVGAKTYELGLASNLPRPKDLVKMAESCMYSPVYRNFR

SEQ ID NO: 43902 - protein, 496 aa, Arabidopsis thaliana
  peptide (1)..(496): Ceres Seq. ID no. 12559127
  misc_feature (212)..(465): Pfam Name: Malic enzyme, NAD binding domain Pfam Description: Malic enzyme, NAD binding domain
  misc_feature (1)..(496): Homolog of NCBI NO: 34910732 NR Description: P0022F10.12 [Oryza sativa (japonica
  misc_feature (1)..(496): Homolog of NCBI NO: 4239891 NR Description: NADP-malic enzyme [Aloe arborescens]
  misc_feature (1)..(496): Homolog of NCBI NO: 8118507 NR Description: NADP-dependent malic protein [Ricinus communis]
  misc_feature (1)..(496): Homolog of NCBI NO: 7431234 NR Description: malate dehydrogenase
  misc_feature (1)..(496): Homolog of NCBI NO: 1708924 NR Description: NADP-DEPENDENT MALIC ENZYME (NADP-ME)
  misc_feature (1)..(496): Homolog of NCBI NO: 115420 NR Description: NADP-DEPENDENT MALIC ENZYME (NADP-ME)
  misc_feature (1)..(496): Homolog of NCBI NO: 7427668 NR Description: malate dehydrogenase
  misc_feature (1)..(496): Homolog of NCBI NO: 510876 NR Description: NADP dependent malic enzyme [Phaseolus vulgaris]
  misc_feature (1)..(496): Homolog of NCBI NO: 15239146 NR Description: NADP dependent malic enzyme - like protein
  misc_feature (1)..(496): Homolog of NCBI NO: 15239517 NR Description: malate dehydrogenase - like protein; protein id:
MHNLRQYTVPLQRYMALMDLQERNERLFYKLLIDNVEELLPVVYTPTVGEACQKYGSIYRRPQGLYISLKEKGKILEVLKNWPQRGIQVIVVTDGERILGLGDLGCQGMGIPVGKLSLYTALGGIRPSACLPITIDVGTNNEKLLNNEFYIGLKQKRANGEEYAEFLQEFMCAVKQNYGEKVLVQFEDFANHHAFELLSKYCSSHLVFNDDIQGTASVVLAGLIAAQKVLGKSLADHTFLFLGAGEAGTGIAELIALKISKETGKPIDETRKKIWLVDSKGLIVSERKESLQHFKQPWAHDHKPVKELLAAVNAIKPTVLIGTSGVGKTFTKEVVEAMATLNEKPLILALSNPTSQAECTAEEAYTWTKGRAIFASGSPFDPVQYDGKKFTPGQANNCYIFPGLGLGLIMSGAIRVRDDMLLAASEALASQVTEENFANGLIYPPFANIRKISANIAASVGAKTYELGLASNLPRPKDLVKMAESCMYSPVYRNFR

SEQ ID NO: 43903 - DNA, 964 bp, Arabidopsis thaliana; identical to SEQ ID NO: 36070
  misc_feature (1)..(964): Ceres Seq. ID no. 13647095
  misc_feature: MA Experiment ID: 108434 Result: Down-regulated in Transcription
  misc_feature: MA Experiment 108434 PARAMETER Experiment Name: At_Root_Tips_cDNA_P Parameter: Tissue Value: Root Tips
  misc_feature: MA Experiment ID: 108461 Result: Up-regulated in Transcription
  misc_feature: MA Experiment 108461 PARAMETER Experiment Name: At_Germinating_Seeds_cDNA_P Parameter: Age (day) Value: 1 vs. 0
  misc_feature: MA Experiment 108461 PARAMETER Experiment Name: At_Germinating_Seeds_cDNA_P Parameter: Tissue Value: Germinating Seeds
  misc_feature: MA Experiment ID: 108462 Result: Up-regulated in Transcription
  misc_feature: MA Experiment 108462 PARAMETER Experiment Name: At_Germinating_Seeds_cDNA_P Parameter: Age (day) Value: 2 vs. 0
  misc_feature: MA Experiment 108462 PARAMETER Experiment Name: At_Germinating_Seeds_cDNA_P Parameter: Tissue Value: Germinating Seeds
  misc_feature: MA Experiment ID: 108488 Result: Up-regulated in Transcription
  misc_feature: MA Experiment ID: 108594 Result: Down-regulated in Transcription
  misc_feature: MA Experiment 108594 PARAMETER Experiment Name: At_Ler-rhl_Root_cDNA_P Parameter: Plant Line Value: null
  misc_feature: MA Experiment ID: 108595 Result: Down-regulated in Transcription
  misc_feature: MA Experiment 108595 PARAMETER Experiment Name: At_Ler-pi_Ovule_cDNA_P Parameter: Plant Line Value: null
  misc_feature: MA Experiment ID: 20000090 Result: Down-regulated in Transcription
  misc_feature: MA Experiment ID: 20000307 Result: Up-regulated in Transcription
  misc_feature: MA Experiment 20000307 PARAMETER Experiment Name: At_Germinating_Seeds_Sub_P Parameter: Age (hr) Value: 24 vs. 0
  misc_feature: MA Experiment 20000307 PARAMETER Experiment Name: At_Germinating_Seeds_Sub_P Parameter: Organism Value: A. thaliana
  misc_feature: MA Experiment 20000307 PARAMETER Experiment Name: At_Germinating_Seeds_Sub_P Parameter: Plant Line Value: WS
  misc_feature: MA Experiment 20000307 PARAMETER Experiment Name: At_Germinating_Seeds_Sub_P Parameter: Tissue Value: Germinating Seeds
  misc_feature: MA Experiment ID: 20000314 Result: Down-regulated in Transcription
  misc_feature: MA Experiment 20000314 PARAMETER Experiment Name: At_14day_Shoots-Roots_Sub_P Parameter: Age (day) Value: 14
  misc_feature: MA Experiment 20000314 PARAMETER Experiment Name: At_14day_Shoots-Roots_Sub_P Parameter: Organism Value: A. thaliana
  misc_feature: MA Experiment 20000314 PARAMETER Experiment Name: At_14day_Shoots-Roots_Sub_P Parameter: Plant Line Value: WS
  misc_feature: MA Experiment 20000314 PARAMETER Experiment Name: At_14day_Shoots-Roots_Sub_P Parameter: Tissue Value: Roots vs. Whole Plant
  misc_feature: MA Experiment ID: 20000328 Result: Up-regulated in Transcription
  misc_feature: MA Experiment 20000328 PARAMETER Experiment Name: At_42deg_Heat_Sub_P Parameter: Age (day) Value: 14
  misc_feature: MA Experiment 20000328 PARAMETER Experiment Name: At_42deg_Heat_Sub_P Parameter: Organism Value: A. thaliana
  misc_feature: MA Experiment 20000328 PARAMETER Experiment Name: At_42deg_Heat_Sub_P Parameter: Plant Line Value: WS
  misc_feature: MA Experiment 20000328 PARAMETER Experiment Name: At_42deg_Heat_Sub_P Parameter: Temperature (deg C) Value: 42 vs. 22
  misc_feature: MA Experiment 20000328 PARAMETER Experiment Name: At_42deg_Heat_Sub_P Parameter: Timepoint (hr) Value: 6
  misc_feature: MA Experiment 20000328 PARAMETER Experiment Name: At_42deg_Heat_Sub_P Parameter: Tissue Value: Aerial
  misc_feature: MA Experiment ID: 20001807 Result: Up-regulated in Transcription
  misc_feature: MA Experiment 20001807 PARAMETER Experiment Name: At_50mM_NH4NO3_L-to-H_Sub_P Parameter: Timepoint (hr) Value: 6
  misc_feature: MA Experiment 20001807 PARAMETER Experiment Name: At_50mM_NH4NO3_L-to-H_Sub_P Parameter: Tissue Value: Leaf
  misc_feature: MA Experiment 20001807 PARAMETER Experiment Name: At_50mM_NH4NO3_L-to-H_Sub_P Parameter: Treatment Value: 50mM NH4NO3 vs 100mM Mannitol

SEQ ID NO: 43904 - protein, 171 aa, Arabidopsis thaliana; identical to SEQ ID NO: 36071
  peptide (1)..(171): Ceres Seq. ID no. 15218720
  misc_feature (64)..(159): Pfam Name: Chlorophyll A-B binding protein Pfam Description: Chlorophyll A-B binding protein
  misc_feature (64)..(159): Pfam Name: Chlorophyll A-B binding protein Pfam Description: Chlorophyll A-B binding protein
  misc_feature (1)..(163): Homolog of NCBI NO: 1345698 NR Description: Chlorophyll A-B binding protein 151, chloroplast
  misc_feature (1)..(159): Homolog of NCBI NO: 3560529 NR Description: light harvesting chlorophyll A/B binding protein
  misc_feature (1)..(163): Homolog of NCBI NO: 15232249 NR Description: light harvesting chlorophyll A/B binding protein,
  misc_feature (1)..(159): Homolog of NCBI NO: 15224471 NR Description: light-harvesting chlorophyll a/b binding protein
  misc_feature (1)..(159): Homolog of NCBI NO: 3560529 NR Description: light harvesting chlorophyll A/B binding protein
  misc_feature (1)..(159): Homolog of NCBI NO: 15224471 NR Description: light-harvesting chlorophyll a/b binding protein
  misc_feature (1)..(159): Homolog of NCBI NO: 25299029 NR Description: chlorophyll a/b-binding protein Lhcb2
  misc_feature (1)..(159): Homolog of NCBI NO: 15224465 NR Description: light-harvesting chlorophyll a/b binding protein
  misc_feature (1)..(159): Homolog of NCBI NO: 25299022 NR Description: chlorophyll a/b-binding protein Lhcb2
  misc_feature (1)..(163): Homolog of NCBI NO: 15232249 NR Description: light harvesting chlorophyll A/B binding protein,
  misc_feature (1)..(163): Homolog of NCBI NO: 1345698 NR Description: Chlorophyll A-B binding protein 151, chloroplast
  misc_feature (1)..(159): Homolog of NCBI NO: 25299022 NR Description: chlorophyll a/b-binding protein Lhcb2
  misc_feature (1)..(159): Homolog of NCBI NO: 25299029 NR Description: chlorophyll a/b-binding protein Lhcb2
  misc_feature (1)..(159): Homolog of NCBI NO: 15224465 NR Description: light-harvesting chlorophyll a/b binding protein

SEQ ID NO: 43905 - protein, 135 aa, Arabidopsis thaliana; identical to SEQ ID NO: 36072
  peptide (1)..(135): Ceres Seq. ID no. 15218721
  misc_feature (28)..(123): Pfam Name: Chlorophyll A-B binding protein Pfam Description: Chlorophyll A-B binding protein
  misc_feature (28)..(123): Pfam Name: Chlorophyll A-B binding protein Pfam Description: Chlorophyll A-B binding protein
  misc_feature (1)..(127): Homolog of NCBI NO: 1345698 NR Description: Chlorophyll A-B binding protein 151, chloroplast
  misc_feature (1)..(123): Homolog of NCBI NO: 3560529 NR Description: light harvesting chlorophyll A/B binding protein
  misc_feature (1)..(127): Homolog of NCBI NO: 15232249 NR Description: light harvesting chlorophyll A/B binding protein,
  misc_feature (1)..(123): Homolog of NCBI NO: 15224471 NR Description: light-harvesting chlorophyll a/b binding protein
  misc_feature (1)..(123): Homolog of NCBI NO: 3560529 NR Description: light harvesting chlorophyll A/B binding protein
  misc_feature (1)..(123): Homolog of NCBI NO: 15224471 NR Description: light-harvesting chlorophyll a/b binding protein
  misc_feature (1)..(123): Homolog of NCBI NO: 25299029 NR Description: chlorophyll a/b-binding protein Lhcb2
  misc_feature (1)..(123): Homolog of NCBI NO: 15224465 NR Description: light-harvesting chlorophyll a/b binding protein
  misc_feature (1)..(123): Homolog of NCBI NO: 25299022 NR Description: chlorophyll a/b-binding protein Lhcb2
  misc_feature (1)..(127): Homolog of NCBI NO: 15232249 NR Description: light harvesting chlorophyll A/B binding protein,
  misc_feature (1)..(127): Homolog of NCBI NO: 1345698 NR Description: Chlorophyll A-B binding protein 151, chloroplast
  misc_feature (1)..(123): Homolog of NCBI NO: 25299022 NR Description: chlorophyll a/b-binding protein Lhcb2
  misc_feature (1)..(123): Homolog of NCBI NO: 25299029 NR Description: chlorophyll a/b-binding protein Lhcb2
  misc_feature (1)..(123): Homolog of NCBI NO: 15224465 NR Description: light-harvesting chlorophyll a/b binding protein

SEQ ID NO: 43906 - protein, 98 aa, Arabidopsis thaliana; identical to SEQ ID NO: 36073
  peptide (1)..(98): Ceres Seq. ID no. 15218722
  misc_feature (1)..(65): Pfam Name: Chlorophyll A-B binding protein Pfam Description: Chlorophyll A-B binding protein
  misc_feature (1)..(65): Pfam Name: Chlorophyll A-B binding protein Pfam Description: Chlorophyll A-B binding protein
  misc_feature (1)..(98): Homolog of NCBI NO: 1345698 NR Description: Chlorophyll A-B binding protein 151, chloroplast
  misc_feature (1)..(98): Homolog of NCBI NO: 3560529 NR Description: light harvesting chlorophyll A/B binding protein
  misc_feature (1)..(98): Homolog of NCBI NO: 15232249 NR Description: light harvesting chlorophyll A/B binding protein,
  misc_feature (1)..(97): Homolog of NCBI NO: 15224471 NR Description: light-harvesting chlorophyll a/b binding protein
  misc_feature (1)..(98): Homolog of NCBI NO: 3560529 NR Description: light harvesting chlorophyll A/B binding protein
  misc_feature (1)..(97): Homolog of NCBI NO: 15224471 NR Description: light-harvesting chlorophyll a/b binding protein
  misc_feature (1)..(98): Homolog of NCBI NO: 25299029 NR Description: chlorophyll a/b-binding protein Lhcb2
  misc_feature (1)..(98): Homolog of NCBI NO: 15224465 NR Description: light-harvesting chlorophyll a/b binding protein
  misc_feature (1)..(98): Homolog of NCBI NO: 25299022 NR Description: chlorophyll a/b-binding protein Lhcb2
  misc_feature (1)..(98): Homolog of NCBI NO: 15232249 NR Description: light harvesting chlorophyll A/B binding protein,
  misc_feature (1)..(98): Homolog of NCBI NO: 1345698 NR Description: Chlorophyll A-B binding protein 151, chloroplast
  misc_feature (1)..(98): Homolog of NCBI NO: 25299022 NR Description: chlorophyll a/b-binding protein Lhcb2
  misc_feature (1)..(98): Homolog of NCBI NO: 25299029 NR Description: chlorophyll a/b-binding protein Lhcb2
  misc_feature (1)..(98): Homolog of NCBI NO: 15224465 NR Description: light-harvesting chlorophyll a/b binding protein
  misc_feature (22)..(22): Xaa is any aa, unknown or other
  misc_feature (70)..(70): Xaa is any aa, unknown or other
  misc_feature (75)..(75): Xaa is any aa, unknown or other
  misc_feature (89)..(89): Xaa is any aa, unknown or other

SEQ ID NO: 43907 - DNA, 1035 bp, Arabidopsis thaliana
  misc_feature (1)..(1035): Ceres Seq. ID no. 12488601
  misc_feature: MA Experiment ID: 20000166 Result: Up-regulated in Transcription
  misc_feature: MA Experiment 20000166 PARAMETER Experiment Name: At_100uM_ABA_P Parameter: Age (day) Value: 14
  misc_feature: MA Experiment 20000166 PARAMETER Experiment Name: At_100uM_ABA_P Parameter: Organism Value: A. thaliana
  misc_feature: MA Experiment 20000166 PARAMETER Experiment Name: At_100uM_ABA_P Parameter: Plant Line Value: WS
  misc_feature: MA Experiment 20000166 PARAMETER Experiment Name: At_100uM_ABA_P Parameter: Timepoint (hr) Value: 1
  misc_feature: MA Experiment 20000166 PARAMETER Experiment Name: At_100uM_ABA_P Parameter: Tissue Value: Aerial
  misc_feature: MA Experiment 20000166 PARAMETER Experiment Name: At_100uM_ABA_P Parameter: Treatment Value: 100uM ABA vs. No Treatment
  misc_feature: MA Experiment ID: 20000173 Result: Down-regulated in Transcription
  misc_feature: MA Experiment 20000173 PARAMETER Experiment Name: At_42deg_Heat_P Parameter: Age (day) Value: 14
  misc_feature: MA Experiment 20000173 PARAMETER Experiment Name: At_42deg_Heat_P Parameter: Organism Value: A. thaliana
  misc_feature: MA Experiment 20000173 PARAMETER Experiment Name: At_42deg_Heat_P Parameter: Plant Line Value: WS
  misc_feature: MA Experiment 20000173 PARAMETER Experiment Name: At_42deg_Heat_P Parameter: Temperature (deg C) Value: 42 vs. 22
  misc_feature: MA Experiment 20000173 PARAMETER Experiment Name: At_42deg_Heat_P Parameter: Timepoint (hr) Value: 6
  misc_feature: MA Experiment 20000173 PARAMETER Experiment Name: At_42deg_Heat_P Parameter: Tissue Value: Aerial
  misc_feature: MA Experiment ID: 20000179 Result: Up-regulated in Transcription
  misc_feature: MA Experiment 20000179 PARAMETER Experiment Name: At_Germinating_Seeds_P Parameter: Age (hr) Value: 6 vs. 0
  misc_feature: MA Experiment 20000179 PARAMETER Experiment Name: At_Germinating_Seeds_P Parameter: Tissue Value: Germinating Seeds
  misc_feature: MA Experiment ID: 20000180 Result: Up-regulated in Transcription
  misc_feature: MA Experiment 20000180 PARAMETER Experiment Name: At_Germinating_Seeds_P Parameter: Age (hr) Value: 24 vs. 0
  misc_feature: MA Experiment 20000180 PARAMETER Experiment Name: At_Germinating_Seeds_P Parameter: Tissue Value: Germinating Seeds
  misc_feature: MA Experiment ID: 20000436 Result: Up-regulated in Transcription
  misc_feature: MA Experiment 20000436 PARAMETER Experiment Name: At_Drought_P Parameter: Age (day) Value: 7
  misc_feature: MA Experiment 20000436 PARAMETER Experiment Name: At_Drought_P Parameter: Organism Value: A. thaliana
  misc_feature: MA Experiment 20000436 PARAMETER Experiment Name: At_Drought_P Parameter: Plant Line Value: WS
  misc_feature: MA Experiment 20000436 PARAMETER Experiment Name: At_Drought_P Parameter: Timepoint (hr) Value: 12
  misc_feature: MA Experiment 20000436 PARAMETER Experiment Name: At_Drought_P Parameter: Tissue Value: Whole Plant
  misc_feature: MA Experiment 20000436 PARAMETER Experiment Name: At_Drought_P Parameter: Treatment Value: Drought vs. No Drought
  misc_feature: MA Experiment ID: 20000453 Result: Up-regulated in Transcription
  misc_feature: MA Experiment 20000453 PARAMETER Experiment Name: At_100uM_ABA_P Parameter: Age (day) Value: 15
  misc_feature: MA Experiment 20000453 PARAMETER Experiment Name: At_100uM_ABA_P Parameter: Organism Value: A. thaliana
  misc_feature: MA Experiment 20000453 PARAMETER Experiment Name: At_100uM_ABA_P Parameter: Plant Line Value: WS
  misc_feature: MA Experiment 20000453 PARAMETER Experiment Name: At_100uM_ABA_P Parameter: Timepoint (hr) Value: 24
  misc_feature: MA Experiment 20000453 PARAMETER Experiment Name: At_100uM_ABA_P Parameter: Tissue Value: Aerial
  misc_feature: MA Experiment 20000453 PARAMETER Experiment Name: At_100uM_ABA_P Parameter: Treatment Value: 100uM ABA vs. No Treatment
  misc_feature: MA Experiment ID: 20000495 Result: Down-regulated in Transcription
  misc_feature: MA Experiment 20000495 PARAMETER Experiment Name: At_Guard_Cells_P Parameter: Harvest Date Value: 8/2/2002
  misc_feature: MA Experiment 20000495 PARAMETER Experiment Name: At_Guard_Cells_P Parameter: Organism Value: A. thaliana
  misc_feature: MA Experiment 20000495 PARAMETER Experiment Name: At_Guard_Cells_P Parameter: Tissue Value: Guard Cells vs. Leaves
  misc_feature: MA Experiment ID: 20000573 Result: Down-regulated in Transcription
  misc_feature: MA Experiment 20000573 PARAMETER Experiment Name: At_100uM_ABA_Mutants__P Parameter: Organism Value: A. thaliana
  misc_feature: MA Experiment 20000573 PARAMETER Experiment Name: At_100uM_ABA_Mutants__P Parameter: Plant Line Value: CS22 vs. Ler wt
  misc_feature: MA Experiment 20000573 PARAMETER Experiment Name: At_100uM_ABA_Mutants__P Parameter: Timepoint (hr) Value: N/A
  misc_feature: MA Experiment 20000573 PARAMETER Experiment Name: At_100uM_ABA_Mutants__P Parameter: Tissue Value: Whole Plant
  misc_feature: MA Experiment 20000573 PARAMETER Experiment Name: At_100uM_ABA_Mutants__P Parameter: Treatment Value: None
  misc_feature: MA Experiment ID: 20000574 Result: Down-regulated in Transcription
  misc_feature: MA Experiment 20000574 PARAMETER Experiment Name: At_100uM_ABA_Mutants__P Parameter: Organism Value: A. thaliana
  misc_feature: MA Experiment 20000574 PARAMETER Experiment Name: At_100uM_ABA_Mutants__P Parameter: Plant Line Value: CS23 vs. Ler wt
  misc_feature: MA Experiment 20000574 PARAMETER Experiment Name: At_100uM_ABA_Mutants__P Parameter: Timepoint (hr) Value: N/A
  misc_feature: MA Experiment 20000574 PARAMETER Experiment Name: At_100uM_ABA_Mutants__P Parameter: Tissue Value: Whole Plant
  misc_feature: MA Experiment 20000574 PARAMETER Experiment Name: At_100uM_ABA_Mutants__P Parameter: Treatment Value: None
  misc_feature: MA Experiment ID: 20001248 Result: Down-regulated in Transcription
  misc_feature: MA Experiment 20001248 PARAMETER Experiment Name: At_Far-red-induction_P Parameter: Age (day) Value: 7
  misc_feature: MA Experiment 20001248 PARAMETER Experiment Name: At_Far-red-induction_P Parameter: Light Value: Far-red vs. White
  misc_feature: MA Experiment 20001248 PARAMETER Experiment Name: At_Far-red-induction_P Parameter: Organism Value: A. thaliana
  misc_feature: MA Experiment 20001248 PARAMETER Experiment Name: At_Far-red-induction_P Parameter: Plant Line Value: Columbia
  misc_feature: MA Experiment 20001248 PARAMETER Experiment Name: At_Far-red-induction_P Parameter: Timepoint (hr) Value: 4
  misc_feature: MA Experiment 20001248 PARAMETER Experiment Name: At_Far-red-induction_P Parameter: Tissue Value: Whole Plant
  misc_feature: MA Experiment ID: 20001451 Result: Down-regulated in Transcription
  misc_feature: MA Experiment 20001451 PARAMETER Experiment Name: At_Far-red-induction_P Parameter: Age (day) Value: 7
  misc_feature: MA Experiment 20001451 PARAMETER Experiment Name: At_Far-red-induction_P Parameter: Light Value: Far-red vs. White
  misc_feature: MA Experiment 20001451 PARAMETER Experiment Name: At_Far-red-induction_P Parameter: Organism Value: A. thaliana
  misc_feature: MA Experiment 20001451 PARAMETER Experiment Name: At_Far-red-induction_P Parameter: Plant Line Value: Columbia
  misc_feature: MA Experiment 20001451 PARAMETER Experiment Name: At_Far-red-induction_P Parameter: Timepoint (hr) Value: 24
  misc_feature: MA Experiment 20001451 PARAMETER Experiment Name: At_Far-red-induction_P Parameter: Tissue Value: Whole Plant
aacacaaatatcataatttctccacgaactgactaagagaggtaccaagaagaaaaccagagaagaatcttctttagagagatgggtgtggtagaagaagctcacaacgtgaaggtgattggttcaggagaagccacgatcgtgttaggtcacgggttcggcacggaccagtcagtatggaaacacttggttccacatctggtcgacgattaccgcgtcgtcctctacgacaacatgggagccggtacgaccaaccctgactatttcgacttcgatcgttactcaaatctcgaaggctactctttcgatttgattgcaatcttggaagatctcaagattgagtcttgtatctttgttggccactctgtttctgccatgattggtgtcttggcttctcttaaccgtcctgatctcttctccaaaatcgtcatgatctctgcttctccgagatacgtaaacgatgttgattaccaaggtggattcgaacaagaagacttaaaccaactattcgaagccatccgaagcaactacaaagcgtggtgcttaggtttcgctccactcgccgtcggtggcgacatggactccatcgccgttcaagaattcagcagaacactcttcaatatgcgtcccgacatagctctctccgtcggccagaccattttccaaagtgacatgagacagatcttaccttttgtcactgttccgtgtcacattctccaaagtgttaaggacttagctgtaccagtcgttgtctccgagtatcttcacgccaatcttggctgtgaatccgtcgtcgaggttattccttctgatggtcatcttcctcagcttagctcaccagattctgttattcctgtcatcctccgtcacattcgtaatgacattgctatgtgattgtaagagatttaattagttaattattaaacgatgtaagaaaagttgaaaaaaaatatctgatgtgatatgtctgtctagtctattgagaacattatttcgttgtcgtttggttctgattcgtttatcttgagtatcttg

SEQ ID NO: 43908 - protein, 270 aa, Arabidopsis thaliana
  peptide (1)..(270): Ceres Seq. ID no. 12488602
  misc_feature (44)..(262): Pfam Name: alpha/beta hydrolase fold Pfam Description: alpha/beta hydrolase fold
  misc_feature (44)..(262): Pfam Name: alpha/beta hydrolase fold Pfam Description: alpha/beta hydrolase fold
  misc_feature (4)..(260): Homolog of NCBI NO: 29827464 NR Description: putative hydrolase [Streptomyces avermitilis
  misc_feature (10)..(264): Homolog of NCBI NO: 22298700 NR Description: ORF_ID:tlr1157~hypothetical protein
  misc_feature (4)..(253): Homolog of NCBI NO: 22987307 NR Description: hypothetical protein [Burkholderia fungorum]
  misc_feature (7)..(262): Homolog of NCBI NO: 15230110 NR Description: unknown protein; protein id: At3g24420.1
  misc_feature (8)..(260): Homolog of NCBI NO: 24216360 NR Description: Predicted hydrolases or acyltransferases,
  misc_feature (4)..(260): Homolog of NCBI NO: 29827464 NR Description: putative hydrolase [Streptomyces avermitilis
  misc_feature (4)..(253): Homolog of NCBI NO: 22987307 NR Description: hypothetical protein [Burkholderia fungorum]
  misc_feature (8)..(260): Homolog of NCBI NO: 24216360 NR Description: Predicted hydrolases or acyltransferases,
  misc_feature (1)..(270): Homolog of NCBI NO: 15235567 NR Description: putative protein
  misc_feature (124)..(270): Homolog of NCBI NO: 40736991 NR Description: putative hydrolases [Oryza sativa (japonica
  misc_feature (1)..(125): Homolog of NCBI NO: 40736991 NR Description: putative hydrolases [Oryza sativa (japonica
  misc_feature (6)..(262): Homolog of NCBI NO: 21593927 NR Description: unknown [Arabidopsis thaliana]
  misc_feature (6)..(262): Homolog of NCBI NO: 18396732 NR Description: expressed protein
  misc_feature (7)..(262): Homolog of NCBI NO: 15230110 NR Description: unknown protein; protein id: At3g24420.1
  misc_feature (10)..(264): Homolog of NCBI NO: 22298700 NR Description: ORF_ID:tlr1157~hypothetical protein
  misc_feature (6)..(262): Homolog of NCBI NO: 18396732 NR Description: expressed protein
  misc_feature (6)..(262): Homolog of NCBI NO: 21593927 NR Description: unknown [Arabidopsis thaliana]
  misc_feature (1)..(125): Homolog of NCBI NO: 40736991 NR Description: putative hydrolases [Oryza sativa (japonica
  misc_feature (124)..(270): Homolog of NCBI NO: 40736991 NR Description: putative hydrolases [Oryza sativa (japonica
  misc_feature (1)..(270): Homolog of NCBI NO: 15235567 NR Description: putative protein
MGVVEEAHNVKVIGSGEATIVLGHGFGTDQSVWKHLVPHLVDDYRVVLYDNMGAGTTNPDYFDFDRYSNLEGYSFDLIAILEDLKIESCIFVGHSVSAMIGVLASLNRPDLFSKIVMISASPRYVNDVDYQGGFEQEDLNQLFEAIRSNYKAWCLGFAPLAVGGDMDSIAVQEFSRTLFNMRPDIALSVGQTIFQSDMRQILPFVTVPCHILQSVKDLAVPVVVSEYLHANLGCESVVEVIPSDGHLPQLSSPDSVIPVILRHIRNDIAM

SEQ ID NO: 43909 - protein, 219 aa, Arabidopsis thaliana
  peptide (1)..(219): Ceres Seq. ID no. 12488603
  misc_feature (1)..(211): Pfam Name: alpha/beta hydrolase fold Pfam Description: alpha/beta hydrolase fold
  misc_feature (1)..(211): Pfam Name: alpha/beta hydrolase fold Pfam Description: alpha/beta hydrolase fold
  misc_feature (1)..(209): Homolog of NCBI NO: 29827464 NR Description: putative hydrolase [Streptomyces avermitilis
  misc_feature (1)..(213): Homolog of NCBI NO: 22298700 NR Description: ORF_ID:tlr1157~hypothetical protein
  misc_feature (1)..(202): Homolog of NCBI NO: 22987307 NR Description: hypothetical protein [Burkholderia fungorum]
  misc_feature (1)..(211): Homolog of NCBI NO: 15230110 NR Description: unknown protein; protein id: At3g24420.1
  misc_feature (1)..(209): Homolog of NCBI NO: 24216360 NR Description: Predicted hydrolases or acyltransferases,
  misc_feature (1)..(209): Homolog of NCBI NO: 29827464 NR Description: putative hydrolase [Streptomyces avermitilis
  misc_feature (1)..(202): Homolog of NCBI NO: 22987307 NR Description: hypothetical protein [Burkholderia fungorum]
  misc_feature (1)..(209): Homolog of NCBI NO: 24216360 NR Description: Predicted hydrolases or acyltransferases,
  misc_feature (1)..(219): Homolog of NCBI NO: 15235567 NR Description: putative protein
  misc_feature (73)..(219): Homolog of NCBI NO: 40736991 NR Description: putative hydrolases [Oryza sativa (japonica
  misc_feature (1)..(74): Homolog of NCBI NO: 40736991 NR Description: putative hydrolases [Oryza sativa (japonica
  misc_feature (1)..(211): Homolog of NCBI NO: 21593927 NR Description: unknown [Arabidopsis thaliana]
  misc_feature (1)..(211): Homolog of NCBI NO: 18396732 NR Description: expressed protein
  misc_feature (1)..(211): Homolog of NCBI NO: 15230110 NR Description: unknown protein; protein id: At3g24420.1
  misc_feature (1)..(213): Homolog of NCBI NO: 22298700 NR Description: ORF_ID:tlr1157~hypothetical protein
  misc_feature (1)..(211): Homolog of NCBI NO: 18396732 NR Description: expressed protein
  misc_feature (1)..(211): Homolog of NCBI NO: 21593927 NR Description: unknown [Arabidopsis thaliana]
  misc_feature (1)..(74): Homolog of NCBI NO: 40736991 NR Description: putative hydrolases [Oryza sativa (japonica
  misc_feature (73)..(219): Homolog of NCBI NO: 40736991 NR Description: putative hydrolases [Oryza sativa (japonica
  misc_feature (1)..(219): Homolog of NCBI NO: 15235567 NR Description: putative protein
MGAGTTNPDYFDFDRYSNLEGYSFDLIAILEDLKIESCIFVGHSVSAMIGVLASLNRPDLFSKIVMISASPRYVNDVDYQGGFEQEDLNQLFEAIRSNYKAWCLGFAPLAVGGDMDSIAVQEFSRTLFNMRPDIALSVGQTIFQSDMRQILPFVTVPCHILQSVKDLAVPVVVSEYLHANLGCESVVEVIPSDGHLPQLSSPDSVIPVILRHIRNDIAM

SEQ ID NO: 43910 - protein, 172 aa, Arabidopsis thaliana
  peptide (1)..(172): Ceres Seq. ID no. 12488604
  misc_feature (1)..(164): Pfam Name: alpha/beta hydrolase fold Pfam Description: alpha/beta hydrolase fold
  misc_feature (1)..(164): Pfam Name: alpha/beta hydrolase fold Pfam Description: alpha/beta hydrolase fold
  misc_feature (1)..(162): Homolog of NCBI NO: 29827464 NR Description: putative hydrolase [Streptomyces avermitilis
  misc_feature (1)..(166): Homolog of NCBI NO: 22298700 NR Description: ORF_ID:tlr1157~hypothetical protein
  misc_feature (1)..(155): Homolog of NCBI NO: 22987307 NR Description: hypothetical protein [Burkholderia fungorum]
  misc_feature (1)..(164): Homolog of NCBI NO: 15230110 NR Description: unknown protein; protein id: At3g24420.1
  misc_feature (1)..(162): Homolog of NCBI NO: 24216360 NR Description: Predicted hydrolases or acyltransferases,
  misc_feature (1)..(162): Homolog of NCBI NO: 29827464 NR Description: putative hydrolase [Streptomyces avermitilis
  misc_feature (1)..(155): Homolog of NCBI NO: 22987307 NR Description: hypothetical protein [Burkholderia fungorum]
  misc_feature (1)..(162): Homolog of NCBI NO: 24216360 NR Description: Predicted hydrolases or acyltransferases,
  misc_feature (1)..(172): Homolog of NCBI NO: 15235567 NR Description: putative protein
  misc_feature (26)..(172): Homolog of NCBI NO: 40736991 NR Description: putative hydrolases [Oryza sativa (japonica
  misc_feature (1)..(27): Homolog of NCBI NO: 40736991 NR Description: putative hydrolases [Oryza sativa (japonica
  misc_feature (1)..(164): Homolog of NCBI NO: 21593927 NR Description: unknown [Arabidopsis thaliana]
  misc_feature (1)..(164): Homolog of NCBI NO: 18396732 NR Description: expressed protein
  misc_feature (1)..(164): Homolog of NCBI NO: 15230110 NR Description: unknown protein; protein id: At3g24420.1
  misc_feature (1)..(166): Homolog of NCBI NO: 22298700 NR Description: ORF_ID:tlr1157~hypothetical protein
  misc_feature (1)..(164): Homolog of NCBI NO: 18396732 NR Description: expressed protein
  misc_feature (1)..(164): Homolog of NCBI NO: 21593927 NR Description: unknown [Arabidopsis thaliana]
  misc_feature (1)..(27): Homolog of NCBI NO: 40736991 NR Description: putative hydrolases [Oryza sativa (japonica
  misc_feature (26)..(172): Homolog of NCBI NO: 40736991 NR Description: putative hydrolases [Oryza sativa (japonica
  misc_feature (1)..(172): Homolog of NCBI NO: 15235567 NR Description: putative protein
MIGVLASLNRPDLFSKIVMISASPRYVNDVDYQGGFEQEDLNQLFEAIRSNYKAWCLGFAPLAVGGDMDSIAVQEFSRTLFNMRPDIALSVGQTIFQSDMRQILPFVTVPCHILQSVKDLAVPVVVSEYLHANLGCESVVEVIPSDGHLPQLSSPDSVIPVILRHIRNDIAM

SEQ ID NO: 43911 - DNA, 1086 bp, Arabidopsis thaliana
  misc_feature (1)..(1086): Ceres Seq. ID no. 13575398
  misc_feature: MA Experiment ID: 20000794 Result: Down-regulated in Transcription
  misc_feature: MA Experiment 20000794 PARAMETER Experiment Name: At_Petals_P Parameter: Age (day) Value: 23-25 days
  misc_feature: MA Experiment 20000794 PARAMETER Experiment Name: At_Petals_P Parameter: Plant Line Value: WS
  misc_feature: MA Experiment 20000794 PARAMETER Experiment Name: At_Petals_P Parameter: Tissue Value: Petals vs. Whole plant
gagttttcatttctcgagcaatttcactcttccgagaacaaccctagattccgatgatgaggggtctcgtttccggcgccaagatgctatcatcaaccccatcgtcgatggcgacaagcatcgccactggtagaagaagctacagtctgattccgatggttattgagcactcatcgcgaggagagagagcttacgacatcttctctcgtttgctcaaggagcgtattatctgcatcaacggtcccattaatgacgacacatctcacgtcgtcgtcgctcagcttctttacctcgagtctgagaatccttcgaagccgatccatatgtatctcaattcccctggcggccatgtcaccgccggtcttgcaatttatgatactatgcagtacattcgttctcctattagcacaatttgtttgggtcaggctgcatcaatggcttctcttctgttggcagcgggtgccaaggggcaaaggcggtcacttccaaatgcaactgttatgattcatcagccttcaggaggatatagtggacaggctaaagatataacgattcatacaaaacagattgttcgtgtgtgggatgcgttaaatgaattgtatgtcaaacacacgggtcaacctcttgacgtggttgcgaataacatggatagggatcatttcatgactcctgaagaggctaaggcgtttggaataatcgatgaagtgattgatgaaagaccgttggagttggtgaaagatgcagttggaaatgaaagcaaagataagagttcaagttaggaagtaactggtaatcaaagtaataaattttcttcttttcctcttaccagttttgctttgatcctgttagattacttttttctatggatgaagttatgctctgagggcatgatctctcaaactgtttttattcattcataaatcaatcatgactatatttctgaaatcttttcctcgcatgtttagtgtttacagtctcatatctgattcagtaaaatgaatattggattaacgcttggctttgggtcttaattttatgtgcagtttgatgcattgcaaatctttgatttatgcatcattttatact

SEQ ID NO: 43912 - protein, 241 aa, Arabidopsis thaliana
  peptide (1)..(241): Ceres Seq. ID no. 13575399
  misc_feature (41)..(222): Pfam Name: Clp protease Pfam Description: Clp protease
  misc_feature (31)..(222): Homolog of NCBI NO: 21759068 NR Description: ATP-dependent Clp protease proteolytic subunit
  misc_feature (31)..(222): Homolog of NCBI NO: 17987157 NR Description: ATP-DEPENDENT CLP PROTEASE PROTEOLYTIC SUBUNIT
  misc_feature (31)..(222): Homolog of NCBI NO: 18266800 NR Description: ATP-dependent Clp protease proteolytic subunit
  misc_feature (31)..(222): Homolog of NCBI NO: 16126206 NR Description: ATP-dependent Clp protease, proteolytic subunit
  misc_feature (31)..(222): Homolog of NCBI NO: 18203228 NR Description: ATP-dependent Clp protease proteolytic subunit
  misc_feature (31)..(236): Homolog of NCBI NO: 23501987 NR Description: ATP-dependent Clp protease, proteolytic subunit
  misc_feature (31)..(223): Homolog of NCBI NO: 6685315 NR Description: ATP-dependent Clp protease proteolytic subunit
  misc_feature (1)..(229): Homolog of NCBI NO: 20129427 NR Description: CG5045-PA [Drosophila melanogaster]
  misc_feature (1)..(241): Homolog of NCBI NO: 38344435 NR Description: OSJNBa0038O10.7 [Oryza sativa (japonica
  misc_feature (1)..(241): Homolog of NCBI NO: 18420643 NR Description: ATP-dependent Clp protease proteolytic subunit
MMRGLVSGAKMLSSTPSSMATSIATGRRSYSLIPMVIEHSSRGERAYDIFSRLLKERIICINGPINDDTSHVVVAQLLYLESENPSKPIHMYLNSPGGHVTAGLAIYDTMQYIRSPISTICLGQAASMASLLLAAGAKGQRRSLPNATVMIHQPSGGYSGQAKDITIHTKQIVRVWDALNELYVKHTGQPLDVVANNMDRDHFMTPEEAKAFGIIDEVIDERPLELVKDAVGNESKDKSSS

SEQ ID NO: 43913 - protein, 240 aa, Arabidopsis thaliana
  peptide (1)..(240): Ceres Seq. ID no. 13575400
  misc_feature (40)..(221): Pfam Name: Clp protease Pfam Description: Clp protease
  misc_feature (30)..(221): Homolog of NCBI NO: 21759068 NR Description: ATP-dependent Clp protease proteolytic subunit
  misc_feature (30)..(221): Homolog of NCBI NO: 17987157 NR Description: ATP-DEPENDENT CLP PROTEASE PROTEOLYTIC SUBUNIT
  misc_feature (30)..(221): Homolog of NCBI NO: 18266800 NR Description: ATP-dependent Clp protease proteolytic subunit
  misc_feature (30)..(221): Homolog of NCBI NO: 16126206 NR Description: ATP-dependent Clp protease, proteolytic subunit
  misc_feature (30)..(221): Homolog of NCBI NO: 18203228 NR Description: ATP-dependent Clp protease proteolytic subunit
  misc_feature (30)..(235): Homolog of NCBI NO: 23501987 NR Description: ATP-dependent Clp protease, proteolytic subunit
  misc_feature (30)..(222): Homolog of NCBI NO: 6685315 NR Description: ATP-dependent Clp protease proteolytic subunit
  misc_feature (1)..(228): Homolog of NCBI NO: 20129427 NR Description: CG5045-PA [Drosophila melanogaster]
  misc_feature (1)..(240): Homolog of NCBI NO: 38344435 NR Description: OSJNBa0038O10.7 [Oryza sativa (japonica
  misc_feature (1)..(240): Homolog of NCBI NO: 18420643 NR Description: ATP-dependent Clp protease proteolytic subunit
MRGLVSGAKMLSSTPSSMATSIATGRRSYSLIPMVIEHSSRGERAYDIFSRLLKERIICINGPINDDTSHVVVAQLLYLESENPSKPIHMYLNSPGGHVTAGLAIYDTMQYIRSPISTICLGQAASMASLLLAAGAKGQRRSLPNATVMIHQPSGGYSGQAKDITIHTKQIVRVWDALNELYVKHTGQPLDVVANNMDRDHFMTPEEAKAFGIIDEVIDERPLELVKDAVGNESKDKSSS

SEQ ID NO: 43914 - protein, 231 aa, Arabidopsis thaliana
  peptide (1)..(231): Ceres Seq. ID no. 13575401
  misc_feature (31)..(212): Pfam Name: Clp protease Pfam Description: Clp protease
  misc_feature (21)..(212): Homolog of NCBI NO: 21759068 NR Description: ATP-dependent Clp protease proteolytic subunit
  misc_feature (21)..(212): Homolog of NCBI NO: 17987157 NR Description: ATP-DEPENDENT CLP PROTEASE PROTEOLYTIC SUBUNIT
  misc_feature (21)..(212): Homolog of NCBI NO: 18266800 NR Description: ATP-dependent Clp protease proteolytic subunit
  misc_feature (21)..(212): Homolog of NCBI NO: 16126206 NR Description: ATP-dependent Clp protease, proteolytic subunit
  misc_feature (21)..(212): Homolog of NCBI NO: 18203228 NR Description: ATP-dependent Clp protease proteolytic subunit
  misc_feature (21)..(226): Homolog of NCBI NO: 23501987 NR Description: ATP-dependent Clp protease, proteolytic subunit
  misc_feature (21)..(213): Homolog of NCBI NO: 6685315 NR Description: ATP-dependent Clp protease proteolytic subunit
  misc_feature (1)..(219): Homolog of NCBI NO: 20129427 NR Description: CG5045-PA [Drosophila melanogaster]
  misc_feature (1)..(231): Homolog of NCBI NO: 38344435 NR Description: OSJNBa0038O10.7 [Oryza sativa (japonica
  misc_feature (1)..(231): Homolog of NCBI NO: 18420643 NR Description: ATP-dependent Clp protease proteolytic subunit
MLSSTPSSMATSIATGRRSYSLIPMVIEHSSRGERAYDIFSRLLKERIICINGPINDDTSHVVVAQLLYLESENPSKPIHMYLNSPGGHVTAGLAIYDTMQYIRSPISTICLGQAASMASLLLAAGAKGQRRSLPNATVMIHQPSGGYSGQAKDITIHTKQIVRVWDALNELYVKHTGQPLDVVANNMDRDHFMTPEEAKAFGIIDEVIDERPLELVKDAVGNESKDKSSS

SEQ ID NO: 43915 - DNA, 824 bp, Arabidopsis thaliana
  misc_feature (1)..(824): Ceres Seq. ID no. 12559168
  misc_feature: MA Experiment ID: 20000437 Result: Down-regulated in Transcription
  misc_feature: MA Experiment 20000437 PARAMETER Experiment Name: At_Drought_P Parameter: Age (day) Value: 8
  misc_feature: MA Experiment 20000437 PARAMETER Experiment Name: At_Drought_P Parameter: Organism Value: A. thaliana
  misc_feature: MA Experiment 20000437 PARAMETER Experiment Name: At_Drought_P Parameter: Plant Line Value: WS
  misc_feature: MA Experiment 20000437 PARAMETER Experiment Name: At_Drought_P Parameter: Timepoint (hr) Value: 24
  misc_feature: MA Experiment 20000437 PARAMETER Experiment Name: At_Drought_P Parameter: Tissue Value: Whole Plant
  misc_feature: MA Experiment 20000437 PARAMETER Experiment Name: At_Drought_P Parameter: Treatment Value: Drought vs. No Drought
  misc_feature: MA Experiment ID: 20000794 Result: Down-regulated in Transcription
  misc_feature: MA Experiment 20000794 PARAMETER Experiment Name: At_Petals_P Parameter: Age (day) Value: 23-25 days
  misc_feature: MA Experiment 20000794 PARAMETER Experiment Name: At_Petals_P Parameter: Plant Line Value: WS
  misc_feature: MA Experiment 20000794 PARAMETER Experiment Name: At_Petals_P Parameter: Tissue Value: Petals vs. Whole plant
  misc_feature: MA Experiment ID: 20001558 Result: Up-regulated in Transcription
  misc_feature: MA Experiment 20001558 PARAMETER Experiment Name: At_Drought_Soil_Dry_P Parameter: Age (day) Value: 27
  misc_feature: MA Experiment 20001558 PARAMETER Experiment Name: At_Drought_Soil_Dry_P Parameter: Organism Value: A. thaliana
  misc_feature: MA Experiment 20001558 PARAMETER Experiment Name: At_Drought_Soil_Dry_P Parameter: Plant Line Value: WS
  misc_feature: MA Experiment 20001558 PARAMETER Experiment Name: At_Drought_Soil_Dry_P Parameter: Post Timepoint (hr) Value: 6
  misc_feature: MA Experiment 20001558 PARAMETER Experiment Name: At_Drought_Soil_Dry_P Parameter: Post-Treatment Value: Re-Water vs. No Drought
  misc_feature: MA Experiment 20001558 PARAMETER Experiment Name: At_Drought_Soil_Dry_P Parameter: Timepoint (day) Value: 13
  misc_feature: MA Experiment 20001558 PARAMETER Experiment Name: At_Drought_Soil_Dry_P Parameter: Treatment Value: Drought vs. No Drought
  misc_feature: MA Experiment ID: 20001560 Result: Up-regulated in Transcription
  misc_feature: MA Experiment 20001560 PARAMETER Experiment Name: At_Drought_Soil_Dry_P Parameter: Age (day) Value: 28
  misc_feature: MA Experiment 20001560 PARAMETER Experiment Name: At_Drought_Soil_Dry_P Parameter: Organism Value: A. thaliana
  misc_feature: MA Experiment 20001560 PARAMETER Experiment Name: At_Drought_Soil_Dry_P Parameter: Plant Line Value: WS
  misc_feature: MA Experiment 20001560 PARAMETER Experiment Name: At_Drought_Soil_Dry_P Parameter: Post Timepoint (hr) Value: None
  misc_feature: MA Experiment 20001560 PARAMETER Experiment Name: At_Drought_Soil_Dry_P Parameter: Post-Treatment Value: None
  misc_feature: MA Experiment 20001560 PARAMETER Experiment Name: At_Drought_Soil_Dry_P Parameter: Timepoint (day) Value: 14
  misc_feature: MA Experiment 20001560 PARAMETER Experiment Name: At_Drought_Soil_Dry_P Parameter: Treatment Value: Drought vs. No Drought
  misc_feature: MA Experiment ID: 20001757 Result: Up-regulated in Transcription
  misc_feature: MA Experiment 20001757 PARAMETER Experiment Name: At_50mM_NH4NO3_L-to-H_P Parameter: Timepoint (hr) Value: 6
  misc_feature: MA Experiment 20001757 PARAMETER Experiment Name: At_50mM_NH4NO3_L-to-H_P Parameter: Tissue Value: Leaf
  misc_feature: MA Experiment 20001757 PARAMETER Experiment Name: At_50mM_NH4NO3_L-to-H_P Parameter: Treatment Value: 50mM NH4NO3 vs 100mM Mannitol
gaagaagaagaagaagaagatggtgtctgggtcagggatatgcgcgaagcgcgttgtcgtcgacgggcgacaccacatgcttggtcgtctagcttccaacactgcgaaggagttacttaacggacaggaagtggttgttgtccgatgtgaagagatttgtctctcgggaggtttggttcgacaaaagatgaagtacatgagattccttaggaaacgtatgaacactaagccttctcatggtcctattcactttcgtgctccttccaagatcttctggcgcactgttcgcgggatgattccacacaagaccaagcgtggtgctgctgcacttgctcgcttgaaggtttttgagggaatcccacctccttacgacaagattaagagaatggttattcctgatgctcttaaggttttgagacttcagagtggtcacaagtactgcttattgggacgtttatcttctgaggttggctggaaccattatgataccattaaagaacttgagacaaagagaaaggaaagatcacaagtgatgtatgagcgtaagaagcaactcaacaagctcaggaccaaggcagagaaggttgcggaagagaggctcggatcacagctagatgttcttgccccggtcaagtattgaagaaaaccgacgtctatcacctcagagttttacacccgtttggttgaagcttgttttgattttgattttgcatctgaaatttggttttgttagtgtcaaagtgagaattctctcttctcatttactcattgttctgctatatacaacttatgttggttattatttcaatcaaaacaattttatt

SEQ ID NO: 43916 - protein, 212 aa, Arabidopsis thaliana
  peptide (1)..(212): Ceres Seq. ID no. 12559169
  misc_feature (17)..(133): Pfam Name: Ribosomal protein L13 Pfam Description: Ribosomal protein L13
  misc_feature (7)..(165): Homolog of NCBI NO: 34899414 NR Description: putative 60S ribosomal protein
  misc_feature (7)..(212): Homolog of NCBI NO: 33146452 NR Description: putative 60S ribosomal protein
  misc_feature (7)..(212): Homolog of NCBI NO: 37718812 NR Description: putative ribosomal protein L13a
  misc_feature (7)..(212): Homolog of NCBI NO: 21326116 NR Description: putative 60S ribosomal protein [Sorghum bicolor]
  misc_feature (7)..(212): Homolog of NCBI NO: 3914535 NR Description: 60S RIBOSOMAL PROTEIN L13A
  misc_feature (7)..(212): Homolog of NCBI NO: 15231394 NR Description: putative 60S ribosomal protein L13A
  misc_feature (7)..(212): Homolog of NCBI NO: 19423912 NR Description: putative 60S ribosomal protein [Arabidopsis
  misc_feature (7)..(212): Homolog of NCBI NO: 15230197 NR Description: 60S ribosomal protein, putative
  misc_feature (7)..(212): Homolog of NCBI NO: 15239698 NR Description: 60S ribosomal protein L13a
  misc_feature (7)..(212): Homolog of NCBI NO: 15235617 NR Description: ribosomal protein L13a like protein
KKKKKKMVSGSGICAKRVVVDGRHHMLGRLASNTAKELLNGQEVVVVRCEEICLSGGLVRQKMKYMRFLRKRMNTKPSHGPIHFRAPSKIFWRTVRGMIPHKTKRGAAALARLKVFEGIPPPYDKIKRMVIPDALKVLRLQSGHKYCLLGRLSSEVGWNHYDTIKELETKRKERSQVMYERKKQLNKLRTKAEKVAEERLGSQLDVLAPVKY

SEQ ID NO: 43917 - protein, 206 aa, Arabidopsis thaliana
  peptide (1)..(206): Ceres Seq. ID no. 12559170
  misc_feature (11)..(127): Pfam Name: Ribosomal protein L13 Pfam Description: Ribosomal protein L13
  misc_feature (1)..(159): Homolog of NCBI NO: 34899414 NR Description: putative 60S ribosomal protein
  misc_feature (1)..(206): Homolog of NCBI NO: 33146452 NR Description: putative 60S ribosomal protein
  misc_feature (1)..(206): Homolog of NCBI NO: 37718812 NR Description: putative ribosomal protein L13a
  misc_feature (1)..(206): Homolog of NCBI NO: 21326116 NR Description: putative 60S ribosomal protein [Sorghum bicolor]
  misc_feature (1)..(206): Homolog of NCBI NO: 3914535 NR Description: 60S RIBOSOMAL PROTEIN L13A
  misc_feature (1)..(206): Homolog of NCBI NO: 15231394 NR Description: putative 60S ribosomal protein L13A
  misc_feature (1)..(206): Homolog of NCBI NO: 19423912 NR Description: putative 60S ribosomal protein [Arabidopsis
  misc_feature (1)..(206): Homolog of NCBI NO: 15230197 NR Description: 60S ribosomal protein, putative
  misc_feature (1)..(206): Homolog of NCBI NO: 15239698 NR Description: 60S ribosomal protein L13a
  misc_feature (1)..(206): Homolog of NCBI NO: 15235617 NR Description: ribosomal protein L13a like protein
MVSGSGICAKRVVVDGRHHMLGRLASNTAKELLNGQEVVVVRCEEICLSGGLVRQKMKYMRFLRKRMNTKPSHGPIHFRAPSKIFWRTVRGMIPHKTKRGAAALARLKVFEGIPPPYDKIKRMVIPDALKVLRLQSGHKYCLLGRLSSEVGWNHYDTIKELETKRKERSQVMYERKKQLNKLRTKAEKVAEERLGSQLDVLAPVKY

SEQ ID NO: 43918 - protein, 187 aa, Arabidopsis thaliana
  peptide (1)..(187): Ceres Seq. ID no. 12559171
  misc_feature (1)..(108): Pfam Name: Ribosomal protein L13 Pfam Description: Ribosomal protein L13
  misc_feature (1)..(140): Homolog of NCBI NO: 34899414 NR Description: putative 60S ribosomal protein
  misc_feature (1)..(187): Homolog of NCBI NO: 33146452 NR Description: putative 60S ribosomal protein
  misc_feature (1)..(187): Homolog of NCBI NO: 37718812 NR Description: putative ribosomal protein L13a
  misc_feature (1)..(187): Homolog of NCBI NO: 21326116 NR Description: putative 60S ribosomal protein [Sorghum bicolor]
  misc_feature (1)..(187): Homolog of NCBI NO: 3914535 NR Description: 60S RIBOSOMAL PROTEIN L13A
  misc_feature (1)..(187): Homolog of NCBI NO: 15231394 NR Description: putative 60S ribosomal protein L13A
  misc_feature (1)..(187): Homolog of NCBI NO: 19423912 NR Description: putative 60S ribosomal protein [Arabidopsis
  misc_feature (1)..(187): Homolog of NCBI NO: 15230197 NR Description: 60S ribosomal protein, putative
  misc_feature (1)..(187): Homolog of NCBI NO: 15239698 NR Description: 60S ribosomal protein L13a
  misc_feature (1)..(187): Homolog of NCBI NO: 15235617 NR Description: ribosomal protein L13a like protein
MLGRLASNTAKELLNGQEVVVVRCEEICLSGGLVRQKMKYMRFLRKRMNTKPSHGPIHFRAPSKIFWRTVRGMIPHKTKRGAAALARLKVFEGIPPPYDKIKRMVIPDALKVLRLQSGHKYCLLGRLSSEVGWNHYDTIKELETKRKERSQVMYERKKQLNKLRTKAEKVAEERLGSQLDVLAPVKY

SEQ ID NO: 43919 - DNA, 583 bp, Arabidopsis thaliana
  misc_feature (1)..(583): Ceres Seq. ID no. 4802563
  misc_feature: MA Experiment ID: 108434 Result: Down-regulated in Transcription
  misc_feature: MA Experiment 108434 PARAMETER Experiment Name: At_Root_Tips_cDNA_P Parameter: Tissue Value: Root Tips
  misc_feature: MA Experiment ID: 108435 Result: Down-regulated in Transcription
  misc_feature: MA Experiment 108435 PARAMETER Experiment Name: At_stm_Mutants_cDNA_P Parameter: Plant Line Value: wt Landsburg vs stm
  misc_feature: MA Experiment 108435 PARAMETER Experiment Name: At_stm_Mutants_cDNA_P Parameter: Tissue Value: Shoot Apical Meristem Region
  misc_feature: MA Experiment ID: 108461 Result: Up-regulated in Transcription
  misc_feature: MA Experiment 108461 PARAMETER Experiment Name: At_Germinating_Seeds_cDNA_P Parameter: Age (day) Value: 1 vs. 0
  misc_feature: MA Experiment 108461 PARAMETER Experiment Name: At_Germinating_Seeds_cDNA_P Parameter: Tissue Value: Germinating Seeds
  misc_feature: MA Experiment ID: 108462 Result: Up-regulated in Transcription
  misc_feature: MA Experiment 108462 PARAMETER Experiment Name: At_Germinating_Seeds_cDNA_P Parameter: Age (day) Value: 2 vs. 0
  misc_feature: MA Experiment 108462 PARAMETER Experiment Name: At_Germinating_Seeds_cDNA_P Parameter: Tissue Value: Germinating Seeds
  misc_feature: MA Experiment ID: 108464 Result: Up-regulated in Transcription
  misc_feature: MA Experiment 108464 PARAMETER Experiment Name: At_Germinating_Seeds_cDNA_P Parameter: Age (day) Value: 4 vs. 0
  misc_feature: MA Experiment 108464 PARAMETER Experiment Name: At_Germinating_Seeds_cDNA_P Parameter: Tissue Value: Germinating Seeds
  misc_feature: MA Experiment ID: 108488 Result: Up-regulated in Transcription
  misc_feature: MA Experiment ID: 20000180 Result: Up-regulated in Transcription
  misc_feature: MA Experiment 20000180 PARAMETER Experiment Name: At_Germinating_Seeds_P Parameter: Age (hr) Value: 24 vs. 0
  misc_feature: MA Experiment 20000180 PARAMETER Experiment Name: At_Germinating_Seeds_P Parameter: Tissue Value: Germinating Seeds
  misc_feature: MA Experiment ID: 20000185 Result: Down-regulated in Transcription
  misc_feature: MA Experiment 20000185 PARAMETER Experiment Name: At_Roots__P Parameter: Age (day) Value: 7 vs. 21
  misc_feature: MA Experiment 20000185 PARAMETER Experiment Name: At_Roots__P Parameter: Organism Value: A. thaliana
  misc_feature: MA Experiment 20000185 PARAMETER Experiment Name: At_Roots__P Parameter: Tissue Value: Roots vs. Whole Plant
  misc_feature: MA Experiment ID: 20000264 Result: Down-regulated in Transcription
  misc_feature: MA Experiment 20000264 PARAMETER Experiment Name: At_Open_Flower_P Parameter: Age (day) Value: 21
  misc_feature: MA Experiment 20000264 PARAMETER Experiment Name: At_Open_Flower_P Parameter: Plant Line Value: WS
  misc_feature: MA Experiment 20000264 PARAMETER Experiment Name: At_Open_Flower_P Parameter: Tissue Value: Open Flower vs. Whole Plant
  misc_feature: MA Experiment ID: 20000265 Result: Down-regulated in Transcription
  misc_feature: MA Experiment 20000265 PARAMETER Experiment Name: At_Open_Flower_P Parameter: Age (day) Value: 21
  misc_feature: MA Experiment 20000265 PARAMETER Experiment Name: At_Open_Flower_P Parameter: Plant Line Value: WS
  misc_feature: MA Experiment 20000265 PARAMETER Experiment Name: At_Open_Flower_P Parameter: Tissue Value: Closed Flower vs. Whole Plant
  misc_feature: MA Experiment ID: 20000286 Result: Down-regulated in Transcription
  misc_feature: MA Experiment 20000286 PARAMETER Experiment Name: At_Open_Flower_P Parameter: Age (day) Value: 21
  misc_feature: MA Experiment 20000286 PARAMETER Experiment Name: At_Open_Flower_P Parameter: Plant Line Value: WS
  misc_feature: MA Experiment 20000286 PARAMETER Experiment Name: At_Open_Flower_P Parameter: Tissue Value: Half Open vs. Whole Plant
  misc_feature: MA Experiment ID: 20000437 Result: Down-regulated in Transcription
  misc_feature: MA Experiment 20000437 PARAMETER Experiment Name: At_Drought_P Parameter: Age (day) Value: 8
  misc_feature: MA Experiment 20000437 PARAMETER Experiment Name: At_Drought_P Parameter: Organism Value: A. thaliana
  misc_feature: MA Experiment 20000437 PARAMETER Experiment Name: At_Drought_P Parameter: Plant Line Value: WS
  misc_feature: MA Experiment 20000437 PARAMETER Experiment Name: At_Drought_P Parameter: Timepoint (hr) Value: 24
  misc_feature: MA Experiment 20000437 PARAMETER Experiment Name: At_Drought_P Parameter: Tissue Value: Whole Plant
  misc_feature: MA Experiment 20000437 PARAMETER Experiment Name: At_Drought_P Parameter: Treatment Value: Drought vs. No Drought
  misc_feature: MA Experiment ID: 20000438 Result: Up-regulated in Transcription
  misc_feature: MA Experiment 20000438 PARAMETER Experiment Name: At_Shoots__P Parameter: Age (day) Value: 14
  misc_feature: MA Experiment 20000438 PARAMETER Experiment Name: At_Shoots__P Parameter: Tissue Value: Shoots vs. Whole Plant
  misc_feature: MA Experiment ID: 20000439 Result: Down-regulated in Transcription
  misc_feature: MA Experiment 20000439 PARAMETER Experiment Name: At_Roots__P Parameter: Age (day) Value: 14 vs. 21
  misc_feature: MA Experiment 20000439 PARAMETER Experiment Name: At_Roots__P Parameter: Organism Value: A. thaliana
  misc_feature: MA Experiment 20000439 PARAMETER Experiment Name: At_Roots__P Parameter: Tissue Value: Roots vs. Whole Plant
  misc_feature: MA Experiment ID: 20000794 Result: Down-regulated in Transcription
  misc_feature: MA Experiment 20000794 PARAMETER Experiment Name: At_Petals_P Parameter: Age (day) Value: 23-25 days
  misc_feature: MA Experiment 20000794 PARAMETER Experiment Name: At_Petals_P Parameter: Plant Line Value: WS
  misc_feature: MA Experiment 20000794 PARAMETER Experiment Name: At_Petals_P Parameter: Tissue Value: Petals vs. Whole plant
  misc_feature: MA Experiment ID: 20001557 Result: Down-regulated in Transcription
  misc_feature: MA Experiment 20001557 PARAMETER Experiment Name: At_Drought_Soil_Dry_P Parameter: Age (day) Value: 27
  misc_feature: MA Experiment 20001557 PARAMETER Experiment Name: At_Drought_Soil_Dry_P Parameter: Organism Value: A. thaliana
  misc_feature: MA Experiment 20001557 PARAMETER Experiment Name: At_Drought_Soil_Dry_P Parameter: Plant Line Value: WS
  misc_feature: MA Experiment 20001557 PARAMETER Experiment Name: At_Drought_Soil_Dry_P Parameter: Post Timepoint (hr) Value: 3
  misc_feature: MA Experiment 20001557 PARAMETER Experiment Name: At_Drought_Soil_Dry_P Parameter: Post-Treatment Value: Re-Water vs. No Drought
  misc_feature: MA Experiment 20001557 PARAMETER Experiment Name: At_Drought_Soil_Dry_P Parameter: Timepoint (day) Value: 13
  misc_feature: MA Experiment 20001557 PARAMETER Experiment Name: At_Drought_Soil_Dry_P Parameter: Treatment Value: Drought vs. No Drought
  misc_feature: MA Experiment ID: 20001558 Result: Down-regulated in Transcription
  misc_feature: MA Experiment 20001558 PARAMETER Experiment Name: At_Drought_Soil_Dry_P Parameter: Age (day) Value: 27
  misc_feature: MA Experiment 20001558 PARAMETER Experiment Name: At_Drought_Soil_Dry_P Parameter: Organism Value: A. thaliana
  misc_feature: MA Experiment 20001558 PARAMETER Experiment Name: At_Drought_Soil_Dry_P Parameter: Plant Line Value: WS
  misc_feature: MA Experiment 20001558 PARAMETER Experiment Name: At_Drought_Soil_Dry_P Parameter: Post Timepoint (hr) Value: 6
  misc_feature: MA Experiment 20001558 PARAMETER Experiment Name: At_Drought_Soil_Dry_P Parameter: Post-Treatment Value: Re-Water vs. No Drought
  misc_feature: MA Experiment 20001558 PARAMETER Experiment Name: At_Drought_Soil_Dry_P Parameter: Timepoint (day) Value: 13
  misc_feature: MA Experiment 20001558 PARAMETER Experiment Name: At_Drought_Soil_Dry_P Parameter: Treatment Value: Drought vs. No Drought
  misc_feature: MA Experiment ID: 20001757 Result: Up-regulated in Transcription
  misc_feature: MA Experiment 20001757 PARAMETER Experiment Name: At_50mM_NH4NO3_L-to-H_P Parameter: Timepoint (hr) Value: 6
  misc_feature: MA Experiment 20001757 PARAMETER Experiment Name: At_50mM_NH4NO3_L-to-H_P Parameter: Tissue Value: Leaf
  misc_feature: MA Experiment 20001757 PARAMETER Experiment Name: At_50mM_NH4NO3_L-to-H_P Parameter: Treatment Value: 50mM NH4NO3 vs 100mM Mannitol
  misc_feature: MA Experiment ID: 20001904 Result: Down-regulated in Transcription
  misc_feature: MA Experiment 20001904 PARAMETER Experiment Name: At_Drought_Reproduction_P Parameter: Age (day) Value: 37
  misc_feature: MA Experiment 20001904 PARAMETER Experiment Name: At_Drought_Reproduction_P Parameter: Organism Value: A. thaliana
  misc_feature: MA Experiment 20001904 PARAMETER Experiment Name: At_Drought_Reproduction_P Parameter: Plant Line Value: WS
  misc_feature: MA Experiment 20001904 PARAMETER Experiment Name: At_Drought_Reproduction_P Parameter: Timepoint (day) Value: 7
  misc_feature: MA Experiment 20001904 PARAMETER Experiment Name: At_Drought_Reproduction_P Parameter: Tissue Value: Rosettes
  misc_feature: MA Experiment 20001904 PARAMETER Experiment Name: At_Drought_Reproduction_P Parameter: Treatment Value: Drought vs. No Drought
  misc_feature: MA Experiment ID: 20001905 Result: Down-regulated in Transcription
  misc_feature: MA Experiment 20001905 PARAMETER Experiment Name: At_Drought_Reproduction_P Parameter: Age (day) Value: 40
  misc_feature: MA Experiment 20001905 PARAMETER Experiment Name: At_Drought_Reproduction_P Parameter: Organism Value: A. thaliana
  misc_feature: MA Experiment 20001905 PARAMETER Experiment Name: At_Drought_Reproduction_P Parameter: Plant Line Value: WS
  misc_feature: MA Experiment 20001905 PARAMETER Experiment Name: At_Drought_Reproduction_P Parameter: Timepoint (day) Value: 10
  misc_feature: MA Experiment 20001905 PARAMETER Experiment Name: At_Drought_Reproduction_P Parameter: Tissue Value: Rosettes
  misc_feature: MA Experiment 20001905 PARAMETER Experiment Name: At_Drought_Reproduction_P Parameter: Treatment Value: Drought vs. No Drought
  misc_feature: MA Experiment ID: 20001908 Result: Down-regulated in Transcription
  misc_feature: MA Experiment 20001908 PARAMETER Experiment Name: At_Drought_Reproduction_P Parameter: Age (day) Value: 40
  misc_feature: MA Experiment 20001908 PARAMETER Experiment Name: At_Drought_Reproduction_P Parameter: Organism Value: A. thaliana
  misc_feature: MA Experiment 20001908 PARAMETER Experiment Name: At_Drought_Reproduction_P Parameter: Plant Line Value: WS
  misc_feature: MA Experiment 20001908 PARAMETER Experiment Name: At_Drought_Reproduction_P Parameter: Timepoint (day) Value: 10
  misc_feature: MA Experiment 20001908 PARAMETER Experiment Name: At_Drought_Reproduction_P Parameter: Tissue Value: Siliques
  misc_feature: MA Experiment 20001908 PARAMETER Experiment Name: At_Drought_Reproduction_P Parameter: Treatment Value: Drought vs. No Drought
actctttcgtgtcgcaataacaataagaaagaaagaaaaagaaaaccagagatggcgatgacgacagcatctacggtatttgttctaccggccaatgtcacctcggtcgccggcgcttcgtcgtccaggagctccgtgtctttcttgccgatgagaaacgccggttctaggctcgtagtcagggcagccgaagatcctgctccggcttcctcttcttcaaaagattctccggcagctgccgctgctccggatggagctactgccaccaaacccaagccaccaccgattggtcctaagagagggtctaaggtcaagattctaaggagagaatcctattggttcaagaacgttggatcagttgttgccgttgatcaggaccctaagactcgatacccggttgtggtccggttcgcaaaagtcaattacgccaacatatcgaccaacaactatgcattggatgaggtcgaagaagttgcagcttaaatgggagaattcaaaaactctgtgtattctataccggttatccgttggaacttgcccaaaccgatgtacccnaaaagttacaatattctctattgatttg

SEQ ID NO: 43920 - protein, 160 aa, Arabidopsis thaliana
  peptide (1)..(160): Ceres Seq. ID no. 4802564
  misc_feature (98)..(159): Pfam Name: Photosystem I reaction centre subunit IV / PsaE Pfam Description: Photosystem I reaction centre subunit IV / PsaE
  misc_feature (33)..(159): Homolog of NCBI NO: 131178 NR Description: Photosystem I reaction center subunit IV,
  misc_feature (20)..(158): Homolog of NCBI NO: 26986114 NR Description: putative photosystem I reaction centre subunit IV
  misc_feature (21)..(158): Homolog of NCBI NO: 2499966 NR Description: Photosystem I reaction center subunit IV A,
  misc_feature (20)..(160): Homolog of NCBI NO: 131176 NR Description: Photosystem I reaction center subunit IV,
  misc_feature (20)..(158): Homolog of NCBI NO: 21555308 NR Description: Photosystem I reaction center subunit IV B,
  misc_feature (18)..(158): Homolog of NCBI NO: 15225331 NR Description: putative photosystem I reaction center subunit IV
  misc_feature (51)..(160): Homolog of NCBI NO: 11692884 NR Description: AT4g28750 [Arabidopsis thaliana]
  misc_feature (46)..(160): Homolog of NCBI NO: 22091414 NR Description: putative photosystem I subunit PSI-E [Arabidopsis
  misc_feature (20)..(160): Homolog of NCBI NO: 24030202 NR Description: putative photosystem I subunit PSI-E protein
  misc_feature (18)..(160): Homolog of NCBI NO: 30688100 NR Description: photosystem I subunit PSI-E - like protein
TLSCRNNNKKERKRKPEMAMTTASTVFVLPANVTSVAGASSSRSSVSFLPMRNAGSRLVVRAAEDPAPASSSSKDSPAAAAAPDGATATKPKPPPIGPKRGSKVKILRRESYWFKNVGSVVAVDQDPKTRYPVVVRFAKVNYANISTNNYALDEVEEVAA

SEQ ID NO: 43921 - protein, 143 aa, Arabidopsis thaliana; identical to SEQ ID NO: 43773
  peptide (1)..(143): Ceres Seq. ID no. 4802565
  misc_feature (81)..(142): Pfam Name: Photosystem I reaction centre subunit IV / PsaE Pfam Description: Photosystem I reaction centre subunit IV / PsaE
  misc_feature (16)..(142): Homolog of NCBI NO: 131178 NR Description: Photosystem I reaction center subunit IV,
  misc_feature (3)..(141): Homolog of NCBI NO: 26986114 NR Description: putative photosystem I reaction centre subunit IV
  misc_feature (4)..(141): Homolog of NCBI NO: 2499966 NR Description: Photosystem I reaction center subunit IV A,
  misc_feature (3)..(143): Homolog of NCBI NO: 131176 NR Description: Photosystem I reaction center subunit IV,
  misc_feature (3)..(141): Homolog of NCBI NO: 21555308 NR Description: Photosystem I reaction center subunit IV B,
  misc_feature (1)..(141): Homolog of NCBI NO: 15225331 NR Description: putative photosystem I reaction center subunit IV
  misc_feature (34)..(143): Homolog of NCBI NO: 11692884 NR Description: AT4g28750 [Arabidopsis thaliana]
  misc_feature (29)..(143): Homolog of NCBI NO: 22091414 NR Description: putative photosystem I subunit PSI-E [Arabidopsis
  misc_feature (3)..(143): Homolog of NCBI NO: 24030202 NR Description: putative photosystem I subunit PSI-E protein
  misc_feature (1)..(143): Homolog of NCBI NO: 30688100 NR Description: photosystem I subunit PSI-E - like protein

SEQ ID NO: 43922 - protein, 141 aa, Arabidopsis thaliana; identical to SEQ ID NO: 43774
  peptide (1)..(141): Ceres Seq. ID no. 4802566
  misc_feature (79)..(140): Pfam Name: Photosystem I reaction centre subunit IV / PsaE Pfam Description: Photosystem I reaction centre subunit IV / PsaE
  misc_feature (14)..(140): Homolog of NCBI NO: 131178 NR Description: Photosystem I reaction center subunit IV,
  misc_feature (1)..(139): Homolog of NCBI NO: 26986114 NR Description: putative photosystem I reaction centre subunit IV
  misc_feature (2)..(139): Homolog of NCBI NO: 2499966 NR Description: Photosystem I reaction center subunit IV A,
  misc_feature (1)..(141): Homolog of NCBI NO: 131176 NR Description: Photosystem I reaction center subunit IV,
  misc_feature (1)..(139): Homolog of NCBI NO: 21555308 NR Description: Photosystem I reaction center subunit IV B,
  misc_feature (1)..(139): Homolog of NCBI NO: 15225331 NR Description: putative photosystem I reaction center subunit IV
  misc_feature (32)..(141): Homolog of NCBI NO: 11692884 NR Description: AT4g28750 [Arabidopsis thaliana]
  misc_feature (27)..(141): Homolog of NCBI NO: 22091414 NR Description: putative photosystem I subunit PSI-E [Arabidopsis
  misc_feature (1)..(141): Homolog of NCBI NO: 24030202 NR Description: putative photosystem I subunit PSI-E protein
  misc_feature (1)..(141): Homolog of NCBI NO: 30688100 NR Description: photosystem I subunit PSI-E - like protein

SEQ ID NO: 43923 - DNA, 1094 bp, Arabidopsis thaliana
  misc_feature (1)..(1094): Ceres Seq. ID no. 13614578
  misc_feature: MA Experiment ID: 20000184 Result: Down-regulated in Transcription
  misc_feature: MA Experiment 20000184 PARAMETER Experiment Name: At_Shoots__P Parameter: Age (day) Value: 7
  misc_feature: MA Experiment 20000184 PARAMETER Experiment Name: At_Shoots__P Parameter: Tissue Value: Shoots vs. Whole Plant
  misc_feature: MA Experiment ID: 20000224 Result: Down-regulated in Transcription
  misc_feature: MA Experiment ID: 20000437 Result: Up-regulated in Transcription
  misc_feature: MA Experiment 20000437 PARAMETER Experiment Name: At_Drought_P Parameter: Age (day) Value: 8
  misc_feature: MA Experiment 20000437 PARAMETER Experiment Name: At_Drought_P Parameter: Organism Value: A. thaliana
  misc_feature: MA Experiment 20000437 PARAMETER Experiment Name: At_Drought_P Parameter: Plant Line Value: WS
  misc_feature: MA Experiment 20000437 PARAMETER Experiment Name: At_Drought_P Parameter: Timepoint (hr) Value: 24
  misc_feature: MA Experiment 20000437 PARAMETER Experiment Name: At_Drought_P Parameter: Tissue Value: Whole Plant
  misc_feature: MA Experiment 20000437 PARAMETER Experiment Name: At_Drought_P Parameter: Treatment Value: Drought vs. No Drought
  misc_feature: MA Experiment ID: 20000794 Result: Up-regulated in Transcription
  misc_feature: MA Experiment 20000794 PARAMETER Experiment Name: At_Petals_P Parameter: Age (day) Value: 23-25 days
  misc_feature: MA Experiment 20000794 PARAMETER Experiment Name: At_Petals_P Parameter: Plant Line Value: WS
  misc_feature: MA Experiment 20000794 PARAMETER Experiment Name: At_Petals_P Parameter: Tissue Value: Petals vs. Whole plant
  misc_feature: MA Experiment ID: 20001911 Result: Up-regulated in Transcription
  misc_feature: MA Experiment 20001911 PARAMETER Experiment Name: At_Drought_Reproduction_P Parameter: Age (day) Value: 40
  misc_feature: MA Experiment 20001911 PARAMETER Experiment Name: At_Drought_Reproduction_P Parameter: Organism Value: A. thaliana
  misc_feature: MA Experiment 20001911 PARAMETER Experiment Name: At_Drought_Reproduction_P Parameter: Plant Line Value: WS
  misc_feature: MA Experiment 20001911 PARAMETER Experiment Name: At_Drought_Reproduction_P Parameter: Timepoint (day) Value: 10
  misc_feature: MA Experiment 20001911 PARAMETER Experiment Name: At_Drought_Reproduction_P Parameter: Tissue Value: Flowers
  misc_feature: MA Experiment 20001911 PARAMETER Experiment Name: At_Drought_Reproduction_P Parameter: Treatment Value: Drought vs. No Drought
atctatctacgcatcatcgatctcgaagtacgtttcggttttcaggccaatctctgaatctgcgtgacaaaagcaacaaattacatatctctctctctgcgcgacttcgaagatcaacatccatggcgtcacaggtaaggtcagtaaaagttggcaatctctcttcaggagcaactgagcatgatattaaagagtttttctctttctctggtgaagttgaaagcatcgatatccaaagtaacgagcatagtgcttatgtcacatttaaagaaactcaaggagcagagactgctgtgctcttatctggagcgagtattgccgatcaatcagtcatcattgagttggctcccaactacagtccaccagcagcccctcatgctgaaacacagagcagcggtgcagaatctgttgtccagaaggcagaagatgttgtgagcagcatgttagcaaagggtttcattcttgggaaagatgctgtcggcaaagcaaaagcttttgatgagaaacatggtttcacctcaaccgccaccgcaggagttgcttcactagaccaaaaaatcggtcttagccagaaacttacagctggaacaagcttggtgaacgaaaaaatcaaggcggtggaccaaaactttcaggtaacagagaggaccaagtctgtgtatgcagctgcggagcagactgtgagcagtgcaggaagcgctgtgatgaagaaccgttacgtgttaactggtgtgagctgggccgcaggagcattcaatagagtggctcaagcagctggagaggttggacagaaaacaaaagagaaggttgaagctgagcaaccatcgcaaccagcacagtcgcagcagcaactgccagaagggtattctccgattcattcgtccgaatactcgaagaactaatatcatcaagttaaacagtttcctttgtttctccttgttggtttctttgacatggaagttggaaatctggtttggtctttgggatgtaccatataagctatgcctggattttccctaccactattagactatagtttgggttttttccaatatacatatttaataagttgacatttaaatctttctttaccc

SEQ ID NO: 43924 - protein, 299 aa, Arabidopsis thaliana
  peptide (1)..(299): Ceres Seq. ID no. 13614579
  misc_feature (48)..(112): Pfam Name: RNA recognition motif. (a.k.a. RRM, RBD, or RNP domain) Pfam Description: RNA recognition motif. (a.k.a. RRM, RBD, or RNP
  misc_feature (44)..(297): Homolog of NCBI NO: 18071362 NR Description: putative splicing regulatory protein
  misc_feature (38)..(291): Homolog of NCBI NO: 34897896 NR Description: ESTs D15336(C0474),C98053(C0474) correspond to a of the predicted gene.~Similar to Arabidopsis thaliana DNA
  misc_feature (42)..(295): Homolog of NCBI NO: 38347069 NR Description: OSJNBa0006A01.10 [Oryza sativa (japonica
  misc_feature (47)..(298): Homolog of NCBI NO: 30695063 NR Description: RNA recognition motif (RRM)-containing protein
  misc_feature (47)..(298): Homolog of NCBI NO: 8809670 NR Description: gene_id:MSD23.5~pir||C71447~similar to unknown
  misc_feature (45)..(299): Homolog of NCBI NO: 38344181 NR Description: OSJNBa0053K19.20 [Oryza sativa (japonica
  misc_feature (47)..(298): Homolog of NCBI NO: 18414951 NR Description: RNA recognition motif (RRM)-containing protein
  misc_feature (41)..(299): Homolog of NCBI NO: 16648740 NR Description: AT5g16840/F5E19_180 [Arabidopsis thaliana]
  misc_feature (41)..(299): Homolog of NCBI NO: 21592997 NR Description: unknown [Arabidopsis thaliana]
  misc_feature (41)..(299): Homolog of NCBI NO: 15237419 NR Description: RNA recognition motif (RRM)-containing protein
LSTHHRSRSTFRFSGQSLNLRDKSNKLHISLSARLRRSTSMASQVRSVKVGNLSSGATEHDIKEFFSFSGEVESIDIQSNEHSAYVTFKETQGAETAVLLSGASIADQSVIIELAPNYSPPAAPHAETQSSGAESVVQKAEDVVSSMLAKGFILGKDAVGKAKAFDEKHGFTSTATAGVASLDQKIGLSQKLTAGTSLVNEKIKAVDQNFQVTERTKSVYAAAEQTVSSAGSAVMKNRYVLTGVSWAAGAFNRVAQAAGEVGQKTKEKVEAEQPSQPAQSQQQLPEGYSPIHSSEYSKN

SEQ ID NO: 43925 - protein, 259 aa, Arabidopsis thaliana
  peptide (1)..(259): Ceres Seq. ID no. 13614580
  misc_feature (8)..(72): Pfam Name: RNA recognition motif. (a.k.a. RRM, RBD, or RNP domain) Pfam Description: RNA recognition motif. (a.k.a. RRM, RBD, or RNP
  misc_feature (4)..(257): Homolog of NCBI NO: 18071362 NR Description: putative splicing regulatory protein
  misc_feature (1)..(251): Homolog of NCBI NO: 34897896 NR Description: ESTs D15336(C0474),C98053(C0474) correspond to a of the predicted gene.~Similar to Arabidopsis thaliana DNA
  misc_feature (2)..(255): Homolog of NCBI NO: 38347069 NR Description: OSJNBa0006A01.10 [Oryza sativa (japonica
  misc_feature (7)..(258): Homolog of NCBI NO: 30695063 NR Description: RNA recognition motif (RRM)-containing protein
  misc_feature (7)..(258): Homolog of NCBI NO: 8809670 NR Description: gene_id:MSD23.5~pir||C71447~similar to unknown
  misc_feature (5)..(259): Homolog of NCBI NO: 38344181 NR Description: OSJNBa0053K19.20 [Oryza sativa (japonica
  misc_feature (7)..(258): Homolog of NCBI NO: 18414951 NR Description: RNA recognition motif (RRM)-containing protein
  misc_feature (1)..(259): Homolog of NCBI NO: 16648740 NR Description: AT5g16840/F5E19_180 [Arabidopsis thaliana]
  misc_feature (1)..(259): Homolog of NCBI NO: 21592997 NR Description: unknown [Arabidopsis thaliana]
  misc_feature (1)..(259): Homolog of NCBI NO: 15237419 NR Description: RNA recognition motif (RRM)-containing protein
MASQVRSVKVGNLSSGATEHDIKEFFSFSGEVESIDIQSNEHSAYVTFKETQGAETAVLLSGASIADQSVIIELAPNYSPPAAPHAETQSSGAESVVQKAEDVVSSMLAKGFILGKDAVGKAKAFDEKHGFTSTATAGVASLDQKIGLSQKLTAGTSLVNEKIKAVDQNFQVTERTKSVYAAAEQTVSSAGSAVMKNRYVLTGVSWAAGAFNRVAQAAGEVGQKTKEKVEAEQPSQPAQSQQQLPEGYSPIHSSEYSKN

SEQ ID NO: 43926 - protein, 153 aa, Arabidopsis thaliana; identical to SEQ ID NO: 22947
  peptide (1)..(153): Ceres Seq. ID no. 13614581
  misc_feature (1)..(151): Homolog of NCBI NO: 18071362 NR Description: putative splicing regulatory protein
  misc_feature (1)..(145): Homolog of NCBI NO: 34897896 NR Description: ESTs D15336(C0474),C98053(C0474) correspond to a of the predicted gene.~Similar to Arabidopsis thaliana DNA
  misc_feature (1)..(149): Homolog of NCBI NO: 38347069 NR Description: OSJNBa0006A01.10 [Oryza sativa (japonica
  misc_feature (1)..(152): Homolog of NCBI NO: 30695063 NR Description: RNA recognition motif (RRM)-containing protein
  misc_feature (1)..(152): Homolog of NCBI NO: 8809670 NR Description: gene_id:MSD23.5~pir||C71447~similar to unknown
  misc_feature (1)..(153): Homolog of NCBI NO: 38344181 NR Description: OSJNBa0053K19.20 [Oryza sativa (japonica
  misc_feature (1)..(152): Homolog of NCBI NO: 18414951 NR Description: RNA recognition motif (RRM)-containing protein
  misc_feature (1)..(153): Homolog of NCBI NO: 16648740 NR Description: AT5g16840/F5E19_180 [Arabidopsis thaliana]
  misc_feature (1)..(153): Homolog of NCBI NO: 21592997 NR Description: unknown [Arabidopsis thaliana]
  misc_feature (1)..(153): Homolog of NCBI NO: 15237419 NR Description: RNA recognition motif (RRM)-containing protein

SEQ ID NO: 43927 - DNA, 551 bp, Arabidopsis thaliana
  misc_feature (1)..(551): Ceres Seq. ID no. 7108885
  misc_feature: MA Experiment ID: 108595 Result: Down-regulated in Transcription
  misc_feature: MA Experiment 108595 PARAMETER Experiment Name: At_Ler-pi_Ovule_cDNA_P Parameter: Plant Line Value: null
  misc_feature: MA Experiment ID: 20000180 Result: Up-regulated in Transcription
  misc_feature: MA Experiment 20000180 PARAMETER Experiment Name: At_Germinating_Seeds_P Parameter: Age (hr) Value: 24 vs. 0
  misc_feature: MA Experiment 20000180 PARAMETER Experiment Name: At_Germinating_Seeds_P Parameter: Tissue Value: Germinating Seeds
  misc_feature: MA Experiment ID: 20000185 Result: Down-regulated in Transcription
  misc_feature: MA Experiment 20000185 PARAMETER Experiment Name: At_Roots__P Parameter: Age (day) Value: 7 vs. 21
  misc_feature: MA Experiment 20000185 PARAMETER Experiment Name: At_Roots__P Parameter: Organism Value: A. thaliana
  misc_feature: MA Experiment 20000185 PARAMETER Experiment Name: At_Roots__P Parameter: Tissue Value: Roots vs. Whole Plant
  misc_feature: MA Experiment ID: 20000227 Result: Down-regulated in Transcription
  misc_feature: MA Experiment 20000227 PARAMETER Experiment Name: At_Root-Tips-vs-Tops_P Parameter: Tissue Value: Root Tips vs. Root Tops
  misc_feature: MA Experiment ID: 20000264 Result: Down-regulated in Transcription
  misc_feature: MA Experiment 20000264 PARAMETER Experiment Name: At_Open_Flower_P Parameter: Age (day) Value: 21
  misc_feature: MA Experiment 20000264 PARAMETER Experiment Name: At_Open_Flower_P Parameter: Plant Line Value: WS
  misc_feature: MA Experiment 20000264 PARAMETER Experiment Name: At_Open_Flower_P Parameter: Tissue Value: Open Flower vs. Whole Plant
  misc_feature: MA Experiment ID: 20000286 Result: Down-regulated in Transcription
  misc_feature: MA Experiment 20000286 PARAMETER Experiment Name: At_Open_Flower_P Parameter: Age (day) Value: 21
  misc_feature: MA Experiment 20000286 PARAMETER Experiment Name: At_Open_Flower_P Parameter: Plant Line Value: WS
  misc_feature: MA Experiment 20000286 PARAMETER Experiment Name: At_Open_Flower_P Parameter: Tissue Value: Half Open vs. Whole Plant
  misc_feature: MA Experiment ID: 20000439 Result: Down-regulated in Transcription
  misc_feature: MA Experiment 20000439 PARAMETER Experiment Name: At_Roots__P Parameter: Age (day) Value: 14 vs. 21
  misc_feature: MA Experiment 20000439 PARAMETER Experiment Name: At_Roots__P Parameter: Organism Value: A. thaliana
  misc_feature: MA Experiment 20000439 PARAMETER Experiment Name: At_Roots__P Parameter: Tissue Value: Roots vs. Whole Plant
  misc_feature: MA Experiment ID: 20000794 Result: Down-regulated in Transcription
  misc_feature: MA Experiment 20000794 PARAMETER Experiment Name: At_Petals_P Parameter: Age (day) Value: 23-25 days
  misc_feature: MA Experiment 20000794 PARAMETER Experiment Name: At_Petals_P Parameter: Plant Line Value: WS
  misc_feature: MA Experiment 20000794 PARAMETER Experiment Name: At_Petals_P Parameter: Tissue Value: Petals vs. Whole plant
  misc_feature: MA Experiment ID: 20001557 Result: Down-regulated in Transcription
  misc_feature: MA Experiment 20001557 PARAMETER Experiment Name: At_Drought_Soil_Dry_P Parameter: Age (day) Value: 27
  misc_feature: MA Experiment 20001557 PARAMETER Experiment Name: At_Drought_Soil_Dry_P Parameter: Organism Value: A. thaliana
  misc_feature: MA Experiment 20001557 PARAMETER Experiment Name: At_Drought_Soil_Dry_P Parameter: Plant Line Value: WS
  misc_feature: MA Experiment 20001557 PARAMETER Experiment Name: At_Drought_Soil_Dry_P Parameter: Post Timepoint (hr) Value: 3
  misc_feature: MA Experiment 20001557 PARAMETER Experiment Name: At_Drought_Soil_Dry_P Parameter: Post-Treatment Value: Re-Water vs. No Drought
  misc_feature: MA Experiment 20001557 PARAMETER Experiment Name: At_Drought_Soil_Dry_P Parameter: Timepoint (day) Value: 13
  misc_feature: MA Experiment 20001557 PARAMETER Experiment Name: At_Drought_Soil_Dry_P Parameter: Treatment Value: Drought vs. No Drought
  misc_feature: MA Experiment ID: 20001757 Result: Up-regulated in Transcription
  misc_feature: MA Experiment 20001757 PARAMETER Experiment Name: At_50mM_NH4NO3_L-to-H_P Parameter: Timepoint (hr) Value: 6
  misc_feature: MA Experiment 20001757 PARAMETER Experiment Name: At_50mM_NH4NO3_L-to-H_P Parameter: Tissue Value: Leaf
  misc_feature: MA Experiment 20001757 PARAMETER Experiment Name: At_50mM_NH4NO3_L-to-H_P Parameter: Treatment Value: 50mM NH4NO3 vs 100mM Mannitol
  misc_feature: MA Experiment ID: 20001908 Result: Down-regulated in Transcription
  misc_feature: MA Experiment 20001908 PARAMETER Experiment Name: At_Drought_Reproduction_P Parameter: Age (day) Value: 40
  misc_feature: MA Experiment 20001908 PARAMETER Experiment Name: At_Drought_Reproduction_P Parameter: Organism Value: A. thaliana
  misc_feature: MA Experiment 20001908 PARAMETER Experiment Name: At_Drought_Reproduction_P Parameter: Plant Line Value: WS
  misc_feature: MA Experiment 20001908 PARAMETER Experiment Name: At_Drought_Reproduction_P Parameter: Timepoint (day) Value: 10
  misc_feature: MA Experiment 20001908 PARAMETER Experiment Name: At_Drought_Reproduction_P Parameter: Tissue Value: Siliques
  misc_feature: MA Experiment 20001908 PARAMETER Experiment Name: At_Drought_Reproduction_P Parameter: Treatment Value: Drought vs. No Drought
aaaaaaaataaaggagatcagtttgggagaaagcagcaaagaagaaaaatggcagcaacatttgcaacaccatcgacggtgataggcctcggaggatcatccatcaccaccaaacccttctcttcatcctttttaaaaccaacattaagcgccaagaaccctttgagactcgccggtgcatcgggaggaagagtcacttgctttgagaggaactggttgaggagagatttgaacgtggtaggatttgggctgatcggatggctagctccgtcgagcattccagcgataaatgggaagagcctgacgggtctcttcttcgatagcatcggaactgagctcgctcacttcccgactcctccagctctcacttcacagttcttggttgtggttggttacgtggcacttaggcctcttcctctgcctcactttcggacaaatcggattcaagggcaggactgaggatacttctaagatactattcttggtttccgttggactatatgctctctcttggtattgggaatatatcaatcaaacaaactttctttgtt

SEQ ID NO: 43928 - protein, 152 aa, Arabidopsis thaliana
  peptide (1)..(152): Ceres Seq. ID no. 7108886
  misc_feature (25)..(152): Homolog of NCBI NO: 32479727 NR Description: OJ991214_12.3 [Oryza sativa (japonica
  misc_feature (22)..(126): Homolog of NCBI NO: 6996562 NR Description: putative 16kDa membrane protein [Nicotiana
  misc_feature (17)..(126): Homolog of NCBI NO: 22531014 NR Description: expressed protein [Arabidopsis thaliana]
  misc_feature (17)..(126): Homolog of NCBI NO: 18390888 NR Description: expressed protein
KKNKGDQFGRKQQRRKMAATFATPSTVIGLGGSSITTKPFSSSFLKPTLSAKNPLRLAGASGGRVTCFERNWLRRDLNVVGFGLIGWLAPSSIPAINGKSLTGLFFDSIGTELAHFPTPPALTSQFLVVVGYVALRPLPLPHFRTNRIQGQD

SEQ ID NO: 43929 - protein, 136 aa, Arabidopsis thaliana
  peptide (1)..(136): Ceres Seq. ID no. 7108887
  misc_feature (9)..(136): Homolog of NCBI NO: 32479727 NR Description: OJ991214_12.3 [Oryza sativa (japonica
  misc_feature (6)..(110): Homolog of NCBI NO: 6996562 NR Description: putative 16kDa membrane protein [Nicotiana
  misc_feature (1)..(110): Homolog of NCBI NO: 22531014 NR Description: expressed protein [Arabidopsis thaliana]
  misc_feature (1)..(110): Homolog of NCBI NO: 18390888 NR Description: expressed protein
MAATFATPSTVIGLGGSSITTKPFSSSFLKPTLSAKNPLRLAGASGGRVTCFERNWLRRDLNVVGFGLIGWLAPSSIPAINGKSLTGLFFDSIGTELAHFPTPPALTSQFLVVVGYVALRPLPLPHFRTNRIQGQD

SEQ ID NO: 43930 - DNA, 573 bp, Arabidopsis thaliana
  misc_feature (1)..(573): Ceres Seq. ID no. 6428453
  misc_feature: MA Experiment ID: 108434 Result: Down-regulated in Transcription
  misc_feature: MA Experiment 108434 PARAMETER Experiment Name: At_Root_Tips_cDNA_P Parameter: Tissue Value: Root Tips
  misc_feature: MA Experiment ID: 108435 Result: Down-regulated in Transcription
  misc_feature: MA Experiment 108435 PARAMETER Experiment Name: At_stm_Mutants_cDNA_P Parameter: Plant Line Value: wt Landsburg vs stm
  misc_feature: MA Experiment 108435 PARAMETER Experiment Name: At_stm_Mutants_cDNA_P Parameter: Tissue Value: Shoot Apical Meristem Region
  misc_feature: MA Experiment ID: 108462 Result: Up-regulated in Transcription
  misc_feature: MA Experiment 108462 PARAMETER Experiment Name: At_Germinating_Seeds_cDNA_P Parameter: Age (day) Value: 2 vs. 0
  misc_feature: MA Experiment 108462 PARAMETER Experiment Name: At_Germinating_Seeds_cDNA_P Parameter: Tissue Value: Germinating Seeds
  misc_feature: MA Experiment ID: 108464 Result: Up-regulated in Transcription
  misc_feature: MA Experiment 108464 PARAMETER Experiment Name: At_Germinating_Seeds_cDNA_P Parameter: Age (day) Value: 4 vs. 0
  misc_feature: MA Experiment 108464 PARAMETER Experiment Name: At_Germinating_Seeds_cDNA_P Parameter: Tissue Value: Germinating Seeds
  misc_feature: MA Experiment ID: 108488 Result: Up-regulated in Transcription
  misc_feature: MA Experiment ID: 108489 Result: Down-regulated in Transcription
  misc_feature: MA Experiment ID: 108595 Result: Down-regulated in Transcription
  misc_feature: MA Experiment 108595 PARAMETER Experiment Name: At_Ler-pi_Ovule_cDNA_P Parameter: Plant Line Value: null
ggtgagaagagatcgagagaagaatagtttgatcatcttgtgagaaaaataatggctgcttcagtgatgctatcttcggtgacattgaaaccagctggtttcacggtggagaagacggcggctagaggattaccgtcgctcacaagagctcgtccctccttcaaaattgtcgccagtggcgtcaagaagatcaagaccgacaagcccttcggaattaacggcagcatggacttgagggacggcgtcgacgcttccggcagaaagggcaagggatacggtgtttacaagtacgtcgacaagtatggagctaacgtcgatggatacagtcctatttacaacgagaacgagtggtcagcgagtgggtgacgtgtacaagggaggagtcaccggattggcaattttggcggaactctcgccggaattcttgcccgaaggtgctcttcttgttaccacacaagtgctttggcttaataaatcttaaaagtggtaacccnttggtaatcatggttctataaaaggttctggggtggtctctttctctctaatgtggaaactcaacctactttgaattat

SEQ ID NO: 43931 - protein, 104 aa, Arabidopsis thaliana
  peptide (1)..(104): Ceres Seq. ID no. 6428454
  misc_feature (42)..(104): Pfam Name: Photosystem II 10 kDa polypeptide PsbR Pfam Description: Photosystem II 10 kDa polypeptide PsbR
  misc_feature (1)..(104): Homolog of NCBI NO: 33694227 NR Description: 10 kDa photosystem II polypeptide [Trifolium
  misc_feature (1)..(104): Homolog of NCBI NO: 131400 NR Description: Photosystem II 10 kDa polypeptide, chloroplast
  misc_feature (10)..(104): Homolog of NCBI NO: 1418984 NR Description: photosystem II 10 kD polypeptide [Lycopersicon
  misc_feature (1)..(104): Homolog of NCBI NO: 3914472 NR Description: Photosystem II 10 kDa polypeptide, chloroplast
  misc_feature (3)..(104): Homolog of NCBI NO: 21491 NR Description: ST-LS1 protein (AA 1-138) [Solanum tuberosum]
  misc_feature (3)..(104): Homolog of NCBI NO: 3914471 NR Description: Photosystem II 10 kDa polypeptide, chloroplast
  misc_feature (3)..(104): Homolog of NCBI NO: 131399 NR Description: Photosystem II 10 kDa polypeptide, chloroplast
  misc_feature (4)..(104): Homolog of NCBI NO: 28207611 NR Description: photosystem II 10kDa polypeptide [Brassica rapa
  misc_feature (1)..(104): Homolog of NCBI NO: 1346871 NR Description: Photosystem II 10 kDa polypeptide, chloroplast
  misc_feature (1)..(104): Homolog of NCBI NO: 15219268 NR Description: photosystem II polypeptide, putative
MAASVMLSSVTLKPAGFTVEKTAARGLPSLTRARPSFKIVASGVKKIKTDKPFGINGSMDLRDGVDASGRKGKGYGVYKYVDKYGANVDGYSPIYNENEWSASG

SEQ ID NO: 43932 - protein, 99 aa, Arabidopsis thaliana
  peptide (1)..(99): Ceres Seq. ID no. 6428455
  misc_feature (37)..(99): Pfam Name: Photosystem II 10 kDa polypeptide PsbR Pfam Description: Photosystem II 10 kDa polypeptide PsbR
  misc_feature (1)..(99): Homolog of NCBI NO: 33694227 NR Description: 10 kDa photosystem II polypeptide [Trifolium
  misc_feature (1)..(99): Homolog of NCBI NO: 131400 NR Description: Photosystem II 10 kDa polypeptide, chloroplast
  misc_feature (5)..(99): Homolog of NCBI NO: 1418984 NR Description: photosystem II 10 kD polypeptide [Lycopersicon
  misc_feature (1)..(99): Homolog of NCBI NO: 3914472 NR Description: Photosystem II 10 kDa polypeptide, chloroplast
  misc_feature (1)..(99): Homolog of NCBI NO: 21491 NR Description: ST-LS1 protein (AA 1-138) [Solanum tuberosum]
  misc_feature (1)..(99): Homolog of NCBI NO: 3914471 NR Description: Photosystem II 10 kDa polypeptide, chloroplast
  misc_feature (1)..(99): Homolog of NCBI NO: 131399 NR Description: Photosystem II 10 kDa polypeptide, chloroplast
  misc_feature (1)..(99): Homolog of NCBI NO: 28207611 NR Description: photosystem II 10kDa polypeptide [Brassica rapa
  misc_feature (1)..(99): Homolog of NCBI NO: 1346871 NR Description: Photosystem II 10 kDa polypeptide, chloroplast
  misc_feature (1)..(99): Homolog of NCBI NO: 15219268 NR Description: photosystem II polypeptide, putative
MLSSVTLKPAGFTVEKTAARGLPSLTRARPSFKIVASGVKKIKTDKPFGINGSMDLRDGVDASGRKGKGYGVYKYVDKYGANVDGYSPIYNENEWSASG

SEQ ID NO: 43933 - protein, 59 aa, Arabidopsis thaliana
  peptide (1)..(59): Ceres Seq. ID no. 6428456
MELTSMDTVLFTTRTSGQRVGDVYKGGVTGLAILAELSPEFLPEGALLVTTQVLWLNKS

SEQ ID NO: 43934 - DNA, 1057 bp, Arabidopsis thaliana; identical to SEQ ID NO: 37042
  misc_feature (1)..(1057): Ceres Seq. ID no. 12558683

SEQ ID NO: 43935 - protein, 171 aa, Arabidopsis thaliana; identical to SEQ ID NO: 37043
  peptide (1)..(171): Ceres Seq. ID no. 12558684
  misc_feature (4)..(138): Homolog of NCBI NO: 34899622 NR Description: cadmium-induced protein-like
  misc_feature (1)..(171): Homolog of NCBI NO: 15234117 NR Description: cadmium-induced protein
  misc_feature (4)..(138): Homolog of NCBI NO: 34899622 NR Description: cadmium-induced protein-like
  misc_feature (1)..(171): Homolog of NCBI NO: 15234117 NR Description: cadmium-induced protein

SEQ ID NO: 43936 - protein, 168 aa, Arabidopsis thaliana; identical to SEQ ID NO: 37044
  peptide (1)..(168): Ceres Seq. ID no. 12558685
  misc_feature (1)..(135): Homolog of NCBI NO: 34899622 NR Description: cadmium-induced protein-like
  misc_feature (1)..(168): Homolog of NCBI NO: 15234117 NR Description: cadmium-induced protein
  misc_feature (1)..(135): Homolog of NCBI NO: 34899622 NR Description: cadmium-induced protein-like
  misc_feature (1)..(168): Homolog of NCBI NO: 15234117 NR Description: cadmium-induced protein

SEQ ID NO: 43937 - protein, 143 aa, Arabidopsis thaliana; identical to SEQ ID NO: 37045
  peptide (1)..(143): Ceres Seq. ID no. 12558686
  misc_feature (1)..(110): Homolog of NCBI NO: 34899622 NR Description: cadmium-induced protein-like
  misc_feature (1)..(143): Homolog of NCBI NO: 15234117 NR Description: cadmium-induced protein
  misc_feature (1)..(110): Homolog of NCBI NO: 34899622 NR Description: cadmium-induced protein-like
  misc_feature (1)..(143): Homolog of NCBI NO: 15234117 NR Description: cadmium-induced protein

SEQ ID NO: 43938 - DNA, 1608 bp, Arabidopsis thaliana
  misc_feature (1)..(1608): Ceres Seq. ID no. 12466379
  misc_feature: MA Experiment ID: 20000182 Result: Up-regulated in Transcription
  misc_feature: MA Experiment 20000182 PARAMETER Experiment Name: At_2mM_SA_P Parameter: Age (day) Value: 14
  misc_feature: MA Experiment 20000182 PARAMETER Experiment Name: At_2mM_SA_P Parameter: Organism Value: A. thaliana
  misc_feature: MA Experiment 20000182 PARAMETER Experiment Name: At_2mM_SA_P Parameter: Plant Line Value: WS
  misc_feature: MA Experiment 20000182 PARAMETER Experiment Name: At_2mM_SA_P Parameter: Timepoint (hr) Value: 6
  misc_feature: MA Experiment 20000182 PARAMETER Experiment Name: At_2mM_SA_P Parameter: Tissue Value: Aerial
  misc_feature: MA Experiment 20000182 PARAMETER Experiment Name: At_2mM_SA_P Parameter: Treatment Value: 2mM SA vs. No Treatment
  misc_feature: MA Experiment ID: 20000185 Result: Down-regulated in Transcription
  misc_feature: MA Experiment 20000185 PARAMETER Experiment Name: At_Roots__P Parameter: Age (day) Value: 7 vs. 21
  misc_feature: MA Experiment 20000185 PARAMETER Experiment Name: At_Roots__P Parameter: Organism Value: A. thaliana
  misc_feature: MA Experiment 20000185 PARAMETER Experiment Name: At_Roots__P Parameter: Tissue Value: Roots vs. Whole Plant
  misc_feature: MA Experiment ID: 20000794 Result: Down-regulated in Transcription
  misc_feature: MA Experiment 20000794 PARAMETER Experiment Name: At_Petals_P Parameter: Age (day) Value: 23-25 days
  misc_feature: MA Experiment 20000794 PARAMETER Experiment Name: At_Petals_P Parameter: Plant Line Value: WS
  misc_feature: MA Experiment 20000794 PARAMETER Experiment Name: At_Petals_P Parameter: Tissue Value: Petals vs. Whole plant
gttcccttttcagtgtcctttcaatttctttcgacgaaacttcatttctcaatttcttttgattttgatcgcttcgaagaacgaatcaatttaagcctgccacaaacaaaccctagaatacgacaacgcacgacgacgaagaagtcgaagaagactactactataaacgacgaagatcattacttcaatcttcaatcgagcttttaaattttcagatcgtagaagaaaatcgaacttttgattccaaaagcgatgagaccgattcaatcgcctccaggagtttccgttccggtgaaaagccgtccccgtcgccgtcctgatcttaccttaccgcttcctcaacgcgatgtttctctcgctgtacctcttcctctcccacctacttccggtggttccggtggctctagtggatctgcgccgtcttctggtggttcggcgtcttcaacgaacactaacagctccatagaagcgaagaactattcggatttagtgagaggtaaccgtatcggaagcggagcaggtggaacggtatacaaagtgattcaccgtccgagttctcgtctatatgcacttaaggtgatatacggtaaccacgaggagactgtgagacgtcagatctgtagagagatcgagattttacgagatgtgaatcatccaaacgttgtgaaatgtcacgagatgtttgatcagaacggtgagatccaggttttgcttgagtttatggataaaggttctttagaaggtgctcatgtgtggaaagagcaacaattagctgatctatctcgtcagattcttagtggtttagcttatctccatagccgtcacatagttcatcgtgatatcaaaccatcgaatcttttgataaactctgctaaaaacgttaagattgctgattttggagttagtaggatcttggctcagactatggatccgtgtaattcatctgttggaaccattgcttatatgagtcctgagaggattaacactgatttgaatcagggaaagtatgatggttatgctggagatatttggagcttaggtgttagcattttggagttttacttggggaggtttcctttccctgtgagtagacaaggtgattgggctagtcttatgtgtgccatttgtatgtctcagcctccagaagctccagcgactgcgtcgccggagtttcggcattttatctcgtgttgcttgcagagagaaccggggaaaaggaggagtgctatgcagctattgcagcatcctttcatattaagagcaagtccgagccagaacaggtctcctcagaatctacatcaactcttgcctcctcctcgtcctctgtcctcgtcttcttctccaaccacatagcgttttctctcttcttcccttcatcaactcatattttttgtgttactactgttcttgagtctgttgtccaattttttgctaatcatggagggtctctgaattttacatttattagggagtaaaaaactcgagagagggtttttgggattattgttttctagaaaggtaaaagagaacaatgataatattcttatgcttatgatggtgcatgtatccccaatgtagctttgttgaattttcataaaagtttttgcc

SEQ ID NO: 43939 - protein, 366 aa, Arabidopsis thaliana
  peptide (1)..(366): Ceres Seq. ID no. 12466380
  misc_feature (79)..(334): Pfam Name: Protein kinase domain Pfam Description: Protein kinase domain
  misc_feature (24)..(338): Homolog of NCBI NO: 15221060 NR Description: MAP kinase kinase 5, putative; protein id:
  misc_feature (35)..(334): Homolog of NCBI NO: 15219482 NR Description: MAP kinase, putative
  misc_feature (1)..(355): Homolog of NCBI NO: 14719279 NR Description: MAP kinase kinase [Zea mays]
  misc_feature (13)..(360): Homolog of NCBI NO: 12484128 NR Description: mitogen-activated protein kinase 2 [Nicotiana
  misc_feature (1)..(360): Homolog of NCBI NO: 15528439 NR Description: MEK map kinase kinsae [Medicago sativa subsp. x
  misc_feature (7)..(363): Homolog of NCBI NO: 33563103 NR Description: mitogen-activated protein kinase kinase [Solanum
  misc_feature (14)..(362): Homolog of NCBI NO: 19698851 NR Description: MAP kinase kinase 5 [Arabidopsis thaliana]
  misc_feature (1)..(362): Homolog of NCBI NO: 25287595 NR Description: mitogen-activated protein kinase kinase (EC
  misc_feature (1)..(362): Homolog of NCBI NO: 15232491 NR Description: MAP kinase kinase 5
  misc_feature (1)..(366): Homolog of NCBI NO: 15217998 NR Description: MAP kinase kinase 4 (ATMKK4)
MRPIQSPPGVSVPVKSRPRRRPDLTLPLPQRDVSLAVPLPLPPTSGGSGGSSGSAPSSGGSASSTNTNSSIEAKNYSDLVRGNRIGSGAGGTVYKVIHRPSSRLYALKVIYGNHEETVRRQICREIEILRDVNHPNVVKCHEMFDQNGEIQVLLEFMDKGSLEGAHVWKEQQLADLSRQILSGLAYLHSRHIVHRDIKPSNLLINSAKNVKIADFGVSRILAQTMDPCNSSVGTIAYMSPERINTDLNQGKYDGYAGDIWSLGVSILEFYLGRFPFPVSRQGDWASLMCAICMSQPPEAPATASPEFRHFISCCLQREPGKRRSAMQLLQHPFILRASPSQNRSPQNLHQLLPPPRPLSSSSSPTT

SEQ ID NO: 43940 - protein, 224 aa, Arabidopsis thaliana
  peptide (1)..(224): Ceres Seq. ID no. 12466381
  misc_feature (1)..(192): Pfam Name: Protein kinase domain Pfam Description: Protein kinase domain
  misc_feature (1)..(196): Homolog of NCBI NO: 15221060 NR Description: MAP kinase kinase 5, putative; protein id:
  misc_feature (1)..(192): Homolog of NCBI NO: 15219482 NR Description: MAP kinase, putative
  misc_feature (1)..(213): Homolog of NCBI NO: 14719279 NR Description: MAP kinase kinase [Zea mays]
  misc_feature (1)..(218): Homolog of NCBI NO: 12484128 NR Description: mitogen-activated protein kinase 2 [Nicotiana
  misc_feature (1)..(218): Homolog of NCBI NO: 15528439 NR Description: MEK map kinase kinsae [Medicago sativa subsp. x
  misc_feature (1)..(221): Homolog of NCBI NO: 33563103 NR Description: mitogen-activated protein kinase kinase [Solanum
  misc_feature (1)..(220): Homolog of NCBI NO: 19698851 NR Description: MAP kinase kinase 5 [Arabidopsis thaliana]
  misc_feature (1)..(220): Homolog of NCBI NO: 25287595 NR Description: mitogen-activated protein kinase kinase (EC
  misc_feature (1)..(220): Homolog of NCBI NO: 15232491 NR Description: MAP kinase kinase 5
  misc_feature (1)..(224): Homolog of NCBI NO: 15217998 NR Description: MAP kinase kinase 4 (ATMKK4)
MFDQNGEIQVLLEFMDKGSLEGAHVWKEQQLADLSRQILSGLAYLHSRHIVHRDIKPSNLLINSAKNVKIADFGVSRILAQTMDPCNSSVGTIAYMSPERINTDLNQGKYDGYAGDIWSLGVSILEFYLGRFPFPVSRQGDWASLMCAICMSQPPEAPATASPEFRHFISCCLQREPGKRRSAMQLLQHPFILRASPSQNRSPQNLHQLLPPPRPLSSSSSPTT

SEQ ID NO: 43941 - protein, 210 aa, Arabidopsis thaliana
  peptide (1)..(210): Ceres Seq. ID no. 12466382
  misc_feature (1)..(178): Pfam Name: Protein kinase domain Pfam Description: Protein kinase domain
  misc_feature (1)..(182): Homolog of NCBI NO: 15221060 NR Description: MAP kinase kinase 5, putative; protein id:
  misc_feature (1)..(178): Homolog of NCBI NO: 15219482 NR Description: MAP kinase, putative
  misc_feature (1)..(199): Homolog of NCBI NO: 14719279 NR Description: MAP kinase kinase [Zea mays]
  misc_feature (1)..(204): Homolog of NCBI NO: 12484128 NR Description: mitogen-activated protein kinase 2 [Nicotiana
  misc_feature (1)..(204): Homolog of NCBI NO: 15528439 NR Description: MEK map kinase kinsae [Medicago sativa subsp. x
  misc_feature (1)..(207): Homolog of NCBI NO: 33563103 NR Description: mitogen-activated protein kinase kinase [Solanum
  misc_feature (1)..(206): Homolog of NCBI NO: 19698851 NR Description: MAP kinase kinase 5 [Arabidopsis thaliana]
  misc_feature (1)..(206): Homolog of NCBI NO: 25287595 NR Description: mitogen-activated protein kinase kinase (EC
  misc_feature (1)..(206): Homolog of NCBI NO: 15232491 NR Description: MAP kinase kinase 5
  misc_feature (1)..(210): Homolog of NCBI NO: 15217998 NR Description: MAP kinase kinase 4 (ATMKK4)
MDKGSLEGAHVWKEQQLADLSRQILSGLAYLHSRHIVHRDIKPSNLLINSAKNVKIADFGVSRILAQTMDPCNSSVGTIAYMSPERINTDLNQGKYDGYAGDIWSLGVSILEFYLGRFPFPVSRQGDWASLMCAICMSQPPEAPATASPEFRHFISCCLQREPGKRRSAMQLLQHPFILRASPSQNRSPQNLHQLLPPPRPLSSSSSPTT

SEQ ID NO: 43942 - DNA, 867 bp, Arabidopsis thaliana
  misc_feature (1)..(867): Ceres Seq. ID no. 12455436
  misc_feature: MA Experiment ID: 108434 Result: Up-regulated in Transcription
  misc_feature: MA Experiment 108434 PARAMETER Experiment Name: At_Root_Tips_cDNA_P Parameter: Tissue Value: Root Tips
  misc_feature: MA Experiment ID: 108461 Result: Down-regulated in Transcription
  misc_feature: MA Experiment 108461 PARAMETER Experiment Name: At_Germinating_Seeds_cDNA_P Parameter: Age (day) Value: 1 vs. 0
  misc_feature: MA Experiment 108461 PARAMETER Experiment Name: At_Germinating_Seeds_cDNA_P Parameter: Tissue Value: Germinating Seeds
  misc_feature: MA Experiment ID: 108462 Result: Down-regulated in Transcription
  misc_feature: MA Experiment 108462 PARAMETER Experiment Name: At_Germinating_Seeds_cDNA_P Parameter: Age (day) Value: 2 vs. 0
  misc_feature: MA Experiment 108462 PARAMETER Experiment Name: At_Germinating_Seeds_cDNA_P Parameter: Tissue Value: Germinating Seeds
  misc_feature: MA Experiment ID: 108463 Result: Down-regulated in Transcription
  misc_feature: MA Experiment 108463 PARAMETER Experiment Name: At_Germinating_Seeds_cDNA_P Parameter: Age (day) Value: 3 vs. 0
  misc_feature: MA Experiment 108463 PARAMETER Experiment Name: At_Germinating_Seeds_cDNA_P Parameter: Tissue Value: Germinating Seeds
  misc_feature: MA Experiment ID: 108464 Result: Down-regulated in Transcription
  misc_feature: MA Experiment 108464 PARAMETER Experiment Name: At_Germinating_Seeds_cDNA_P Parameter: Age (day) Value: 4 vs. 0
  misc_feature: MA Experiment 108464 PARAMETER Experiment Name: At_Germinating_Seeds_cDNA_P Parameter: Tissue Value: Germinating Seeds
  misc_feature: MA Experiment ID: 108488 Result: Up-regulated in Transcription
  misc_feature: MA Experiment ID: 108489 Result: Up-regulated in Transcription
  misc_feature: MA Experiment ID: 20000173 Result: Up-regulated in Transcription
  misc_feature: MA Experiment 20000173 PARAMETER Experiment Name: At_42deg_Heat_P Parameter: Age (day) Value: 14
  misc_feature: MA Experiment 20000173 PARAMETER Experiment Name: At_42deg_Heat_P Parameter: Organism Value: A. thaliana
  misc_feature: MA Experiment 20000173 PARAMETER Experiment Name: At_42deg_Heat_P Parameter: Plant Line Value: WS
  misc_feature: MA Experiment 20000173 PARAMETER Experiment Name: At_42deg_Heat_P Parameter: Temperature (deg C) Value: 42 vs. 22
  misc_feature: MA Experiment 20000173 PARAMETER Experiment Name: At_42deg_Heat_P Parameter: Timepoint (hr) Value: 6
  misc_feature: MA Experiment 20000173 PARAMETER Experiment Name: At_42deg_Heat_P Parameter: Tissue Value: Aerial
  misc_feature: MA Experiment ID: 20000184 Result: Up-regulated in Transcription
  misc_feature: MA Experiment 20000184 PARAMETER Experiment Name: At_Shoots__P Parameter: Age (day) Value: 7
  misc_feature: MA Experiment 20000184 PARAMETER Experiment Name: At_Shoots__P Parameter: Tissue Value: Shoots vs. Whole Plant
  misc_feature: MA Experiment ID: 20000794 Result: Down-regulated in Transcription
  misc_feature: MA Experiment 20000794 PARAMETER Experiment Name: At_Petals_P Parameter: Age (day) Value: 23-25 days
  misc_feature: MA Experiment 20000794 PARAMETER Experiment Name: At_Petals_P Parameter: Plant Line Value: WS
  misc_feature: MA Experiment 20000794 PARAMETER Experiment Name: At_Petals_P Parameter: Tissue Value: Petals vs. Whole plant
  misc_feature: MA Experiment ID: 20001560 Result: Up-regulated in Transcription
  misc_feature: MA Experiment 20001560 PARAMETER Experiment Name: At_Drought_Soil_Dry_P Parameter: Age (day) Value: 28
  misc_feature: MA Experiment 20001560 PARAMETER Experiment Name: At_Drought_Soil_Dry_P Parameter: Organism Value: A. thaliana
  misc_feature: MA Experiment 20001560 PARAMETER Experiment Name: At_Drought_Soil_Dry_P Parameter: Plant Line Value: WS
  misc_feature: MA Experiment 20001560 PARAMETER Experiment Name: At_Drought_Soil_Dry_P Parameter: Post Timepoint (hr) Value: None
  misc_feature: MA Experiment 20001560 PARAMETER Experiment Name: At_Drought_Soil_Dry_P Parameter: Post-Treatment Value: None
  misc_feature: MA Experiment 20001560 PARAMETER Experiment Name: At_Drought_Soil_Dry_P Parameter: Timepoint (day) Value: 14
  misc_feature: MA Experiment 20001560 PARAMETER Experiment Name: At_Drought_Soil_Dry_P Parameter: Treatment Value: Drought vs. No Drought
  misc_feature: MA Experiment ID: 20001757 Result: Up-regulated in Transcription
  misc_feature: MA Experiment 20001757 PARAMETER Experiment Name: At_50mM_NH4NO3_L-to-H_P Parameter: Timepoint (hr) Value: 6
  misc_feature: MA Experiment 20001757 PARAMETER Experiment Name: At_50mM_NH4NO3_L-to-H_P Parameter: Tissue Value: Leaf
  misc_feature: MA Experiment 20001757 PARAMETER Experiment Name: At_50mM_NH4NO3_L-to-H_P Parameter: Treatment Value: 50mM NH4NO3 vs 100mM Mannitol
  misc_feature: Phenotype: INFLORESCENCE Flowering Time-Late Flowering
  misc_feature: Phenotype: INFLORESCENCE Height-Short
  misc_feature: Phenotype: INFLORESCENCE Strength-Strong
  misc_feature: Phenotype: WHOLE PLANT Color-Dark Green
  misc_feature: Phenotype: CAULINE LEAVES Shape-Serrate
  misc_feature: Phenotype: ROSETTE LEAVES Shape-Oval
  misc_feature: Phenotype: WHOLE PLANT Color-Dark Green
  misc_feature: Phenotype: INFLORESCENCE Height-Short
  misc_feature: Phenotype: ROSETTE LEAVES Shape-Oval
  misc_feature: Phenotype: WHOLE PLANT Color-High Anthocyanin
  misc_feature: Phenotype: INFLORESCENCE Height-Short
  misc_feature: Phenotype: ROSETTE LEAVES Shape-Oval
  misc_feature: Phenotype: WHOLE PLANT Color-High Anthocyanin
  misc_feature: Phenotype: INFLORESCENCE Height-Short
  misc_feature: Phenotype: ROSETTE LEAVES Curled-Curled 2
  misc_feature: Phenotype: ROSETTE LEAVES Shape-Oval
  misc_feature: Phenotype: ROSETTE LEAVES Other
agggtttattcttcattgcttgagcttccttctcttcttcttcttcaagccgcggctgaagatccctacttctctcgacacttatagagtttcaggtccattctctgattcctgttttttcattttctaatttcctatttacgggtttttactaatcttctagtgatcctccagtcatggccgcctccgcagaaatcgacgctgagattcaacagcagcttaccaatgaggttaagctcttcaaccgttggagctttgatgacgtttcggttacggatattagtcttgtggactacattggtgttcagccatcgaagcacgcaacttttgttccccatactgctggacgatactctgtgaagaggttcagaaaggcgcagtgcccaattgttgagaggctcactaactctctcatgatgcacggaagaaacaatggtaagaagttgatggctgtcaggatcgtcaagcatgccatggagattatccacctcttgtctgacttgaacccgattcaagttatcattgatgccattgttaacagtggtccacgtgaagatgctaccaggattggatctgctggtgtggttaggaggcaggctgttgatatctctcctctaagacgtgtgaaccaagcgatcttcttgcttacaactggtgcacgtgaagctgcctttagaaacatcaagacaatcgctgagtgccttgctgatgaactcatcaatgctgcaaagggatcttccaacagctatgccatcaagaagaaagatgagattgagagagttgctaaggccaatcgttaagggatctccctttcctctaagtttgcattatatcaaagagtttttgtgttgtttccattagctttgg

SEQ ID NO: 43943 - protein, 207 aa, Arabidopsis thaliana [sequence omitted]

SEQ ID NO: 43944 - protein, 128 aa, Arabidopsis thaliana
  peptide (1)..(128): Ceres Seq. ID no. 12455438
  misc_feature (1)..(128): Pfam Name: Ribosomal protein S7p/S5e Pfam Description: Ribosomal protein S7p/S5e
  misc_feature (1)..(128): Homolog of NCBI NO: 15294021 NR Description: 40S ribosomal protein S5 [Ictalurus punctatus]
  misc_feature (1)..(128): Homolog of NCBI NO: 34854534 NR Description: similar to ribosomal protein S5; 40S ribosomal
  misc_feature (1)..(128): Homolog of NCBI NO: 13904870 NR Description: ribosomal protein S5; 40S ribosomal protein S5
  misc_feature (1)..(128): Homolog of NCBI NO: 3717978 NR Description: 5S ribosomal protein [Mus musculus]
  misc_feature (1)..(128): Homolog of NCBI NO: 40748265 NR Description: 40S ribosomal protein S5 [Capsicum annuum]
  misc_feature (1)..(128): Homolog of NCBI NO: 34893994 NR Description: putative 40S ribosomal protein S5
  misc_feature (1)..(128): Homolog of NCBI NO: 6831665 NR Description: 40S RIBOSOMAL PROTEIN S5
  misc_feature (1)..(128): Homolog of NCBI NO: 15229897 NR Description: 40S ribosomal protein S5, putative
  misc_feature (1)..(128): Homolog of NCBI NO: 21617886 NR Description: 40S ribosomal protein S5 [Arabidopsis thaliana]
  misc_feature (1)..(128): Homolog of NCBI NO: 15228111 NR Description: 40S ribosomal protein S5
MMHGRNNGKKLMAVRIVKHAMEIIHLLSDLNPIQVIIDAIVNSGPREDATRIGSAGVVRRQAVDISPLRRVNQAIFLLTTGAREAAFRNIKTIAECLADELINAAKGSSNSYAIKKKDEIERVAKANR

SEQ ID NO: 43945 - protein, 127 aa, Arabidopsis thaliana
  peptide (1)..(127): Ceres Seq. ID no. 12455439
  misc_feature (1)..(127): Pfam Name: Ribosomal protein S7p/S5e Pfam Description: Ribosomal protein S7p/S5e
  misc_feature (1)..(127): Homolog of NCBI NO: 15294021 NR Description: 40S ribosomal protein S5 [Ictalurus punctatus]
  misc_feature (1)..(127): Homolog of NCBI NO: 34854534 NR Description: similar to ribosomal protein S5; 40S ribosomal
  misc_feature (1)..(127): Homolog of NCBI NO: 13904870 NR Description: ribosomal protein S5; 40S ribosomal protein S5
  misc_feature (1)..(127): Homolog of NCBI NO: 3717978 NR Description: 5S ribosomal protein [Mus musculus]
  misc_feature (1)..(127): Homolog of NCBI NO: 40748265 NR Description: 40S ribosomal protein S5 [Capsicum annuum]
  misc_feature (1)..(127): Homolog of NCBI NO: 34893994 NR Description: putative 40S ribosomal protein S5
  misc_feature (1)..(127): Homolog of NCBI NO: 6831665 NR Description: 40S RIBOSOMAL PROTEIN S5
  misc_feature (1)..(127): Homolog of NCBI NO: 15229897 NR Description: 40S ribosomal protein S5, putative
  misc_feature (1)..(127): Homolog of NCBI NO: 21617886 NR Description: 40S ribosomal protein S5 [Arabidopsis thaliana]
  misc_feature (1)..(127): Homolog of NCBI NO: 15228111 NR Description: 40S ribosomal protein S5
MHGRNNGKKLMAVRIVKHAMEIIHLLSDLNPIQVIIDAIVNSGPREDATRIGSAGVVRRQAVDISPLRRVNQAIFLLTTGAREAAFRNIKTIAECLADELINAAKGSSNSYAIKKKDEIERVAKANR

SEQ ID NO: 43946 - DNA, 1420 bp, Arabidopsis thaliana; identical to SEQ ID NO: 36272
  misc_feature (1)..(1420): Ceres Seq. ID no. 12580277
  misc_feature: MA Experiment ID: 20000179 Result: Up-regulated in Transcription
  misc_feature: MA Experiment 20000179 PARAMETER Experiment Name: At_Germinating_Seeds_P Parameter: Age (hr) Value: 6 vs. 0
  misc_feature: MA Experiment 20000179 PARAMETER Experiment Name: At_Germinating_Seeds_P Parameter: Tissue Value: Germinating Seeds
  misc_feature: MA Experiment ID: 20000180 Result: Up-regulated in Transcription
  misc_feature: MA Experiment 20000180 PARAMETER Experiment Name: At_Germinating_Seeds_P Parameter: Age (hr) Value: 24 vs. 0
  misc_feature: MA Experiment 20000180 PARAMETER Experiment Name: At_Germinating_Seeds_P Parameter: Tissue Value: Germinating Seeds
  misc_feature: MA Experiment ID: 20001905 Result: Down-regulated in Transcription
  misc_feature: MA Experiment 20001905 PARAMETER Experiment Name: At_Drought_Reproduction_P Parameter: Age (day) Value: 40
  misc_feature: MA Experiment 20001905 PARAMETER Experiment Name: At_Drought_Reproduction_P Parameter: Organism Value: A. thaliana
  misc_feature: MA Experiment 20001905 PARAMETER Experiment Name: At_Drought_Reproduction_P Parameter: Plant Line Value: WS
  misc_feature: MA Experiment 20001905 PARAMETER Experiment Name: At_Drought_Reproduction_P Parameter: Timepoint (day) Value: 10
  misc_feature: MA Experiment 20001905 PARAMETER Experiment Name: At_Drought_Reproduction_P Parameter: Tissue Value: Rosettes
  misc_feature: MA Experiment 20001905 PARAMETER Experiment Name: At_Drought_Reproduction_P Parameter: Treatment Value: Drought vs. No Drought

SEQ ID NO: 43947 - protein, 351 aa, Arabidopsis thaliana; identical to SEQ ID NO: 36273
  peptide (1)..(351): Ceres Seq. ID no. 12580278
  misc_feature (284)..(338): Pfam Name: SH3 domain Pfam Description: SH3 domain
  misc_feature (284)..(338): Pfam Name: SH3 domain Pfam Description: SH3 domain
  misc_feature (284)..(338): Pfam Name: SH3 domain Pfam Description: SH3 domain
  misc_feature (284)..(338): Pfam Name: SH3 domain Pfam Description: SH3 domain
  misc_feature (1)..(278): Homolog of NCBI NO: 18418491 NR Description: putative protein
  misc_feature (278)..(344): Homolog of NCBI NO: 15221714 NR Description: unknown protein
  misc_feature (1)..(273): Homolog of NCBI NO: 15221714 NR Description: unknown protein
  misc_feature (260)..(344): Homolog of NCBI NO: 34902022 NR Description: unknown protein [Oryza sativa (japonica
  misc_feature (1)..(266): Homolog of NCBI NO: 34902022 NR Description: unknown protein [Oryza sativa (japonica
  misc_feature (1)..(278): Homolog of NCBI NO: 18418491 NR Description: putative protein
  misc_feature (1)..(273): Homolog of NCBI NO: 15221714 NR Description: unknown protein
  misc_feature (1)..(266): Homolog of NCBI NO: 34902022 NR Description: unknown protein [Oryza sativa (japonica
  misc_feature (260)..(344): Homolog of NCBI NO: 34902022 NR Description: unknown protein [Oryza sativa (japonica
  misc_feature (1)..(273): Homolog of NCBI NO: 15221714 NR Description: unknown protein
  misc_feature (278)..(344): Homolog of NCBI NO: 15221714 NR Description: unknown protein
  misc_feature (1)..(278): Homolog of NCBI NO: 18418491 NR Description: putative protein
  misc_feature (1)..(351): Homolog of NCBI NO: 22328762 NR Description: putative protein
  misc_feature (1)..(351): Homolog of NCBI NO: 21928139 NR Description: AT4g18060/F15J5_30 [Arabidopsis thaliana]
  misc_feature (1)..(351): Homolog of NCBI NO: 16974680 NR Description: SH3 domain-containing protein 3 [Arabidopsis
  misc_feature (1)..(243): Homolog of NCBI NO: 7485521 NR Description: hypothetical protein F15J5.30 - Arabidopsis
  misc_feature (1)..(342): Homolog of NCBI NO: 22093679 NR Description: putative SH3(Src homology) domain-containing
  misc_feature (1)..(351): Homolog of NCBI NO: 22328762 NR Description: putative protein
  misc_feature (1)..(351): Homolog of NCBI NO: 21928139 NR Description: AT4g18060/F15J5_30 [Arabidopsis thaliana]
  misc_feature (1)..(351): Homolog of NCBI NO: 16974680 NR Description: SH3 domain-containing protein 3 [Arabidopsis
  misc_feature (1)..(243): Homolog of NCBI NO: 7485521 NR Description: hypothetical protein F15J5.30 - Arabidopsis
  misc_feature (1)..(342): Homolog of NCBI NO: 22093679 NR Description: putative SH3(Src homology) domain-containing
  misc_feature (1)..(266): Homolog of NCBI NO: 34902022 NR Description: unknown protein [Oryza sativa (japonica
  misc_feature (260)..(344): Homolog of NCBI NO: 34902022 NR Description: unknown protein [Oryza sativa (japonica
  misc_feature (1)..(273): Homolog of NCBI NO: 15221714 NR Description: unknown protein
  misc_feature (278)..(344): Homolog of NCBI NO: 15221714 NR Description: unknown protein
  misc_feature (1)..(278): Homolog of NCBI NO: 18418491 NR Description: putative protein
  misc_feature (1)..(351): Homolog of NCBI NO: 22328762 NR Description: putative protein
  misc_feature (1)..(351): Homolog of NCBI NO: 21928139 NR Description: AT4g18060/F15J5_30 [Arabidopsis thaliana]
  misc_feature (1)..(351): Homolog of NCBI NO: 16974680 NR Description: SH3 domain-containing protein 3 [Arabidopsis
  misc_feature (1)..(243): Homolog of NCBI NO: 7485521 NR Description: hypothetical protein F15J5.30 - Arabidopsis
  misc_feature (1)..(342): Homolog of NCBI NO: 22093679 NR Description: putative SH3(Src homology) domain-containing
  misc_feature (1)..(266): Homolog of NCBI NO: 34902022 NR Description: unknown protein [Oryza sativa (japonica
  misc_feature (260)..(344): Homolog of NCBI NO: 34902022 NR Description: unknown protein [Oryza sativa (japonica
  misc_feature (278)..(344): Homolog of NCBI NO: 15221714 NR Description: unknown protein
  misc_feature (1)..(342): Homolog of NCBI NO: 22093679 NR Description: putative SH3(Src homology) domain-containing
  misc_feature (1)..(243): Homolog of NCBI NO: 7485521 NR Description: hypothetical protein F15J5.30 - Arabidopsis
  misc_feature (1)..(351): Homolog of NCBI NO: 16974680 NR Description: SH3 domain-containing protein 3 [Arabidopsis
  misc_feature (1)..(351): Homolog of NCBI NO: 21928139 NR Description: AT4g18060/F15J5_30 [Arabidopsis thaliana]
  misc_feature (1)..(351): Homolog of NCBI NO: 22328762 NR Description: putative protein

SEQ ID NO: 43948 - protein, 315 aa, Arabidopsis thaliana; identical to SEQ ID NO: 36274
  peptide (1)..(315): Ceres Seq. ID no. 12580279
  misc_feature (248)..(302): Pfam Name: SH3 domain Pfam Description: SH3 domain
  misc_feature (248)..(302): Pfam Name: SH3 domain Pfam Description: SH3 domain
  misc_feature (248)..(302): Pfam Name: SH3 domain Pfam Description: SH3 domain
  misc_feature (248)..(302): Pfam Name: SH3 domain Pfam Description: SH3 domain
  misc_feature (1)..(242): Homolog of NCBI NO: 18418491 NR Description: putative protein
  misc_feature (242)..(308): Homolog of NCBI NO: 15221714 NR Description: unknown protein
  misc_feature (1)..(237): Homolog of NCBI NO: 15221714 NR Description: unknown protein
  misc_feature (224)..(308): Homolog of NCBI NO: 34902022 NR Description: unknown protein [Oryza sativa (japonica
  misc_feature (1)..(230): Homolog of NCBI NO: 34902022 NR Description: unknown protein [Oryza sativa (japonica
  misc_feature (1)..(242): Homolog of NCBI NO: 18418491 NR Description: putative protein
  misc_feature (1)..(237): Homolog of NCBI NO: 15221714 NR Description: unknown protein
  misc_feature (1)..(230): Homolog of NCBI NO: 34902022 NR Description: unknown protein [Oryza sativa (japonica
  misc_feature (224)..(308): Homolog of NCBI NO: 34902022 NR Description: unknown protein [Oryza sativa (japonica
  misc_feature (1)..(237): Homolog of NCBI NO: 15221714 NR Description: unknown protein
  misc_feature (242)..(308): Homolog of NCBI NO: 15221714 NR Description: unknown protein
  misc_feature (1)..(242): Homolog of NCBI NO: 18418491 NR Description: putative protein
  misc_feature (1)..(315): Homolog of NCBI NO: 22328762 NR Description: putative protein
  misc_feature (1)..(315): Homolog of NCBI NO: 21928139 NR Description: AT4g18060/F15J5_30 [Arabidopsis thaliana]
  misc_feature (1)..(315): Homolog of NCBI NO: 16974680 NR Description: SH3 domain-containing protein 3 [Arabidopsis
  misc_feature (1)..(207): Homolog of NCBI NO: 7485521 NR Description: hypothetical protein F15J5.30 - Arabidopsis
  misc_feature (1)..(306): Homolog of NCBI NO: 22093679 NR Description: putative SH3(Src homology) domain-containing
  misc_feature (1)..(315): Homolog of NCBI NO: 22328762 NR Description: putative protein
  misc_feature (1)..(315): Homolog of NCBI NO: 21928139 NR Description: AT4g18060/F15J5_30 [Arabidopsis thaliana]
  misc_feature (1)..(315): Homolog of NCBI NO: 16974680 NR Description: SH3 domain-containing protein 3 [Arabidopsis
  misc_feature (1)..(207): Homolog of NCBI NO: 7485521 NR Description: hypothetical protein F15J5.30 - Arabidopsis
  misc_feature (1)..(306): Homolog of NCBI NO: 22093679 NR Description: putative SH3(Src homology) domain-containing
  misc_feature (1)..(230): Homolog of NCBI NO: 34902022 NR Description: unknown protein [Oryza sativa (japonica
  misc_feature (224)..(308): Homolog of NCBI NO: 34902022 NR Description: unknown protein [Oryza sativa (japonica
  misc_feature (1)..(237): Homolog of NCBI NO: 15221714 NR Description: unknown protein
  misc_feature (242)..(308): Homolog of NCBI NO: 15221714 NR Description: unknown protein
  misc_feature (1)..(242): Homolog of NCBI NO: 18418491 NR Description: putative protein
  misc_feature (1)..(315): Homolog of NCBI NO: 22328762 NR Description: putative protein
  misc_feature (1)..(315): Homolog of NCBI NO: 21928139 NR Description: AT4g18060/F15J5_30 [Arabidopsis thaliana]
  misc_feature (1)..(315): Homolog of NCBI NO: 16974680 NR Description: SH3 domain-containing protein 3 [Arabidopsis
  misc_feature (1)..(207): Homolog of NCBI NO: 7485521 NR Description: hypothetical protein F15J5.30 - Arabidopsis
  misc_feature (1)..(306): Homolog of NCBI NO: 22093679 NR Description: putative SH3(Src homology) domain-containing
  misc_feature (1)..(230): Homolog of NCBI NO: 34902022 NR Description: unknown protein [Oryza sativa (japonica
  misc_feature (224)..(308): Homolog of NCBI NO: 34902022 NR Description: unknown protein [Oryza sativa (japonica
  misc_feature (242)..(308): Homolog of NCBI NO: 15221714 NR Description: unknown protein
  misc_feature (1)..(306): Homolog of NCBI NO: 22093679 NR Description: putative SH3(Src homology) domain-containing
  misc_feature (1)..(207): Homolog of NCBI NO: 7485521 NR Description: hypothetical protein F15J5.30 - Arabidopsis
  misc_feature (1)..(315): Homolog of NCBI NO: 16974680 NR Description: SH3 domain-containing protein 3 [Arabidopsis
  misc_feature (1)..(315): Homolog of NCBI NO: 21928139 NR Description: AT4g18060/F15J5_30 [Arabidopsis thaliana]
  misc_feature (1)..(315): Homolog of NCBI NO: 22328762 NR Description: putative protein

SEQ ID NO: 43949 - protein, 308 aa, Arabidopsis thaliana; identical to SEQ ID NO: 36275
  peptide (1)..(308): Ceres Seq. ID no. 12580280
  misc_feature (241)..(295): Pfam Name: SH3 domain Pfam Description: SH3 domain
  misc_feature (241)..(295): Pfam Name: SH3 domain Pfam Description: SH3 domain
  misc_feature (241)..(295): Pfam Name: SH3 domain Pfam Description: SH3 domain
  misc_feature (241)..(295): Pfam Name: SH3 domain Pfam Description: SH3 domain
  misc_feature (1)..(235): Homolog of NCBI NO: 18418491 NR Description: putative protein
  misc_feature (235)..(301): Homolog of NCBI NO: 15221714 NR Description: unknown protein
  misc_feature (1)..(230): Homolog of NCBI NO: 15221714 NR Description: unknown protein
  misc_feature (217)..(301): Homolog of NCBI NO: 34902022 NR Description: unknown protein [Oryza sativa (japonica
  misc_feature (1)..(223): Homolog of NCBI NO: 34902022 NR Description: unknown protein [Oryza sativa (japonica
  misc_feature (1)..(235): Homolog of NCBI NO: 18418491 NR Description: putative protein
  misc_feature (1)..(230): Homolog of NCBI NO: 15221714 NR Description: unknown protein
  misc_feature (1)..(223): Homolog of NCBI NO: 34902022 NR Description: unknown protein [Oryza sativa (japonica
  misc_feature (217)..(301): Homolog of NCBI NO: 34902022 NR Description: unknown protein [Oryza sativa (japonica
  misc_feature (1)..(230): Homolog of NCBI NO: 15221714 NR Description: unknown protein
  misc_feature (235)..(301): Homolog of NCBI NO: 15221714 NR Description: unknown protein
  misc_feature (1)..(235): Homolog of NCBI NO: 18418491 NR Description: putative protein
  misc_feature (1)..(308): Homolog of NCBI NO: 22328762 NR Description: putative protein
  misc_feature (1)..(308): Homolog of NCBI NO: 21928139 NR Description: AT4g18060/F15J5_30 [Arabidopsis thaliana]
  misc_feature (1)..(308): Homolog of NCBI NO: 16974680 NR Description: SH3 domain-containing protein 3 [Arabidopsis
  misc_feature (1)..(200): Homolog of NCBI NO: 7485521 NR Description: hypothetical protein F15J5.30 - Arabidopsis
  misc_feature (1)..(299): Homolog of NCBI NO: 22093679 NR Description: putative SH3(Src homology) domain-containing
  misc_feature (1)..(308): Homolog of NCBI NO: 22328762 NR Description: putative protein
  misc_feature (1)..(308): Homolog of NCBI NO: 21928139 NR Description: AT4g18060/F15J5_30 [Arabidopsis thaliana]
  misc_feature (1)..(308): Homolog of NCBI NO: 16974680 NR Description: SH3 domain-containing protein 3 [Arabidopsis
  misc_feature (1)..(200): Homolog of NCBI NO: 7485521 NR Description: hypothetical protein F15J5.30 - Arabidopsis
  misc_feature (1)..(299): Homolog of NCBI NO: 22093679 NR Description: putative SH3(Src homology) domain-containing
  misc_feature (1)..(223): Homolog of NCBI NO: 34902022 NR Description: unknown protein [Oryza sativa (japonica
  misc_feature (217)..(301): Homolog of NCBI NO: 34902022 NR Description: unknown protein [Oryza sativa (japonica
  misc_feature (1)..(230): Homolog of NCBI NO: 15221714 NR Description: unknown protein
  misc_feature (235)..(301): Homolog of NCBI NO: 15221714 NR Description: unknown protein
  misc_feature (1)..(235): Homolog of NCBI NO: 18418491 NR Description: putative protein
  misc_feature (1)..(308): Homolog of NCBI NO: 22328762 NR Description: putative protein
  misc_feature (1)..(308): Homolog of NCBI NO: 21928139 NR Description: AT4g18060/F15J5_30 [Arabidopsis thaliana]
  misc_feature (1)..(308): Homolog of NCBI NO: 16974680 NR Description: SH3 domain-containing protein 3 [Arabidopsis
  misc_feature (1)..(200): Homolog of NCBI NO: 7485521 NR Description: hypothetical protein F15J5.30 - Arabidopsis
  misc_feature (1)..(299): Homolog of NCBI NO: 22093679 NR Description: putative SH3(Src homology) domain-containing
  misc_feature (1)..(223): Homolog of NCBI NO: 34902022 NR Description: unknown protein [Oryza sativa (japonica
  misc_feature (217)..(301): Homolog of NCBI NO: 34902022 NR Description: unknown protein [Oryza sativa (japonica
  misc_feature (235)..(301): Homolog of NCBI NO: 15221714 NR Description: unknown protein
  misc_feature (1)..(299): Homolog of NCBI NO: 22093679 NR Description: putative SH3(Src homology) domain-containing
  misc_feature (1)..(200): Homolog of NCBI NO: 7485521 NR Description: hypothetical protein F15J5.30 - Arabidopsis
  misc_feature (1)..(308): Homolog of NCBI NO: 16974680 NR Description: SH3 domain-containing protein 3 [Arabidopsis
  misc_feature (1)..(308): Homolog of NCBI NO: 21928139 NR Description: AT4g18060/F15J5_30 [Arabidopsis thaliana]
  misc_feature (1)..(308): Homolog of NCBI NO: 22328762 NR Description: putative protein

SEQ ID NO: 43950 - DNA, 930 bp, Arabidopsis thaliana; identical to SEQ ID NO: 27097
  misc_feature (1)..(930): Ceres Seq. ID no. 12647740
  misc_feature: MA Experiment ID: 20000173 Result: Down-regulated in Transcription
  misc_feature: MA Experiment 20000173 PARAMETER Experiment Name: At_42deg_Heat_P Parameter: Age (day) Value: 14
  misc_feature: MA Experiment 20000173 PARAMETER Experiment Name: At_42deg_Heat_P Parameter: Organism Value: A. thaliana
  misc_feature: MA Experiment 20000173 PARAMETER Experiment Name: At_42deg_Heat_P Parameter: Plant Line Value: WS
  misc_feature: MA Experiment 20000173 PARAMETER Experiment Name: At_42deg_Heat_P Parameter: Temperature (deg C) Value: 42 vs. 22
  misc_feature: MA Experiment 20000173 PARAMETER Experiment Name: At_42deg_Heat_P Parameter: Timepoint (hr) Value: 6
  misc_feature: MA Experiment 20000173 PARAMETER Experiment Name: At_42deg_Heat_P Parameter: Tissue Value: Aerial
  misc_feature: MA Experiment ID: 20000185 Result: Down-regulated in Transcription
  misc_feature: MA Experiment 20000185 PARAMETER Experiment Name: At_Roots__P Parameter: Age (day) Value: 7 vs. 21
  misc_feature: MA Experiment 20000185 PARAMETER Experiment Name: At_Roots__P Parameter: Organism Value: A. thaliana
  misc_feature: MA Experiment 20000185 PARAMETER Experiment Name: At_Roots__P Parameter: Tissue Value: Roots vs. Whole Plant
  misc_feature: MA Experiment ID: 20000227 Result: Down-regulated in Transcription
  misc_feature: MA Experiment 20000227 PARAMETER Experiment Name: At_Root-Tips-vs-Tops_P Parameter: Tissue Value: Root Tips vs. Root Tops
  misc_feature: MA Experiment ID: 20000234 Result: Down-regulated in Transcription
  misc_feature: MA Experiment 20000234 PARAMETER Experiment Name: At_Siliques_P Parameter: Age (day) Value: 21
  misc_feature: MA Experiment 20000234 PARAMETER Experiment Name: At_Siliques_P Parameter: Organism Value: A. thaliana
  misc_feature: MA Experiment 20000234 PARAMETER Experiment Name: At_Siliques_P Parameter: Plant Line Value: WS
  misc_feature: MA Experiment 20000234 PARAMETER Experiment Name: At_Siliques_P Parameter: Tissue Value: Less Than 5mm Siliques vs. Whole Plant
  misc_feature: MA Experiment ID: 20000264 Result: Down-regulated in Transcription
  misc_feature: MA Experiment 20000264 PARAMETER Experiment Name: At_Open_Flower_P Parameter: Age (day) Value: 21
  misc_feature: MA Experiment 20000264 PARAMETER Experiment Name: At_Open_Flower_P Parameter: Plant Line Value: WS
  misc_feature: MA Experiment 20000264 PARAMETER Experiment Name: At_Open_Flower_P Parameter: Tissue Value: Open Flower vs. Whole Plant
  misc_feature: MA Experiment ID: 20000265 Result: Down-regulated in Transcription
  misc_feature: MA Experiment 20000265 PARAMETER Experiment Name: At_Open_Flower_P Parameter: Age (day) Value: 21
  misc_feature: MA Experiment 20000265 PARAMETER Experiment Name: At_Open_Flower_P Parameter: Plant Line Value: WS
  misc_feature: MA Experiment 20000265 PARAMETER Experiment Name: At_Open_Flower_P Parameter: Tissue Value: Closed Flower vs. Whole Plant
  misc_feature: MA Experiment ID: 20000268 Result: Down-regulated in Transcription
  misc_feature: MA Experiment 20000268 PARAMETER Experiment Name: At_100mM_NaCl__P Parameter: Age (day) Value: 14
  misc_feature: MA Experiment 20000268 PARAMETER Experiment Name: At_100mM_NaCl__P Parameter: Organism Value: A. thaliana
  misc_feature: MA Experiment 20000268 PARAMETER Experiment Name: At_100mM_NaCl__P Parameter: Plant Line Value: WS
  misc_feature: MA Experiment 20000268 PARAMETER Experiment Name: At_100mM_NaCl__P Parameter: Timepoint (hr) Value: 6
  misc_feature: MA Experiment 20000268 PARAMETER Experiment Name: At_100mM_NaCl__P Parameter: Tissue Value: Whole Plant
  misc_feature: MA Experiment 20000268 PARAMETER Experiment Name: At_100mM_NaCl__P Parameter: Treatment Value: 100mM NaCl vs. No Treatment
  misc_feature: MA Experiment ID: 20000269 Result: Down-regulated in Transcription
  misc_feature: MA Experiment 20000269 PARAMETER Experiment Name: At_1mM_KNO3_L-vs-H_Roots_P Parameter: Age (day) Value: 7,10,12
  misc_feature: MA Experiment 20000269 PARAMETER Experiment Name: At_1mM_KNO3_L-vs-H_Roots_P Parameter: Organism Value: A. thaliana
  misc_feature: MA Experiment 20000269 PARAMETER Experiment Name: At_1mM_KNO3_L-vs-H_Roots_P Parameter: Plant Line Value: WS
  misc_feature: MA Experiment 20000269 PARAMETER Experiment Name: At_1mM_KNO3_L-vs-H_Roots_P Parameter: Timepoint (day) Value: 7,10,12
  misc_feature: MA Experiment 20000269 PARAMETER Experiment Name: At_1mM_KNO3_L-vs-H_Roots_P Parameter: Tissue Value: Roots
  misc_feature: MA Experiment 20000269 PARAMETER Experiment Name: At_1mM_KNO3_L-vs-H_Roots_P Parameter: Treatment Value: 1mM KNO3 vs. 50mM KNO3
  misc_feature: MA Experiment ID: 20000286 Result: Down-regulated in Transcription
  misc_feature: MA Experiment 20000286 PARAMETER Experiment Name: At_Open_Flower_P Parameter: Age (day) Value: 21
  misc_feature: MA Experiment 20000286 PARAMETER Experiment Name: At_Open_Flower_P Parameter: Plant Line Value: WS
  misc_feature: MA Experiment 20000286 PARAMETER Experiment Name: At_Open_Flower_P Parameter: Tissue Value: Half Open vs. Whole Plant
  misc_feature: MA Experiment ID: 20000308 Result: Down-regulated in Transcription
  misc_feature: MA Experiment 20000308 PARAMETER Experiment Name: At_100mM_NaCl__P Parameter: Age (day) Value: 17
  misc_feature: MA Experiment 20000308 PARAMETER Experiment Name: At_100mM_NaCl__P Parameter: Organism Value: A. thaliana
  misc_feature: MA Experiment 20000308 PARAMETER Experiment Name: At_100mM_NaCl__P Parameter: Plant Line Value: WS
  misc_feature: MA Experiment 20000308 PARAMETER Experiment Name: At_100mM_NaCl__P Parameter: Timepoint (hr) Value: 72
  misc_feature: MA Experiment 20000308 PARAMETER Experiment Name: At_100mM_NaCl__P Parameter: Tissue Value: Whole Plant
  misc_feature: MA Experiment 20000308 PARAMETER Experiment Name: At_100mM_NaCl__P Parameter: Treatment Value: 100mM NaCl vs. No Treatment
  misc_feature: MA Experiment ID: 20000439 Result: Down-regulated in Transcription
  misc_feature: MA Experiment 20000439 PARAMETER Experiment Name: At_Roots__P Parameter: Age (day) Value: 14 vs. 21
  misc_feature: MA Experiment 20000439 PARAMETER Experiment Name: At_Roots__P Parameter: Organism Value: A. thaliana
  misc_feature: MA Experiment 20000439 PARAMETER Experiment Name: At_Roots__P Parameter: Tissue Value: Roots vs. Whole Plant
  misc_feature: MA Experiment ID: 20000441 Result: Up-regulated in Transcription
  misc_feature: MA Experiment 20000441 PARAMETER Experiment Name: At_1uM_BR-BRZ__P Parameter: Tissue Value: Shoot Apices
  misc_feature: MA Experiment 20000441 PARAMETER Experiment Name: At_1uM_BR-BRZ__P Parameter: Treatment Value: 1uM BR vs. No Treatment
  misc_feature: MA Experiment ID: 20000443 Result: Up-regulated in Transcription
  misc_feature: MA Experiment 20000443 PARAMETER Experiment Name: At_1uM_BR-BRZ__P Parameter: Tissue Value: Shoot Apices
  misc_feature: MA Experiment 20000443 PARAMETER Experiment Name: At_1uM_BR-BRZ__P Parameter: Treatment Value: 1uM BRZ vs. No Treatment
  misc_feature: MA Experiment ID: 20000451 Result: Down-regulated in Transcription
  misc_feature: MA Experiment 20000451 PARAMETER Experiment Name: At_CS6879_Shoots-Roots_P Parameter: Age (day) Value: 14
  misc_feature: MA Experiment 20000451 PARAMETER Experiment Name: At_CS6879_Shoots-Roots_P Parameter: Organism Value: A. thaliana
  misc_feature: MA Experiment 20000451 PARAMETER Experiment Name: At_CS6879_Shoots-Roots_P Parameter: Plant Line Value: CS6879 vs. WS
  misc_feature: MA Experiment 20000451 PARAMETER Experiment Name: At_CS6879_Shoots-Roots_P Parameter: Tissue Value: Roots
  misc_feature: MA Experiment ID: 20000460 Result: Up-regulated in Transcription
  misc_feature: MA Experiment 20000460 PARAMETER Experiment Name: At_10percent_PEG_P Parameter: Age (day) Value: 12
  misc_feature: MA Experiment 20000460 PARAMETER Experiment Name: At_10percent_PEG_P Parameter: Organism Value: A. thaliana
  misc_feature: MA Experiment 20000460 PARAMETER Experiment Name: At_10percent_PEG_P Parameter: Plant Line Value: WS
  misc_feature: MA Experiment 20000460 PARAMETER Experiment Name: At_10percent_PEG_P Parameter: Timepoint (day) Value: 12
  misc_feature: MA Experiment 20000460 PARAMETER Experiment Name: At_10percent_PEG_P Parameter: Tissue Value: Whole Plant
  misc_feature: MA Experiment 20000460 PARAMETER Experiment Name: At_10percent_PEG_P Parameter: Treatment Value: 10percent PEG vs. No Treatment
  misc_feature: MA Experiment ID: 20000527 Result: Up-regulated in Transcription
  misc_feature: MA Experiment 20000527 PARAMETER Experiment Name: At_10percent_PEG_P Parameter: Age (day) Value: 20
  misc_feature: MA Experiment 20000527 PARAMETER Experiment Name: At_10percent_PEG_P Parameter: Organism Value: A. thaliana
  misc_feature: MA Experiment 20000527 PARAMETER Experiment Name: At_10percent_PEG_P Parameter: Plant Line Value: WS
  misc_feature: MA Experiment 20000527 PARAMETER Experiment Name: At_10percent_PEG_P Parameter: Timepoint (day) Value: 20
  misc_feature: MA Experiment 20000527 PARAMETER Experiment Name: At_10percent_PEG_P Parameter: Tissue Value: Whole Plant
  misc_feature: MA Experiment 20000527 PARAMETER Experiment Name: At_10percent_PEG_P Parameter: Treatment Value: 10percent PEG vs. No Treatment
  misc_feature: MA Experiment ID: 20000794 Result: Down-regulated in Transcription
  misc_feature: MA Experiment 20000794 PARAMETER Experiment Name: At_Petals_P Parameter: Age (day) Value: 23-25 days
  misc_feature: MA Experiment 20000794 PARAMETER Experiment Name: At_Petals_P Parameter: Plant Line Value: WS
  misc_feature: MA Experiment 20000794 PARAMETER Experiment Name: At_Petals_P Parameter: Tissue Value: Petals vs. Whole plant
  misc_feature: MA Experiment ID: 20001247 Result: Up-regulated in Transcription
  misc_feature: MA Experiment 20001247 PARAMETER Experiment Name: At_Far-red-induction_P Parameter: Age (day) Value: 7
  misc_feature: MA Experiment 20001247 PARAMETER Experiment Name: At_Far-red-induction_P Parameter: Light Value: Far-red vs. White
  misc_feature: MA Experiment 20001247 PARAMETER Experiment Name: At_Far-red-induction_P Parameter: Organism Value: A. thaliana
  misc_feature: MA Experiment 20001247 PARAMETER Experiment Name: At_Far-red-induction_P Parameter: Plant Line Value: Columbia
  misc_feature: MA Experiment 20001247 PARAMETER Experiment Name: At_Far-red-induction_P Parameter: Timepoint (hr) Value: 1
  misc_feature: MA Experiment 20001247 PARAMETER Experiment Name: At_Far-red-induction_P Parameter: Tissue Value: Whole Plant
  misc_feature: MA Experiment ID: 20001450 Result: Up-regulated in Transcription
  misc_feature: MA Experiment 20001450 PARAMETER Experiment Name: At_Far-red-induction_P Parameter: Age (day) Value: 7
  misc_feature: MA Experiment 20001450 PARAMETER Experiment Name: At_Far-red-induction_P Parameter: Light Value: Far-red vs. White
  misc_feature: MA Experiment 20001450 PARAMETER Experiment Name: At_Far-red-induction_P Parameter: Organism Value: A. thaliana
  misc_feature: MA Experiment 20001450 PARAMETER Experiment Name: At_Far-red-induction_P Parameter: Plant Line Value: Columbia
  misc_feature: MA Experiment 20001450 PARAMETER Experiment Name: At_Far-red-induction_P Parameter: Timepoint (hr) Value: 8
  misc_feature: MA Experiment 20001450 PARAMETER Experiment Name: At_Far-red-induction_P Parameter: Tissue Value: Whole Plant
  misc_feature: MA Experiment ID: 20001451 Result: Up-regulated in Transcription
  misc_feature: MA Experiment 20001451 PARAMETER Experiment Name: At_Far-red-induction_P Parameter: Age (day) Value: 7
  misc_feature: MA Experiment 20001451 PARAMETER Experiment Name: At_Far-red-induction_P Parameter: Light Value: Far-red vs. White
  misc_feature: MA Experiment 20001451 PARAMETER Experiment Name: At_Far-red-induction_P Parameter: Organism Value: A. thaliana
  misc_feature: MA Experiment 20001451 PARAMETER Experiment Name: At_Far-red-induction_P Parameter: Plant Line Value: Columbia
  misc_feature: MA Experiment 20001451 PARAMETER Experiment Name: At_Far-red-induction_P Parameter: Timepoint (hr) Value: 24
  misc_feature: MA Experiment 20001451 PARAMETER Experiment Name: At_Far-red-induction_P Parameter: Tissue Value: Whole Plant
  misc_feature: MA Experiment ID: 20001458 Result: Up-regulated in Transcription
  misc_feature: MA Experiment 20001458 PARAMETER Experiment Name: At_50mM_NH4NO3_L-to-H_P Parameter: Age (day) Value: Undefined
  misc_feature: MA Experiment 20001458 PARAMETER Experiment Name: At_50mM_NH4NO3_L-to-H_P Parameter: Organism Value: Undefined
  misc_feature: MA Experiment 20001458 PARAMETER Experiment Name: At_50mM_NH4NO3_L-to-H_P Parameter: Plant Line Value: Undefined
  misc_feature: MA Experiment 20001458 PARAMETER Experiment Name: At_50mM_NH4NO3_L-to-H_P Parameter: Timepoint (hr) Value: 2
  misc_feature: MA Experiment 20001458 PARAMETER Experiment Name: At_50mM_NH4NO3_L-to-H_P Parameter: Tissue Value: Siliques
  misc_feature: MA Experiment 20001458 PARAMETER Experiment Name: At_50mM_NH4NO3_L-to-H_P Parameter: Treatment Value: 50mM NH4NO3 vs. 100mM Manitol
  misc_feature: MA Experiment ID: 20001459 Result: Down-regulated in Transcription
  misc_feature: MA Experiment 20001459 PARAMETER Experiment Name: At_50mM_NH4NO3_L-to-H_P Parameter: Age (day) Value: Undefined
  misc_feature: MA Experiment 20001459 PARAMETER Experiment Name: At_50mM_NH4NO3_L-to-H_P Parameter: Organism Value: Undefined
  misc_feature: MA Experiment 20001459 PARAMETER Experiment Name: At_50mM_NH4NO3_L-to-H_P Parameter: Plant Line Value: Undefined
  misc_feature: MA Experiment 20001459 PARAMETER Experiment Name: At_50mM_NH4NO3_L-to-H_P Parameter: Timepoint (hr) Value: 4
  misc_feature: MA Experiment 20001459 PARAMETER Experiment Name: At_50mM_NH4NO3_L-to-H_P Parameter: Tissue Value: Siliques
  misc_feature: MA Experiment 20001459 PARAMETER Experiment Name: At_50mM_NH4NO3_L-to-H_P Parameter: Treatment Value: 50mM NH4NO3 vs. 100mM Manitol
  misc_feature: MA Experiment ID: 20001504 Result: Down-regulated in Transcription
  misc_feature: MA Experiment 20001504 PARAMETER Experiment Name: At_Far-red-enriched_P Parameter: Age (day) Value: 10
  misc_feature: MA Experiment 20001504 PARAMETER Experiment Name: At_Far-red-enriched_P Parameter: Light Value: Far-red enriched vs. White
  misc_feature: MA Experiment 20001504 PARAMETER Experiment Name: At_Far-red-enriched_P Parameter: Organism Value: A. thaliana
  misc_feature: MA Experiment 20001504 PARAMETER Experiment Name: At_Far-red-enriched_P Parameter: Plant Line Value: Columbia
  misc_feature: MA Experiment 20001504 PARAMETER Experiment Name: At_Far-red-enriched_P Parameter: Timepoint (day) Value: 6
  misc_feature: MA Experiment 20001504 PARAMETER Experiment Name: At_Far-red-enriched_P Parameter: Tissue Value: Whole Plant
  misc_feature: MA Experiment ID: 20001554 Result: Down-regulated in Transcription
  misc_feature: MA Experiment 20001554 PARAMETER Experiment Name: At_Drought_Soil_Dry_P Parameter: Age (day) Value: 21
  misc_feature: MA Experiment 20001554 PARAMETER Experiment Name: At_Drought_Soil_Dry_P Parameter: Organism Value: A. thaliana
  misc_feature: MA Experiment 20001554 PARAMETER Experiment Name: At_Drought_Soil_Dry_P Parameter: Plant Line Value: WS
  misc_feature: MA Experiment 20001554 PARAMETER Experiment Name: At_Drought_Soil_Dry_P Parameter: Post Timepoint (hr) Value: None
  misc_feature: MA Experiment 20001554 PARAMETER Experiment Name: At_Drought_Soil_Dry_P Parameter: Post-Treatment Value: None
  misc_feature: MA Experiment 20001554 PARAMETER Experiment Name: At_Drought_Soil_Dry_P Parameter: Timepoint (day) Value: 7
  misc_feature: MA Experiment 20001554 PARAMETER Experiment Name: At_Drought_Soil_Dry_P Parameter: Treatment Value: Drought vs. No Drought
  misc_feature: MA Experiment ID: 20001555 Result: Down-regulated in Transcription
  misc_feature: MA Experiment 20001555 PARAMETER Experiment Name: At_Drought_Soil_Dry_P Parameter: Age (day) Value: 24
  misc_feature: MA Experiment 20001555 PARAMETER Experiment Name: At_Drought_Soil_Dry_P Parameter: Organism Value: A. thaliana
  misc_feature: MA Experiment 20001555 PARAMETER Experiment Name: At_Drought_Soil_Dry_P Parameter: Plant Line Value: WS
  misc_feature: MA Experiment 20001555 PARAMETER Experiment Name: At_Drought_Soil_Dry_P Parameter: Post Timepoint (hr) Value: None
  misc_feature: MA Experiment 20001555 PARAMETER Experiment Name: At_Drought_Soil_Dry_P Parameter: Post-Treatment Value: None
  misc_feature: MA Experiment 20001555 PARAMETER Experiment Name: At_Drought_Soil_Dry_P Parameter: Timepoint (day) Value: 10
  misc_feature: MA Experiment 20001555 PARAMETER Experiment Name: At_Drought_Soil_Dry_P Parameter: Treatment Value: Drought vs. No Drought
  misc_feature: MA Experiment ID: 20001556 Result: Down-regulated in Transcription
  misc_feature: MA Experiment 20001556 PARAMETER Experiment Name: At_Drought_Soil_Dry_P Parameter: Age (day) Value: 26
  misc_feature: MA Experiment 20001556 PARAMETER Experiment Name: At_Drought_Soil_Dry_P Parameter: Organism Value: A. thaliana
  misc_feature: MA Experiment 20001556 PARAMETER Experiment Name: At_Drought_Soil_Dry_P Parameter: Plant Line Value: WS
  misc_feature: MA Experiment 20001556 PARAMETER Experiment Name: At_Drought_Soil_Dry_P Parameter: Post Timepoint (hr) Value: None
  misc_feature: MA Experiment 20001556 PARAMETER Experiment Name: At_Drought_Soil_Dry_P Parameter: Post-Treatment Value: None
  misc_feature: MA Experiment 20001556 PARAMETER Experiment Name: At_Drought_Soil_Dry_P Parameter: Timepoint (day) Value: 12
  misc_feature: MA Experiment 20001556 PARAMETER Experiment Name: At_Drought_Soil_Dry_P Parameter: Treatment Value: Drought vs. No Drought
  misc_feature: MA Experiment ID: 20001557 Result: Down-regulated in Transcription
  misc_feature: MA Experiment 20001557 PARAMETER Experiment Name: At_Drought_Soil_Dry_P Parameter: Age (day) Value: 27
  misc_feature: MA Experiment 20001557 PARAMETER Experiment Name: At_Drought_Soil_Dry_P Parameter: Organism Value: A. thaliana
  misc_feature: MA Experiment 20001557 PARAMETER Experiment Name: At_Drought_Soil_Dry_P Parameter: Plant Line Value: WS
  misc_feature: MA Experiment 20001557 PARAMETER Experiment Name: At_Drought_Soil_Dry_P Parameter: Post Timepoint (hr) Value: 3
  misc_feature: MA Experiment 20001557 PARAMETER Experiment Name: At_Drought_Soil_Dry_P Parameter: Post-Treatment Value: Re-Water vs. No Drought
  misc_feature: MA Experiment 20001557 PARAMETER Experiment Name: At_Drought_Soil_Dry_P Parameter: Timepoint (day) Value: 13
  misc_feature: MA Experiment 20001557 PARAMETER Experiment Name: At_Drought_Soil_Dry_P Parameter: Treatment Value: Drought vs. No Drought
  misc_feature: MA Experiment ID: 20001558 Result: Down-regulated in Transcription
  misc_feature: MA Experiment 20001558 PARAMETER Experiment Name: At_Drought_Soil_Dry_P Parameter: Age (day) Value: 27
  misc_feature: MA Experiment 20001558 PARAMETER Experiment Name: At_Drought_Soil_Dry_P Parameter: Organism Value: A. thaliana
  misc_feature: MA Experiment 20001558 PARAMETER Experiment Name: At_Drought_Soil_Dry_P Parameter: Plant Line Value: WS
  misc_feature: MA Experiment 20001558 PARAMETER Experiment Name: At_Drought_Soil_Dry_P Parameter: Post Timepoint (hr) Value: 6
  misc_feature: MA Experiment 20001558 PARAMETER Experiment Name: At_Drought_Soil_Dry_P Parameter: Post-Treatment Value: Re-Water vs. No Drought
  misc_feature: MA Experiment 20001558 PARAMETER Experiment Name: At_Drought_Soil_Dry_P Parameter: Timepoint (day) Value: 13
  misc_feature: MA Experiment 20001558 PARAMETER Experiment Name: At_Drought_Soil_Dry_P Parameter: Treatment Value: Drought vs. No Drought
  misc_feature: MA Experiment ID: 20001559 Result: Down-regulated in Transcription
  misc_feature: MA Experiment 20001559 PARAMETER Experiment Name: At_Drought_Soil_Dry_P Parameter: Age (day) Value: 28
  misc_feature: MA Experiment 20001559 PARAMETER Experiment Name: At_Drought_Soil_Dry_P Parameter: Organism Value: A. thaliana
  misc_feature: MA Experiment 20001559 PARAMETER Experiment Name: At_Drought_Soil_Dry_P Parameter: Plant Line Value: WS
  misc_feature: MA Experiment 20001559 PARAMETER Experiment Name: At_Drought_Soil_Dry_P Parameter: Post Timepoint (hr) Value: 29
  misc_feature: MA Experiment 20001559 PARAMETER Experiment Name: At_Drought_Soil_Dry_P Parameter: Post-Treatment Value: Re-Water vs. No Drought
  misc_feature: MA Experiment 20001559 PARAMETER Experiment Name: At_Drought_Soil_Dry_P Parameter: Timepoint (day) Value: 14
  misc_feature: MA Experiment 20001559 PARAMETER Experiment Name: At_Drought_Soil_Dry_P Parameter: Treatment Value: Drought vs. No Drought
  misc_feature: MA Experiment ID: 20001560 Result: Down-regulated in Transcription
  misc_feature: MA Experiment 20001560 PARAMETER Experiment Name: At_Drought_Soil_Dry_P Parameter: Age (day) Value: 28
  misc_feature: MA Experiment 20001560 PARAMETER Experiment Name: At_Drought_Soil_Dry_P Parameter: Organism Value: A. thaliana
  misc_feature: MA Experiment 20001560 PARAMETER Experiment Name: At_Drought_Soil_Dry_P Parameter: Plant Line Value: WS
  misc_feature: MA Experiment 20001560 PARAMETER Experiment Name: At_Drought_Soil_Dry_P Parameter: Post Timepoint (hr) Value: None
  misc_feature: MA Experiment 20001560 PARAMETER Experiment Name: At_Drought_Soil_Dry_P Parameter: Post-Treatment Value: None
  misc_feature: MA Experiment 20001560 PARAMETER Experiment Name: At_Drought_Soil_Dry_P Parameter: Timepoint (day) Value: 14
  misc_feature: MA Experiment 20001560 PARAMETER Experiment Name: At_Drought_Soil_Dry_P Parameter: Treatment Value: Drought vs. No Drought
  misc_feature: MA Experiment ID: 20001755 Result: Down-regulated in Transcription
  misc_feature: MA Experiment 20001755 PARAMETER Experiment Name: At_50mM_NH4NO3_L-to-H_P Parameter: Timepoint (hr) Value: 2
  misc_feature: MA Experiment 20001755 PARAMETER Experiment Name: At_50mM_NH4NO3_L-to-H_P Parameter: Tissue Value: Leaf
  misc_feature: MA Experiment 20001755 PARAMETER Experiment Name: At_50mM_NH4NO3_L-to-H_P Parameter: Treatment Value: 50mM NH4NO3 vs 100mM Mannitol
  misc_feature: MA Experiment ID: 20001757 Result: Up-regulated in Transcription
  misc_feature: MA Experiment 20001757 PARAMETER Experiment Name: At_50mM_NH4NO3_L-to-H_P Parameter: Timepoint (hr) Value: 6
  misc_feature: MA Experiment 20001757 PARAMETER Experiment Name: At_50mM_NH4NO3_L-to-H_P Parameter: Tissue Value: Leaf
  misc_feature: MA Experiment 20001757 PARAMETER Experiment Name: At_50mM_NH4NO3_L-to-H_P Parameter: Treatment Value: 50mM NH4NO3 vs 100mM Mannitol
  misc_feature: MA Experiment ID: 20001906 Result: Down-regulated in Transcription
  misc_feature: MA Experiment 20001906 PARAMETER Experiment Name: At_Drought_Reproduction_P Parameter: Age (day) Value: 35
  misc_feature: MA Experiment 20001906 PARAMETER Experiment Name: At_Drought_Reproduction_P Parameter: Organism Value: A. thaliana
  misc_feature: MA Experiment 20001906 PARAMETER Experiment Name: At_Drought_Reproduction_P Parameter: Plant Line Value: WS
  misc_feature: MA Experiment 20001906 PARAMETER Experiment Name: At_Drought_Reproduction_P Parameter: Timepoint (day) Value: 5
  misc_feature: MA Experiment 20001906 PARAMETER Experiment Name: At_Drought_Reproduction_P Parameter: Tissue Value: Siliques
  misc_feature: MA Experiment 20001906 PARAMETER Experiment Name: At_Drought_Reproduction_P Parameter: Treatment Value: Drought vs. No Drought
  misc_feature: MA Experiment ID: 20001907 Result: Down-regulated in Transcription
  misc_feature: MA Experiment 20001907 PARAMETER Experiment Name: At_Drought_Reproduction_P Parameter: Age (day) Value: 37
  misc_feature: MA Experiment 20001907 PARAMETER Experiment Name: At_Drought_Reproduction_P Parameter: Organism Value: A. thaliana
  misc_feature: MA Experiment 20001907 PARAMETER Experiment Name: At_Drought_Reproduction_P Parameter: Plant Line Value: WS
  misc_feature: MA Experiment 20001907 PARAMETER Experiment Name: At_Drought_Reproduction_P Parameter: Timepoint (day) Value: 7
  misc_feature: MA Experiment 20001907 PARAMETER Experiment Name: At_Drought_Reproduction_P Parameter: Tissue Value: Siliques
  misc_feature: MA Experiment 20001907 PARAMETER Experiment Name: At_Drought_Reproduction_P Parameter: Treatment Value: Drought vs. No Drought
  misc_feature: MA Experiment ID: 20001908 Result: Down-regulated in Transcription
  misc_feature: MA Experiment 20001908 PARAMETER Experiment Name: At_Drought_Reproduction_P Parameter: Age (day) Value: 40
  misc_feature: MA Experiment 20001908 PARAMETER Experiment Name: At_Drought_Reproduction_P Parameter: Organism Value: A. thaliana
  misc_feature: MA Experiment 20001908 PARAMETER Experiment Name: At_Drought_Reproduction_P Parameter: Plant Line Value: WS
  misc_feature: MA Experiment 20001908 PARAMETER Experiment Name: At_Drought_Reproduction_P Parameter: Timepoint (day) Value: 10
  misc_feature: MA Experiment 20001908 PARAMETER Experiment Name: At_Drought_Reproduction_P Parameter: Tissue Value: Siliques
  misc_feature: MA Experiment 20001908 PARAMETER Experiment Name: At_Drought_Reproduction_P Parameter: Treatment Value: Drought vs. No Drought

SEQ ID NO: 43951 - protein, 253 aa, Arabidopsis thaliana; identical to SEQ ID NO: 27098
  peptide (1)..(253): Ceres Seq. ID no. 12647741
  misc_feature (1)..(249): Homolog of NCBI NO: 18416995 NR Description: putative protein
  misc_feature (1)..(253): Homolog of NCBI NO: 18400774 NR Description: expressed protein
  misc_feature (1)..(249): Homolog of NCBI NO: 18416995 NR Description: putative protein
  misc_feature (1)..(253): Homolog of NCBI NO: 18400774 NR Description: expressed protein
  misc_feature (1)..(249): Homolog of NCBI NO: 18416995 NR Description: putative protein
  misc_feature (1)..(253): Homolog of NCBI NO: 18400774 NR Description: expressed protein

SEQ ID NO: 43952 - protein, 205 aa, Arabidopsis thaliana; identical to SEQ ID NO: 27099
  peptide (1)..(205): Ceres Seq. ID no. 12647742
  misc_feature (1)..(201): Homolog of NCBI NO: 18416995 NR Description: putative protein
  misc_feature (1)..(205): Homolog of NCBI NO: 18400774 NR Description: expressed protein
  misc_feature (1)..(201): Homolog of NCBI NO: 18416995 NR Description: putative protein
  misc_feature (1)..(205): Homolog of NCBI NO: 18400774 NR Description: expressed protein
  misc_feature (1)..(201): Homolog of NCBI NO: 18416995 NR Description: putative protein
  misc_feature (1)..(205): Homolog of NCBI NO: 18400774 NR Description: expressed protein

SEQ ID NO: 43953 - protein, 174 aa, Arabidopsis thaliana; identical to SEQ ID NO: 27100
  peptide (1)..(174): Ceres Seq. ID no. 12647743
  misc_feature (1)..(170): Homolog of NCBI NO: 18416995 NR Description: putative protein
  misc_feature (1)..(174): Homolog of NCBI NO: 18400774 NR Description: expressed protein
  misc_feature (1)..(170): Homolog of NCBI NO: 18416995 NR Description: putative protein
  misc_feature (1)..(174): Homolog of NCBI NO: 18400774 NR Description: expressed protein
  misc_feature (1)..(170): Homolog of NCBI NO: 18416995 NR Description: putative protein
  misc_feature (1)..(174): Homolog of NCBI NO: 18400774 NR Description: expressed protein

SEQ ID NO: 43954 - DNA, 889 bp, Arabidopsis thaliana
  misc_feature (1)..(889): Ceres Seq. ID no. 12466326
  misc_feature: MA Experiment ID: 20000179 Result: Up-regulated in Transcription
  misc_feature: MA Experiment 20000179 PARAMETER Experiment Name: At_Germinating_Seeds_P Parameter: Age (hr) Value: 6 vs. 0
  misc_feature: MA Experiment 20000179 PARAMETER Experiment Name: At_Germinating_Seeds_P Parameter: Tissue Value: Germinating Seeds
  misc_feature: MA Experiment ID: 20000180 Result: Up-regulated in Transcription
  misc_feature: MA Experiment 20000180 PARAMETER Experiment Name: At_Germinating_Seeds_P Parameter: Age (hr) Value: 24 vs. 0
  misc_feature: MA Experiment 20000180 PARAMETER Experiment Name: At_Germinating_Seeds_P Parameter: Tissue Value: Germinating Seeds
  misc_feature: MA Experiment ID: 20001451 Result: Down-regulated in Transcription
  misc_feature: MA Experiment 20001451 PARAMETER Experiment Name: At_Far-red-induction_P Parameter: Age (day) Value: 7
  misc_feature: MA Experiment 20001451 PARAMETER Experiment Name: At_Far-red-induction_P Parameter: Light Value: Far-red vs. White
  misc_feature: MA Experiment 20001451 PARAMETER Experiment Name: At_Far-red-induction_P Parameter: Organism Value: A. thaliana
  misc_feature: MA Experiment 20001451 PARAMETER Experiment Name: At_Far-red-induction_P Parameter: Plant Line Value: Columbia
  misc_feature: MA Experiment 20001451 PARAMETER Experiment Name: At_Far-red-induction_P Parameter: Timepoint (hr) Value: 24
  misc_feature: MA Experiment 20001451 PARAMETER Experiment Name: At_Far-red-induction_P Parameter: Tissue Value: Whole Plant
  misc_feature: MA Experiment ID: 20001560 Result: Up-regulated in Transcription
  misc_feature: MA Experiment 20001560 PARAMETER Experiment Name: At_Drought_Soil_Dry_P Parameter: Age (day) Value: 28
  misc_feature: MA Experiment 20001560 PARAMETER Experiment Name: At_Drought_Soil_Dry_P Parameter: Organism Value: A. thaliana
  misc_feature: MA Experiment 20001560 PARAMETER Experiment Name: At_Drought_Soil_Dry_P Parameter: Plant Line Value: WS
  misc_feature: MA Experiment 20001560 PARAMETER Experiment Name: At_Drought_Soil_Dry_P Parameter: Post Timepoint (hr) Value: None
  misc_feature: MA Experiment 20001560 PARAMETER Experiment Name: At_Drought_Soil_Dry_P Parameter: Post-Treatment Value: None
  misc_feature: MA Experiment 20001560 PARAMETER Experiment Name: At_Drought_Soil_Dry_P Parameter: Timepoint (day) Value: 14
  misc_feature: MA Experiment 20001560 PARAMETER Experiment Name: At_Drought_Soil_Dry_P Parameter: Treatment Value: Drought vs. No Drought
acttttcagcgtttctgaccaaattctctccgtgtttccttctgcttcaggtgatattttaacaaagttcttagtacaatgggatctgttgatgctgctaatggaagtgggaagaaacctacagttatatttgttcttggtggtccaggaagtggaaaaggtacccagtgtgcttatattgttgaacattatggttacacacatctgagtgctggagatcttcttagagctgagattaaatcaggttctgaaaatggaactatgatccagaatatgattaaagaggggaagattgtaccttctgaggttactatcaagcttctacagaaagctattcaggaaaacgggaatgacaagttcctcattgatggtttccctcgtaatgaggaaaaccgagcagcatttgaaaaagttactgagattgaaccaaagtttgtcttattcttcgattgtcctgaggaagagatggagaagcgcctgttgggccgaaaccaggggagagaggatgacaatattgagactataaggaagcgctttaaggtgtttcttgaatctagcttaccagtgattcattactacgaagctaaggggaaagttaggaagattaatgctgcaaagcccattgaagctgtcttcgaggaggtgaaggcaattttttctcctgaagctgagaaggttgaagcctaggctgcagcatcgtaaaaagataccgaaaacccgataaattgatcaggtagagttgggtgtgttgcatctttcttacaggaagtctctgcttggccgtatttgtttttttgcttattaaccatatgattgattactgttattattatacacaatttacctattatataatttttgttttgtttcaatttttgtatttgatggg

SEQ ID NO: 43955 - protein, 202 aa, Arabidopsis thaliana [sequence omitted]

SEQ ID NO: 43956 - protein, 141 aa, Arabidopsis thaliana
  peptide (1)..(141): Ceres Seq. ID no. 12466328
  misc_feature (1)..(111): Pfam Name: Adenylate kinase Pfam Description: Adenylate kinase
  misc_feature (1)..(132): Homolog of NCBI NO: 28374307 NR Description: Similar to RIKEN cDNA 0610011D08 gene [Xenopus
  misc_feature (1)..(134): Homolog of NCBI NO: 3913952 NR Description: ADENYLATE KINASE (ATP-AMP TRANSPHOSPHORYLASE)
  misc_feature (1)..(95): Homolog of NCBI NO: 5305496 NR Description: adenylate kinase [Ceratopteris richardii]
  misc_feature (1)..(133): Homolog of NCBI NO: 34897826 NR Description: putative UMP/CMP kinase [Oryza sativa (japonica
  misc_feature (1)..(135): Homolog of NCBI NO: 18411518 NR Description: URIDYLATE KINASE-like protein
  misc_feature (1)..(135): Homolog of NCBI NO: 11260827 NR Description: URIDYLATE KINASE-like protein - Arabidopsis
  misc_feature (1)..(140): Homolog of NCBI NO: 6683813 NR Description: UMP/CMP kinase b [Oryza sativa]
  misc_feature (1)..(140): Homolog of NCBI NO: 6683811 NR Description: UMP/CMP kinase a [Oryza sativa]
  misc_feature (1)..(140): Homolog of NCBI NO: 30690243 NR Description: predicted protein [Arabidopsis thaliana]
  misc_feature (1)..(141): Homolog of NCBI NO: 30690246 NR Description: predicted protein [Arabidopsis thaliana]
MIQNMIKEGKIVPSEVTIKLLQKAIQENGNDKFLIDGFPRNEENRAAFEKVTEIEPKFVLFFDCPEEEMEKRLLGRNQGREDDNIETIRKRFKVFLESSLPVIHYYEAKGKVRKINAAKPIEAVFEEVKAIFSPEAEKVEA

SEQ ID NO: 43957 - protein, 137 aa, Arabidopsis thaliana
  peptide (1)..(137): Ceres Seq. ID no. 12466329
  misc_feature (1)..(107): Pfam Name: Adenylate kinase Pfam Description: Adenylate kinase
  misc_feature (1)..(128): Homolog of NCBI NO: 28374307 NR Description: Similar to RIKEN cDNA 0610011D08 gene [Xenopus
  misc_feature (1)..(130): Homolog of NCBI NO: 3913952 NR Description: ADENYLATE KINASE (ATP-AMP TRANSPHOSPHORYLASE)
  misc_feature (1)..(91): Homolog of NCBI NO: 5305496 NR Description: adenylate kinase [Ceratopteris richardii]
  misc_feature (1)..(129): Homolog of NCBI NO: 34897826 NR Description: putative UMP/CMP kinase [Oryza sativa (japonica
  misc_feature (1)..(131): Homolog of NCBI NO: 18411518 NR Description: URIDYLATE KINASE-like protein
  misc_feature (1)..(131): Homolog of NCBI NO: 11260827 NR Description: URIDYLATE KINASE-like protein - Arabidopsis
  misc_feature (1)..(136): Homolog of NCBI NO: 6683813 NR Description: UMP/CMP kinase b [Oryza sativa]
  misc_feature (1)..(136): Homolog of NCBI NO: 6683811 NR Description: UMP/CMP kinase a [Oryza sativa]
  misc_feature (1)..(136): Homolog of NCBI NO: 30690243 NR Description: predicted protein [Arabidopsis thaliana]
  misc_feature (1)..(137): Homolog of NCBI NO: 30690246 NR Description: predicted protein [Arabidopsis thaliana]
MIKEGKIVPSEVTIKLLQKAIQENGNDKFLIDGFPRNEENRAAFEKVTEIEPKFVLFFDCPEEEMEKRLLGRNQGREDDNIETIRKRFKVFLESSLPVIHYYEAKGKVRKINAAKPIEAVFEEVKAIFSPEAEKVEA

SEQ ID NO: 43958 - DNA, 1650 bp, Arabidopsis thaliana
  misc_feature (1)..(1650): Ceres Seq. ID no. 12580285
  misc_feature: MA Experiment ID: 20000328 Result: Down-regulated in Transcription
  misc_feature: MA Experiment 20000328 PARAMETER Experiment Name: At_42deg_Heat_Sub_P Parameter: Age (day) Value: 14
  misc_feature: MA Experiment 20000328 PARAMETER Experiment Name: At_42deg_Heat_Sub_P Parameter: Organism Value: A. thaliana
  misc_feature: MA Experiment 20000328 PARAMETER Experiment Name: At_42deg_Heat_Sub_P Parameter: Plant Line Value: WS
  misc_feature: MA Experiment 20000328 PARAMETER Experiment Name: At_42deg_Heat_Sub_P Parameter: Temperature (deg C) Value: 42 vs. 22
  misc_feature: MA Experiment 20000328 PARAMETER Experiment Name: At_42deg_Heat_Sub_P Parameter: Timepoint (hr) Value: 6
  misc_feature: MA Experiment 20000328 PARAMETER Experiment Name: At_42deg_Heat_Sub_P Parameter: Tissue Value: Aerial
cacaaaataatataaagtaaaaatatttcataattcgtctctcaccggaaaaataaataaagttagagagagagattcataatcatcaaacccacaaatccttttttttttttttgttaaaacccacaaatccttactcgtacggatctctctctctttaatatcctaattcttctcttcatcgatctgagatttttacgttttcatcggcttgaaagtttgaagagttttgtagcctgaaaaatggcgtcagtgggtatagctcctaatcctggagcaagagactctactggtgttgataaattgcctgaagaaatgaatgacatgaaaattcgtgacgataaagaaatggaagcgacagtggtagatggaaatggaacagagactggacatatcattgtgactactattggtggtagaaatggccaaccaaaacagacaattagctacatggctgagcgtgttgttggtcacggatcttttggtgttgtgttccaagcgaaatgtcttgagacaggagaaactgttgcgataaagaaagttttacaagataggaggtacaagaaccgtgagcttcaaaccatgaggctacttgaccatcctaatgttgtgtctctgaaacattgtttcttctcaaccactgaaaaagatgagctttacctcaatcttgttcttgagtacgttccagaaactgttcatcgtgttatcaaacactacaacaaactgaatcagagaatgcctcttatatacgtcaaactttacacttatcagatttttagagccttatcttacattcaccgatgcattggtgtgtgtcatcgtgacataaaacctcaaaacttgttggtaaatccgcacactcatcaagtaaagctatgtgattttggaagtgcaaaagtattggtaaaaggagaaccaaacatttcctacatctgctcgaggtattacagagcacctgaacttatttttggagcaaccgagtatacgacagccattgatgtctggtctgcaggatgtgttctagctgaactattgcttggacagcccttgttccctggtgagagcggtgttgatcaacttgtagagattatcaaggtcttgggaacgcctactagagaagaaatcaagtgcatgaacccaaactacacggaattcaaattccctcagattaaagctcatccatggcacaagattttccacaaacgcatgcctccagaagctgttgatttggtctcaagacttcttcaatactctcctaatctacgaagtgccgctctcgacacattagtccacccattctttgatgagttaagagacccaaacgcacgtctacctaatggacgtttccttccaccgcttttcaacttcaagcctcacgagctgaaaggtgtaccattggagatggtagctaagttagtacctgagcatgcaaggaagcagtgtccttggctcggtttgtgatttcctcttaatgtagcatgaacacaacaaacacttcttataaattacctctctatgtatcaatatgtcacaaactgatatgcaccctttgtttgttgtatgagtagagaaaaaaagagttattactatggttggttggttcataatgtaaaagcccaccaagattttttatctagataaagagtttgc

SEQ ID NO: 43959 - protein, 405 aa, Arabidopsis thaliana
  peptide (1)..(405): Ceres Seq. ID no. 12580286
  misc_feature (69)..(353): Pfam Name: Protein kinase domain Pfam Description: Protein kinase domain
  misc_feature (1)..(404): Homolog of NCBI NO: 481018 NR Description: protein kinase MSK-3 (EC 2.7.1.-) [similarity] -
  misc_feature (1)..(405): Homolog of NCBI NO: 11133532 NR Description: Shaggy-related protein kinase NtK-1
  misc_feature (1)..(405): Homolog of NCBI NO: 1709127 NR Description: Glycogen synthase kinase-3 homolog MsK-1
  misc_feature (1)..(405): Homolog of NCBI NO: 15230058 NR Description: shaggy related protein kinase, ASK-GAMMA
  misc_feature (1)..(405): Homolog of NCBI NO: 21553877 NR Description: shaggy related protein kinase ASK-GAMMA
  misc_feature (1)..(74): Homolog of NCBI NO: 7434274 NR Description: hypothetical protein A_IG002P16.21 - Arabidopsis
  misc_feature (65)..(405): Homolog of NCBI NO: 7434274 NR Description: hypothetical protein A_IG002P16.21 - Arabidopsis
  misc_feature (1)..(405): Homolog of NCBI NO: 2398519 NR Description: shaggy-like kinase alpha [Arabidopsis thaliana]
  misc_feature (1)..(405): Homolog of NCBI NO: 541901 NR Description: protein kinase ASK-alpha (EC 2.7.1.-)
  misc_feature (1)..(405): Homolog of NCBI NO: 18421039 NR Description: shaggy-like kinase alpha
MASVGIAPNPGARDSTGVDKLPEEMNDMKIRDDKEMEATVVDGNGTETGHIIVTTIGGRNGQPKQTISYMAERVVGHGSFGVVFQAKCLETGETVAIKKVLQDRRYKNRELQTMRLLDHPNVVSLKHCFFSTTEKDELYLNLVLEYVPETVHRVIKHYNKLNQRMPLIYVKLYTYQIFRALSYIHRCIGVCHRDIKPQNLLVNPHTHQVKLCDFGSAKVLVKGEPNISYICSRYYRAPELIFGATEYTTAIDVWSAGCVLAELLLGQPLFPGESGVDQLVEIIKVLGTPTREEIKCMNPNYTEFKFPQIKAHPWHKIFHKRMPPEAVDLVSRLLQYSPNLRSAALDTLVHPFFDELRDPNARLPNGRFLPPLFNFKPHELKGVPLEMVAKLVPEHARKQCPWLGL

SEQ ID NO: 43960 - protein, 381 aa, Arabidopsis thaliana
  peptide (1)..(381): Ceres Seq. ID no. 12580287
  misc_feature (45)..(329): Pfam Name: Protein kinase domain Pfam Description: Protein kinase domain
  misc_feature (1)..(380): Homolog of NCBI NO: 481018 NR Description: protein kinase MSK-3 (EC 2.7.1.-) [similarity] -
  misc_feature (1)..(381): Homolog of NCBI NO: 11133532 NR Description: Shaggy-related protein kinase NtK-1
  misc_feature (1)..(381): Homolog of NCBI NO: 1709127 NR Description: Glycogen synthase kinase-3 homolog MsK-1
  misc_feature (1)..(381): Homolog of NCBI NO: 15230058 NR Description: shaggy related protein kinase, ASK-GAMMA
  misc_feature (1)..(381): Homolog of NCBI NO: 21553877 NR Description: shaggy related protein kinase ASK-GAMMA
  misc_feature (1)..(50): Homolog of NCBI NO: 7434274 NR Description: hypothetical protein A_IG002P16.21 - Arabidopsis
  misc_feature (41)..(381): Homolog of NCBI NO: 7434274 NR Description: hypothetical protein A_IG002P16.21 - Arabidopsis
  misc_feature (1)..(381): Homolog of NCBI NO: 2398519 NR Description: shaggy-like kinase alpha [Arabidopsis thaliana]
  misc_feature (1)..(381): Homolog of NCBI NO: 541901 NR Description: protein kinase ASK-alpha (EC 2.7.1.-)
  misc_feature (1)..(381): Homolog of NCBI NO: 18421039 NR Description: shaggy-like kinase alpha
MNDMKIRDDKEMEATVVDGNGTETGHIIVTTIGGRNGQPKQTISYMAERVVGHGSFGVVFQAKCLETGETVAIKKVLQDRRYKNRELQTMRLLDHPNVVSLKHCFFSTTEKDELYLNLVLEYVPETVHRVIKHYNKLNQRMPLIYVKLYTYQIFRALSYIHRCIGVCHRDIKPQNLLVNPHTHQVKLCDFGSAKVLVKGEPNISYICSRYYRAPELIFGATEYTTAIDVWSAGCVLAELLLGQPLFPGESGVDQLVEIIKVLGTPTREEIKCMNPNYTEFKFPQIKAHPWHKIFHKRMPPEAVDLVSRLLQYSPNLRSAALDTLVHPFFDELRDPNARLPNGRFLPPLFNFKPHELKGVPLEMVAKLVPEHARKQCPWLGL

SEQ ID NO: 43961 - protein, 378 aa, Arabidopsis thaliana
  peptide (1)..(378): Ceres Seq. ID no. 12580288
  misc_feature (42)..(326): Pfam Name: Protein kinase domain Pfam Description: Protein kinase domain
  misc_feature (1)..(377): Homolog of NCBI NO: 481018 NR Description: protein kinase MSK-3 (EC 2.7.1.-) [similarity] -
  misc_feature (1)..(378): Homolog of NCBI NO: 11133532 NR Description: Shaggy-related protein kinase NtK-1
  misc_feature (1)..(378): Homolog of NCBI NO: 1709127 NR Description: Glycogen synthase kinase-3 homolog MsK-1
  misc_feature (1)..(378): Homolog of NCBI NO: 15230058 NR Description: shaggy related protein kinase, ASK-GAMMA
  misc_feature (1)..(378): Homolog of NCBI NO: 21553877 NR Description: shaggy related protein kinase ASK-GAMMA
  misc_feature (1)..(47): Homolog of NCBI NO: 7434274 NR Description: hypothetical protein A_IG002P16.21 - Arabidopsis
  misc_feature (38)..(378): Homolog of NCBI NO: 7434274 NR Description: hypothetical protein A_IG002P16.21 - Arabidopsis
  misc_feature (1)..(378): Homolog of NCBI NO: 2398519 NR Description: shaggy-like kinase alpha [Arabidopsis thaliana]
  misc_feature (1)..(378): Homolog of NCBI NO: 541901 NR Description: protein kinase ASK-alpha (EC 2.7.1.-)
  misc_feature (1)..(378): Homolog of NCBI NO: 18421039 NR Description: shaggy-like kinase alpha
MKIRDDKEMEATVVDGNGTETGHIIVTTIGGRNGQPKQTISYMAERVVGHGSFGVVFQAKCLETGETVAIKKVLQDRRYKNRELQTMRLLDHPNVVSLKHCFFSTTEKDELYLNLVLEYVPETVHRVIKHYNKLNQRMPLIYVKLYTYQIFRALSYIHRCIGVCHRDIKPQNLLVNPHTHQVKLCDFGSAKVLVKGEPNISYICSRYYRAPELIFGATEYTTAIDVWSAGCVLAELLLGQPLFPGESGVDQLVEIIKVLGTPTREEIKCMNPNYTEFKFPQIKAHPWHKIFHKRMPPEAVDLVSRLLQYSPNLRSAALDTLVHPFFDELRDPNARLPNGRFLPPLFNFKPHELKGVPLEMVAKLVPEHARKQCPWLGL

SEQ ID NO: 43962 - DNA, 1527 bp, Arabidopsis thaliana
  misc_feature (1)..(1527): Ceres Seq. ID no. 12466320
  misc_feature: MA Experiment ID: 20001905 Result: Down-regulated in Transcription
  misc_feature: MA Experiment 20001905 PARAMETER Experiment Name: At_Drought_Reproduction_P Parameter: Age (day) Value: 40
  misc_feature: MA Experiment 20001905 PARAMETER Experiment Name: At_Drought_Reproduction_P Parameter: Organism Value: A. thaliana
  misc_feature: MA Experiment 20001905 PARAMETER Experiment Name: At_Drought_Reproduction_P Parameter: Plant Line Value: WS
  misc_feature: MA Experiment 20001905 PARAMETER Experiment Name: At_Drought_Reproduction_P Parameter: Timepoint (day) Value: 10
  misc_feature: MA Experiment 20001905 PARAMETER Experiment Name: At_Drought_Reproduction_P Parameter: Tissue Value: Rosettes
  misc_feature: MA Experiment 20001905 PARAMETER Experiment Name: At_Drought_Reproduction_P Parameter: Treatment Value: Drought vs. No Drought
gaacctttaaaactcagattttatctctcttcagtctccacgctgcttgaaactgaagcagagaagcaaagagatgtcttttgaggagtttacgccgttaaacgagaagtctcttgtagactacatcaagtcaacacctgctctctcttccaagatcggagccgacaagtccgatgatgatttggttatcaaagaagttggagatggcaatctcaatttcgttttcatcgttgttggatcctctggttctcttgtcatcaaacaggctcttccatatattcgctgtatcggtgaatcatggccaatgacgaaagaaagagcttattttgaagcaacaactttgagaaagcatggaaatttatcacctgatcatgttcctgaagtctaccattttgacagaacaatggcgttgattggaatgagataccttgagcctcctcatatcattctccgcaaaggactcattgctgggattgagtatcctttcctcgcagaccacatgtctgattacatggcgaagactctcttcttcacttctctcctctatcacgataccacagagcacagaagagcagtaaccgaattttgtggtaatgtggagttatgccgattaacggagcaagttgtgttttcggacccatatagagtttccacatttaatcgttggacttcaccttatcttgatgatgatgctaaggctgtgcgcgaagacagtgccttgaagctcgaaatcgcagagctaaaatcgatgttctgtgaaagagctcaagctttaatacatggtgatcttcatactggttctgtcatggttactcaagattcaacgcaagttatagatccagagttttcgttctatggaccgatgggtttcgatattggcgcttatcttggtaacttgatactagctttctttgcacaagatggacacgccactcaggaaaatgatcgaaaagaatacaagcagtggatcttgagaaccattgagcaaacttggaatttgtttaacaaaaggttcattgcgctatgggatcaaaacaaagatggaccaggcgaagcataccttgcagatatctataacaataccgaggttttgaagtttgttcaagaaaactacatgaggaatttgttgcatgactcactcggattcggcgctgcaaagatgattaggagaattgtgggagtggcacatgttgaggactttgaatcaatcgaagaagataagcgaagagctatttgcgagagaagtgcactcgagtttgcgaagatgcttctcaaggaaaggagaaagtttaagagtatcggtgaagttgtttcagcaattcaacaacaaagctaagacaatttataatgttcttctgctgaagttcttgaaagtcttgttttgatcttgggagttaattggcaagaaaagtatcacaatgctgcttatcacatggatttgtaatttagtggtttgtggtggtgatgatggtattcaaatgcattttgttacaataataataataaaagtttagaaatattttcact

SEQ ID NO: 43963 - protein, 420 aa, Arabidopsis thaliana
  peptide (1)..(420): Ceres Seq. ID no. 12466321
  misc_feature (36)..(318): Homolog of NCBI NO: 30022120 NR Description: 5-methylthioribose kinase [Bacillus cereus ATCC
  misc_feature (303)..(413): Homolog of NCBI NO: 37999472 NR Description: Methylthioribose kinase (MTR kinase)
  misc_feature (7)..(321): Homolog of NCBI NO: 37999472 NR Description: Methylthioribose kinase (MTR kinase)
  misc_feature (303)..(413): Homolog of NCBI NO: 16078420 NR Description: ykrT [Bacillus subtilis]
  misc_feature (7)..(321): Homolog of NCBI NO: 16078420 NR Description: ykrT [Bacillus subtilis]
  misc_feature (29)..(420): Homolog of NCBI NO: 18921366 NR Description: 5-methylthioribose kinase [Klebsiella pneumoniae]
  misc_feature (1)..(412): Homolog of NCBI NO: 16265283 NR Description: conserved hypothetical protein [Sinorhizobium
  misc_feature (6)..(420): Homolog of NCBI NO: 13476069 NR Description: hypothetical protein [Mesorhizobium loti]
  misc_feature (5)..(418): Homolog of NCBI NO: 27380009 NR Description: bll4898 [Bradyrhizobium japonicum]
  misc_feature (1)..(420): Homolog of NCBI NO: 18402794 NR Description: expressed protein
MSFEEFTPLNEKSLVDYIKSTPALSSKIGADKSDDDLVIKEVGDGNLNFVFIVVGSSGSLVIKQALPYIRCIGESWPMTKERAYFEATTLRKHGNLSPDHVPEVYHFDRTMALIGMRYLEPPHIILRKGLIAGIEYPFLADHMSDYMAKTLFFTSLLYHDTTEHRRAVTEFCGNVELCRLTEQVVFSDPYRVSTFNRWTSPYLDDDAKAVREDSALKLEIAELKSMFCERAQALIHGDLHTGSVMVTQDSTQVIDPEFSFYGPMGFDIGAYLGNLILAFFAQDGHATQENDRKEYKQWILRTIEQTWNLFNKRFIALWDQNKDGPGEAYLADIYNNTEVLKFVQENYMRNLLHDSLGFGAAKMIRRIVGVAHVEDFESIEEDKRRAICERSALEFAKMLLKERRKFKSIGEVVSAIQQQS

SEQ ID NO: 43964 - protein, 343 aa, Arabidopsis thaliana
  peptide (1)..(343): Ceres Seq. ID no. 12466322
  misc_feature (1)..(241): Homolog of NCBI NO: 30022120 NR Description: 5-methylthioribose kinase [Bacillus cereus ATCC
  misc_feature (226)..(336): Homolog of NCBI NO: 37999472 NR Description: Methylthioribose kinase (MTR kinase)
  misc_feature (1)..(244): Homolog of NCBI NO: 37999472 NR Description: Methylthioribose kinase (MTR kinase)
  misc_feature (226)..(336): Homolog of NCBI NO: 16078420 NR Description: ykrT [Bacillus subtilis]
  misc_feature (1)..(244): Homolog of NCBI NO: 16078420 NR Description: ykrT [Bacillus subtilis]
  misc_feature (1)..(343): Homolog of NCBI NO: 18921366 NR Description: 5-methylthioribose kinase [Klebsiella pneumoniae]
  misc_feature (1)..(335): Homolog of NCBI NO: 16265283 NR Description: conserved hypothetical protein [Sinorhizobium
  misc_feature (1)..(343): Homolog of NCBI NO: 13476069 NR Description: hypothetical protein [Mesorhizobium loti]
  misc_feature (1)..(341): Homolog of NCBI NO: 27380009 NR Description: bll4898 [Bradyrhizobium japonicum]
  misc_feature (1)..(343): Homolog of NCBI NO: 18402794 NR Description: expressed protein
MTKERAYFEATTLRKHGNLSPDHVPEVYHFDRTMALIGMRYLEPPHIILRKGLIAGIEYPFLADHMSDYMAKTLFFTSLLYHDTTEHRRAVTEFCGNVELCRLTEQVVFSDPYRVSTFNRWTSPYLDDDAKAVREDSALKLEIAELKSMFCERAQALIHGDLHTGSVMVTQDSTQVIDPEFSFYGPMGFDIGAYLGNLILAFFAQDGHATQENDRKEYKQWILRTIEQTWNLFNKRFIALWDQNKDGPGEAYLADIYNNTEVLKFVQENYMRNLLHDSLGFGAAKMIRRIVGVAHVEDFESIEEDKRRAICERSALEFAKMLLKERRKFKSIGEVVSAIQQQS

SEQ ID NO: 43965 - protein, 310 aa, Arabidopsis thaliana
  peptide (1)..(310): Ceres Seq. ID no. 12466323
  misc_feature (1)..(208): Homolog of NCBI NO: 30022120 NR Description: 5-methylthioribose kinase [Bacillus cereus ATCC
  misc_feature (193)..(303): Homolog of NCBI NO: 37999472 NR Description: Methylthioribose kinase (MTR kinase)
  misc_feature (1)..(211): Homolog of NCBI NO: 37999472 NR Description: Methylthioribose kinase (MTR kinase)
  misc_feature (193)..(303): Homolog of NCBI NO: 16078420 NR Description: ykrT [Bacillus subtilis]
  misc_feature (1)..(211): Homolog of NCBI NO: 16078420 NR Description: ykrT [Bacillus subtilis]
  misc_feature (1)..(310): Homolog of NCBI NO: 18921366 NR Description: 5-methylthioribose kinase [Klebsiella pneumoniae]
  misc_feature (1)..(302): Homolog of NCBI NO: 16265283 NR Description: conserved hypothetical protein [Sinorhizobium
  misc_feature (1)..(310): Homolog of NCBI NO: 13476069 NR Description: hypothetical protein [Mesorhizobium loti]
  misc_feature (1)..(308): Homolog of NCBI NO: 27380009 NR Description: bll4898 [Bradyrhizobium japonicum]
  misc_feature (1)..(310): Homolog of NCBI NO: 18402794 NR Description: expressed protein
MALIGMRYLEPPHIILRKGLIAGIEYPFLADHMSDYMAKTLFFTSLLYHDTTEHRRAVTEFCGNVELCRLTEQVVFSDPYRVSTFNRWTSPYLDDDAKAVREDSALKLEIAELKSMFCERAQALIHGDLHTGSVMVTQDSTQVIDPEFSFYGPMGFDIGAYLGNLILAFFAQDGHATQENDRKEYKQWILRTIEQTWNLFNKRFIALWDQNKDGPGEAYLADIYNNTEVLKFVQENYMRNLLHDSLGFGAAKMIRRIVGVAHVEDFESIEEDKRRAICERSALEFAKMLLKERRKFKSIGEVVSAIQQQS

SEQ ID NO: 43966 - DNA, 970 bp, Arabidopsis thaliana
  misc_feature (1)..(970): Ceres Seq. ID no. 13503867
  misc_feature: MA Experiment ID: 20000179 Result: Down-regulated in Transcription
  misc_feature: MA Experiment 20000179 PARAMETER Experiment Name: At_Germinating_Seeds_P Parameter: Age (hr) Value: 6 vs. 0
  misc_feature: MA Experiment 20000179 PARAMETER Experiment Name: At_Germinating_Seeds_P Parameter: Tissue Value: Germinating Seeds
  misc_feature: MA Experiment ID: 20000180 Result: Down-regulated in Transcription
  misc_feature: MA Experiment 20000180 PARAMETER Experiment Name: At_Germinating_Seeds_P Parameter: Age (hr) Value: 24 vs. 0
  misc_feature: MA Experiment 20000180 PARAMETER Experiment Name: At_Germinating_Seeds_P Parameter: Tissue Value: Germinating Seeds
accattgcataattatcggatgttgagggattcgtatcttggagccgaagtgttgttttcttatagaaggattttgatttcttctgcaaaattcgatcgatagtgacgagaaagatcctaagatggcgaccgcaagcgagagttcttcatctaagagatggcttccacttgaatctaacccagatgttatgaatcagtatctctggggacttggtcttgcccctgatgaagcagagtgcaatgatgtgtatgggttagacgatgaacttctagagatggttccaaagcctgttcttgctgttctcttcctttacccaatcaccaaaaagagtgaagaagagagaatcgagcaagacaaggaaattaaggaaaaggtgcatagcgataaagtttactttatgaaacaaactgttggtaatgcttgtggaaccattggtcttcttcatgctattgggaatattacctctgaaatcaaactctccgacggatcgttcttggatagattcttcaaatccactgccaacatgactcctatggagcgtgccaagtttctcgagaatgacagtcaaatagaagatgctcattctgtagctgttatagctggtgatacacctgcttcagaagacgcagacacgcatttcatttgtttagcttgtgtagaaggtgagctctatgaacttgatggaagaaaggcaggaccgatttcacacggtgcttcctctccagctaccctcctgaaggacgcaacaaaagtgataaagaagatgatcgagaagaatccgggctctctcaacttcaacctgatagccatctctaagagaacctgagggtcttttaaataaccgaaactcctaagtcttgtttttgagtttgtgactattttatatcttcggattctgtttttcaatgttctgaacaaattacagttgatgatcatggtttagagaatgcattcctagatcagtaacac

SEQ ID NO: 43967 - protein, 234 aa, Arabidopsis thaliana
  peptide (1)..(234): Ceres Seq. ID no. 13503868
  misc_feature (12)..(231): Homolog of NCBI NO: 5805326 NR Description: ubiquitin carboxyl-terminal hydrolase-6 [Gallus
  misc_feature (12)..(231): Homolog of NCBI NO: 7522621 NR Description: ubiquitin carboxy-terminal hydrolase-6 (EC
  misc_feature (11)..(231): Homolog of NCBI NO: 27705170 NR Description: similar to ubiqutin carboxyl-terminal hydrolase
  misc_feature (11)..(231): Homolog of NCBI NO: 5174741 NR Description: ubiquitin carboxyl-terminal esterase L3
  misc_feature (11)..(231): Homolog of NCBI NO: 17380334 NR Description: Ubiquitin carboxyl-terminal hydrolase isozyme L3
  misc_feature (11)..(231): Homolog of NCBI NO: 7710106 NR Description: ubiquitin carboxyl-terminal esterase L3
  misc_feature (11)..(233): Homolog of NCBI NO: 38346164 NR Description: OSJNBa0079A21.11 [Oryza sativa (japonica
  misc_feature (11)..(232): Homolog of NCBI NO: 14140139 NR Description: putative protein [Oryza sativa]
  misc_feature (1)..(175): Homolog of NCBI NO: 7488069 NR Description: probable carboxyl-terminal proteinase -
  misc_feature (1)..(234): Homolog of NCBI NO: 15236549 NR Description: carboxyl-terminal proteinase like protein
MATASESSSSKRWLPLESNPDVMNQYLWGLGLAPDEAECNDVYGLDDELLEMVPKPVLAVLFLYPITKKSEEERIEQDKEIKEKVHSDKVYFMKQTVGNACGTIGLLHAIGNITSEIKLSDGSFLDRFFKSTANMTPMERAKFLENDSQIEDAHSVAVIAGDTPASEDADTHFICLACVEGELYELDGRKAGPISHGASSPATLLKDATKVIKKMIEKNPGSLNFNLIAISKRT

SEQ ID NO: 43968 - protein, 212 aa, Arabidopsis thaliana
  peptide (1)..(212): Ceres Seq. ID no. 13503869
  misc_feature (1)..(209): Homolog of NCBI NO: 5805326 NR Description: ubiquitin carboxyl-terminal hydrolase-6 [Gallus
  misc_feature (1)..(209): Homolog of NCBI NO: 7522621 NR Description: ubiquitin carboxy-terminal hydrolase-6 (EC
  misc_feature (1)..(209): Homolog of NCBI NO: 27705170 NR Description: similar to ubiqutin carboxyl-terminal hydrolase
  misc_feature (1)..(209): Homolog of NCBI NO: 5174741 NR Description: ubiquitin carboxyl-terminal esterase L3
  misc_feature (1)..(209): Homolog of NCBI NO: 17380334 NR Description: Ubiquitin carboxyl-terminal hydrolase isozyme L3
  misc_feature (1)..(209): Homolog of NCBI NO: 7710106 NR Description: ubiquitin carboxyl-terminal esterase L3
  misc_feature (1)..(211): Homolog of NCBI NO: 38346164 NR Description: OSJNBa0079A21.11 [Oryza sativa (japonica
  misc_feature (1)..(210): Homolog of NCBI NO: 14140139 NR Description: putative protein [Oryza sativa]
  misc_feature (1)..(153): Homolog of NCBI NO: 7488069 NR Description: probable carboxyl-terminal proteinase -
  misc_feature (1)..(212): Homolog of NCBI NO: 15236549 NR Description: carboxyl-terminal proteinase like protein
MNQYLWGLGLAPDEAECNDVYGLDDELLEMVPKPVLAVLFLYPITKKSEEERIEQDKEIKEKVHSDKVYFMKQTVGNACGTIGLLHAIGNITSEIKLSDGSFLDRFFKSTANMTPMERAKFLENDSQIEDAHSVAVIAGDTPASEDADTHFICLACVEGELYELDGRKAGPISHGASSPATLLKDATKVIKKMIEKNPGSLNFNLIAISKRT

SEQ ID NO: 43969 - protein, 183 aa, Arabidopsis thaliana
  peptide (1)..(183): Ceres Seq. ID no. 13503870
  misc_feature (1)..(180): Homolog of NCBI NO: 5805326 NR Description: ubiquitin carboxyl-terminal hydrolase-6 [Gallus
  misc_feature (1)..(180): Homolog of NCBI NO: 7522621 NR Description: ubiquitin carboxy-terminal hydrolase-6 (EC
  misc_feature (1)..(180): Homolog of NCBI NO: 27705170 NR Description: similar to ubiqutin carboxyl-terminal hydrolase
  misc_feature (1)..(180): Homolog of NCBI NO: 5174741 NR Description: ubiquitin carboxyl-terminal esterase L3
  misc_feature (1)..(180): Homolog of NCBI NO: 17380334 NR Description: Ubiquitin carboxyl-terminal hydrolase isozyme L3
  misc_feature (1)..(180): Homolog of NCBI NO: 7710106 NR Description: ubiquitin carboxyl-terminal esterase L3
  misc_feature (1)..(182): Homolog of NCBI NO: 38346164 NR Description: OSJNBa0079A21.11 [Oryza sativa (japonica
  misc_feature (1)..(181): Homolog of NCBI NO: 14140139 NR Description: putative protein [Oryza sativa]
  misc_feature (1)..(124): Homolog of NCBI NO: 7488069 NR Description: probable carboxyl-terminal proteinase -
  misc_feature (1)..(183): Homolog of NCBI NO: 15236549 NR Description: carboxyl-terminal proteinase like protein
MVPKPVLAVLFLYPITKKSEEERIEQDKEIKEKVHSDKVYFMKQTVGNACGTIGLLHAIGNITSEIKLSDGSFLDRFFKSTANMTPMERAKFLENDSQIEDAHSVAVIAGDTPASEDADTHFICLACVEGELYELDGRKAGPISHGASSPATLLKDATKVIKKMIEKNPGSLNFNLIAISKRT

SEQ ID NO: 43970 - DNA, 765 bp, Arabidopsis thaliana
  misc_feature (1)..(765): Ceres Seq. ID no. 13503857
  misc_feature: MA Experiment ID: 108461 Result: Up-regulated in Transcription
  misc_feature: MA Experiment 108461 PARAMETER Experiment Name: At_Germinating_Seeds_cDNA_P Parameter: Age (day) Value: 1 vs. 0
  misc_feature: MA Experiment 108461 PARAMETER Experiment Name: At_Germinating_Seeds_cDNA_P Parameter: Tissue Value: Germinating Seeds
  misc_feature: MA Experiment ID: 20000113 Result: Up-regulated in Transcription
  misc_feature: MA Experiment 20000113 PARAMETER Experiment Name: At_42deg_Heat_cDNA_P Parameter: Temperature (deg C) Value: 42 vs. 22
  misc_feature: MA Experiment 20000113 PARAMETER Experiment Name: At_42deg_Heat_cDNA_P Parameter: Timepoint (hr) Value: 8
  misc_feature: MA Experiment 20000113 PARAMETER Experiment Name: At_42deg_Heat_cDNA_P Parameter: Tissue Value: Aerial
  misc_feature: MA Experiment ID: 20000180 Result: Up-regulated in Transcription
  misc_feature: MA Experiment 20000180 PARAMETER Experiment Name: At_Germinating_Seeds_P Parameter: Age (hr) Value: 24 vs. 0
  misc_feature: MA Experiment 20000180 PARAMETER Experiment Name: At_Germinating_Seeds_P Parameter: Tissue Value: Germinating Seeds
  misc_feature: MA Experiment ID: 20000185 Result: Down-regulated in Transcription
  misc_feature: MA Experiment 20000185 PARAMETER Experiment Name: At_Roots__P Parameter: Age (day) Value: 7 vs. 21
  misc_feature: MA Experiment 20000185 PARAMETER Experiment Name: At_Roots__P Parameter: Organism Value: A. thaliana
  misc_feature: MA Experiment 20000185 PARAMETER Experiment Name: At_Roots__P Parameter: Tissue Value: Roots vs. Whole Plant
  misc_feature: MA Experiment ID: 20000264 Result: Down-regulated in Transcription
  misc_feature: MA Experiment 20000264 PARAMETER Experiment Name: At_Open_Flower_P Parameter: Age (day) Value: 21
  misc_feature: MA Experiment 20000264 PARAMETER Experiment Name: At_Open_Flower_P Parameter: Plant Line Value: WS
  misc_feature: MA Experiment 20000264 PARAMETER Experiment Name: At_Open_Flower_P Parameter: Tissue Value: Open Flower vs. Whole Plant
  misc_feature: MA Experiment ID: 20000439 Result: Down-regulated in Transcription
  misc_feature: MA Experiment 20000439 PARAMETER Experiment Name: At_Roots__P Parameter: Age (day) Value: 14 vs. 21
  misc_feature: MA Experiment 20000439 PARAMETER Experiment Name: At_Roots__P Parameter: Organism Value: A. thaliana
  misc_feature: MA Experiment 20000439 PARAMETER Experiment Name: At_Roots__P Parameter: Tissue Value: Roots vs. Whole Plant
  misc_feature: MA Experiment ID: 20000794 Result: Down-regulated in Transcription
  misc_feature: MA Experiment 20000794 PARAMETER Experiment Name: At_Petals_P Parameter: Age (day) Value: 23-25 days
  misc_feature: MA Experiment 20000794 PARAMETER Experiment Name: At_Petals_P Parameter: Plant Line Value: WS
  misc_feature: MA Experiment 20000794 PARAMETER Experiment Name: At_Petals_P Parameter: Tissue Value: Petals vs. Whole plant
  misc_feature: MA Experiment ID: 20001248 Result: Down-regulated in Transcription
  misc_feature: MA Experiment 20001248 PARAMETER Experiment Name: At_Far-red-induction_P Parameter: Age (day) Value: 7
  misc_feature: MA Experiment 20001248 PARAMETER Experiment Name: At_Far-red-induction_P Parameter: Light Value: Far-red vs. White
  misc_feature: MA Experiment 20001248 PARAMETER Experiment Name: At_Far-red-induction_P Parameter: Organism Value: A. thaliana
  misc_feature: MA Experiment 20001248 PARAMETER Experiment Name: At_Far-red-induction_P Parameter: Plant Line Value: Columbia
  misc_feature: MA Experiment 20001248 PARAMETER Experiment Name: At_Far-red-induction_P Parameter: Timepoint (hr) Value: 4
  misc_feature: MA Experiment 20001248 PARAMETER Experiment Name: At_Far-red-induction_P Parameter: Tissue Value: Whole Plant
  misc_feature: MA Experiment ID: 20001451 Result: Down-regulated in Transcription
  misc_feature: MA Experiment 20001451 PARAMETER Experiment Name: At_Far-red-induction_P Parameter: Age (day) Value: 7
  misc_feature: MA Experiment 20001451 PARAMETER Experiment Name: At_Far-red-induction_P Parameter: Light Value: Far-red vs. White
  misc_feature: MA Experiment 20001451 PARAMETER Experiment Name: At_Far-red-induction_P Parameter: Organism Value: A. thaliana
  misc_feature: MA Experiment 20001451 PARAMETER Experiment Name: At_Far-red-induction_P Parameter: Plant Line Value: Columbia
  misc_feature: MA Experiment 20001451 PARAMETER Experiment Name: At_Far-red-induction_P Parameter: Timepoint (hr) Value: 24
  misc_feature: MA Experiment 20001451 PARAMETER Experiment Name: At_Far-red-induction_P Parameter: Tissue Value: Whole Plant
  misc_feature: MA Experiment ID: 20001557 Result: Down-regulated in Transcription
  misc_feature: MA Experiment 20001557 PARAMETER Experiment Name: At_Drought_Soil_Dry_P Parameter: Age (day) Value: 27
  misc_feature: MA Experiment 20001557 PARAMETER Experiment Name: At_Drought_Soil_Dry_P Parameter: Organism Value: A. thaliana
  misc_feature: MA Experiment 20001557 PARAMETER Experiment Name: At_Drought_Soil_Dry_P Parameter: Plant Line Value: WS
  misc_feature: MA Experiment 20001557 PARAMETER Experiment Name: At_Drought_Soil_Dry_P Parameter: Post Timepoint (hr) Value: 3
  misc_feature: MA Experiment 20001557 PARAMETER Experiment Name: At_Drought_Soil_Dry_P Parameter: Post-Treatment Value: Re-Water vs. No Drought
  misc_feature: MA Experiment 20001557 PARAMETER Experiment Name: At_Drought_Soil_Dry_P Parameter: Timepoint (day) Value: 13
  misc_feature: MA Experiment 20001557 PARAMETER Experiment Name: At_Drought_Soil_Dry_P Parameter: Treatment Value: Drought vs. No Drought
  misc_feature: MA Experiment ID: 20001558 Result: Down-regulated in Transcription
  misc_feature: MA Experiment 20001558 PARAMETER Experiment Name: At_Drought_Soil_Dry_P Parameter: Age (day) Value: 27
  misc_feature: MA Experiment 20001558 PARAMETER Experiment Name: At_Drought_Soil_Dry_P Parameter: Organism Value: A. thaliana
  misc_feature: MA Experiment 20001558 PARAMETER Experiment Name: At_Drought_Soil_Dry_P Parameter: Plant Line Value: WS
  misc_feature: MA Experiment 20001558 PARAMETER Experiment Name: At_Drought_Soil_Dry_P Parameter: Post Timepoint (hr) Value: 6
  misc_feature: MA Experiment 20001558 PARAMETER Experiment Name: At_Drought_Soil_Dry_P Parameter: Post-Treatment Value: Re-Water vs. No Drought
  misc_feature: MA Experiment 20001558 PARAMETER Experiment Name: At_Drought_Soil_Dry_P Parameter: Timepoint (day) Value: 13
  misc_feature: MA Experiment 20001558 PARAMETER Experiment Name: At_Drought_Soil_Dry_P Parameter: Treatment Value: Drought vs. No Drought
  misc_feature: MA Experiment ID: 20001757 Result: Up-regulated in Transcription
  misc_feature: MA Experiment 20001757 PARAMETER Experiment Name: At_50mM_NH4NO3_L-to-H_P Parameter: Timepoint (hr) Value: 6
  misc_feature: MA Experiment 20001757 PARAMETER Experiment Name: At_50mM_NH4NO3_L-to-H_P Parameter: Tissue Value: Leaf
  misc_feature: MA Experiment 20001757 PARAMETER Experiment Name: At_50mM_NH4NO3_L-to-H_P Parameter: Treatment Value: 50mM NH4NO3 vs 100mM Mannitol
  misc_feature: MA Experiment ID: 20001904 Result: Down-regulated in Transcription
  misc_feature: MA Experiment 20001904 PARAMETER Experiment Name: At_Drought_Reproduction_P Parameter: Age (day) Value: 37
  misc_feature: MA Experiment 20001904 PARAMETER Experiment Name: At_Drought_Reproduction_P Parameter: Organism Value: A. thaliana
  misc_feature: MA Experiment 20001904 PARAMETER Experiment Name: At_Drought_Reproduction_P Parameter: Plant Line Value: WS
  misc_feature: MA Experiment 20001904 PARAMETER Experiment Name: At_Drought_Reproduction_P Parameter: Timepoint (day) Value: 7
  misc_feature: MA Experiment 20001904 PARAMETER Experiment Name: At_Drought_Reproduction_P Parameter: Tissue Value: Rosettes
  misc_feature: MA Experiment 20001904 PARAMETER Experiment Name: At_Drought_Reproduction_P Parameter: Treatment Value: Drought vs. No Drought
  misc_feature: MA Experiment ID: 20001905 Result: Down-regulated in Transcription
  misc_feature: MA Experiment 20001905 PARAMETER Experiment Name: At_Drought_Reproduction_P Parameter: Age (day) Value: 40
  misc_feature: MA Experiment 20001905 PARAMETER Experiment Name: At_Drought_Reproduction_P Parameter: Organism Value: A. thaliana
  misc_feature: MA Experiment 20001905 PARAMETER Experiment Name: At_Drought_Reproduction_P Parameter: Plant Line Value: WS
  misc_feature: MA Experiment 20001905 PARAMETER Experiment Name: At_Drought_Reproduction_P Parameter: Timepoint (day) Value: 10
  misc_feature: MA Experiment 20001905 PARAMETER Experiment Name: At_Drought_Reproduction_P Parameter: Tissue Value: Rosettes
  misc_feature: MA Experiment 20001905 PARAMETER Experiment Name: At_Drought_Reproduction_P Parameter: Treatment Value: Drought vs. No Drought
  misc_feature: MA Experiment ID: 20001906 Result: Down-regulated in Transcription
  misc_feature: MA Experiment 20001906 PARAMETER Experiment Name: At_Drought_Reproduction_P Parameter: Age (day) Value: 35
  misc_feature: MA Experiment 20001906 PARAMETER Experiment Name: At_Drought_Reproduction_P Parameter: Organism Value: A. thaliana
  misc_feature: MA Experiment 20001906 PARAMETER Experiment Name: At_Drought_Reproduction_P Parameter: Plant Line Value: WS
  misc_feature: MA Experiment 20001906 PARAMETER Experiment Name: At_Drought_Reproduction_P Parameter: Timepoint (day) Value: 5
  misc_feature: MA Experiment 20001906 PARAMETER Experiment Name: At_Drought_Reproduction_P Parameter: Tissue Value: Siliques
  misc_feature: MA Experiment 20001906 PARAMETER Experiment Name: At_Drought_Reproduction_P Parameter: Treatment Value: Drought vs. No Drought
  misc_feature: MA Experiment ID: 20001908 Result: Down-regulated in Transcription
  misc_feature: MA Experiment 20001908 PARAMETER Experiment Name: At_Drought_Reproduction_P Parameter: Age (day) Value: 40
  misc_feature: MA Experiment 20001908 PARAMETER Experiment Name: At_Drought_Reproduction_P Parameter: Organism Value: A. thaliana
  misc_feature: MA Experiment 20001908 PARAMETER Experiment Name: At_Drought_Reproduction_P Parameter: Plant Line Value: WS
  misc_feature: MA Experiment 20001908 PARAMETER Experiment Name: At_Drought_Reproduction_P Parameter: Timepoint (day) Value: 10
  misc_feature: MA Experiment 20001908 PARAMETER Experiment Name: At_Drought_Reproduction_P Parameter: Tissue Value: Siliques
  misc_feature: MA Experiment 20001908 PARAMETER Experiment Name: At_Drought_Reproduction_P Parameter: Treatment Value: Drought vs. No Drought
tccggaggagcgaccaataagagcgcgaggagcttccacgtgttactacacgaatcttgtttagtaaaaagcgcagctgcaaaaaaaatcgagtagagaagaagtaggcagacaaagaagaagaagaagaagttctcggcgtgcttcaatggcgatatcagtagcagcttcgtcctctatggccgtgatggttccacgtgttcccgccgtatccacccgttgctccgccgtcccttatcttcctcctcgctcctttggccgatcctctttcaccgttccgttgaagcttgtttcagggaatggattgcaaaaagttgaattgttgaagacaagagcttcttcagaagagacctcgtccattgataccaacgaactcatcacagatttgaaggaaaagtgggatggtcttgagaacaaatctactgtacttatatatggaggaggagccattgttgctgtttggttatcttccattgttgttggtgccatcaactctgttcctctgcttccgaaagttatggaacttgtcggtctcgggtacactggatggtttgtctacagataccttctcttcaagtcaagcagaaaggaattggctgaggatattgaatccttgaagaagaagatcgcaggaagcgaatagattcattttcaaataaaaccagctttctctctgtatgttttcctgtaatatcgtgttatattatacaatgtctctgtttcaacattgtatctgttgcatctgaaactattatcttggatccg

SEQ ID NO: 43971 - protein, 164 aa, Arabidopsis thaliana
  peptide (1)..(164): Ceres Seq. ID no. 13503858
  misc_feature (4)..(161): Homolog of NCBI NO: 18403896 NR Description: expressed protein [Arabidopsis thaliana]
  misc_feature (6)..(160): Homolog of NCBI NO: 37536446 NR Description: hypothetical protein [Oryza sativa (japonica
  misc_feature (20)..(163): Homolog of NCBI NO: 34393236 NR Description: unknown protein [Oryza sativa (japonica
  misc_feature (4)..(163): Homolog of NCBI NO: 21555057 NR Description: unknown [Arabidopsis thaliana]
  misc_feature (4)..(163): Homolog of NCBI NO: 18407178 NR Description: expressed protein [Arabidopsis thaliana]
  misc_feature (62)..(164): Homolog of NCBI NO: 18420175 NR Description: expressed protein [Arabidopsis thaliana]
  misc_feature (62)..(164): Homolog of NCBI NO: 7485852 NR Description: hypothetical protein F20D10.220 - Arabidopsis
  misc_feature (11)..(164): Homolog of NCBI NO: 38175474 NR Description: unknown protein [Oryza sativa (japonica
  misc_feature (1)..(164): Homolog of NCBI NO: 687677 NR Description: unknown
  misc_feature (1)..(164): Homolog of NCBI NO: 18411555 NR Description: expressed protein [Arabidopsis thaliana]
MAISVAASSSMAVMVPRVPAVSTRCSAVPYLPPRSFGRSSFTVPLKLVSGNGLQKVELLKTRASSEETSSIDTNELITDLKEKWDGLENKSTVLIYGGGAIVAVWLSSIVVGAINSVPLLPKVMELVGLGYTGWFVYRYLLFKSSRKELAEDIESLKKKIAGSE

SEQ ID NO: 43972 - protein, 154 aa, Arabidopsis thaliana
  peptide (1)..(154): Ceres Seq. ID no. 13503859
  misc_feature (1)..(151): Homolog of NCBI NO: 18403896 NR Description: expressed protein [Arabidopsis thaliana]
  misc_feature (1)..(150): Homolog of NCBI NO: 37536446 NR Description: hypothetical protein [Oryza sativa (japonica
  misc_feature (10)..(153): Homolog of NCBI NO: 34393236 NR Description: unknown protein [Oryza sativa (japonica
  misc_feature (1)..(153): Homolog of NCBI NO: 21555057 NR Description: unknown [Arabidopsis thaliana]
  misc_feature (1)..(153): Homolog of NCBI NO: 18407178 NR Description: expressed protein [Arabidopsis thaliana]
  misc_feature (52)..(154): Homolog of NCBI NO: 18420175 NR Description: expressed protein [Arabidopsis thaliana]
  misc_feature (52)..(154): Homolog of NCBI NO: 7485852 NR Description: hypothetical protein F20D10.220 - Arabidopsis
  misc_feature (1)..(154): Homolog of NCBI NO: 38175474 NR Description: unknown protein [Oryza sativa (japonica
  misc_feature (1)..(154): Homolog of NCBI NO: 687677 NR Description: unknown
  misc_feature (1)..(154): Homolog of NCBI NO: 18411555 NR Description: expressed protein [Arabidopsis thaliana]
MAVMVPRVPAVSTRCSAVPYLPPRSFGRSSFTVPLKLVSGNGLQKVELLKTRASSEETSSIDTNELITDLKEKWDGLENKSTVLIYGGGAIVAVWLSSIVVGAINSVPLLPKVMELVGLGYTGWFVYRYLLFKSSRKELAEDIESLKKKIAGSE

SEQ ID NO: 43973 - protein, 151 aa, Arabidopsis thaliana
  peptide (1)..(151): Ceres Seq. ID no. 13503860
  misc_feature (1)..(148): Homolog of NCBI NO: 18403896 NR Description: expressed protein [Arabidopsis thaliana]
  misc_feature (1)..(147): Homolog of NCBI NO: 37536446 NR Description: hypothetical protein [Oryza sativa (japonica
  misc_feature (7)..(150): Homolog of NCBI NO: 34393236 NR Description: unknown protein [Oryza sativa (japonica
  misc_feature (1)..(150): Homolog of NCBI NO: 21555057 NR Description: unknown [Arabidopsis thaliana]
  misc_feature (1)..(150): Homolog of NCBI NO: 18407178 NR Description: expressed protein [Arabidopsis thaliana]
  misc_feature (49)..(151): Homolog of NCBI NO: 18420175 NR Description: expressed protein [Arabidopsis thaliana]
  misc_feature (49)..(151): Homolog of NCBI NO: 7485852 NR Description: hypothetical protein F20D10.220 - Arabidopsis
  misc_feature (1)..(151): Homolog of NCBI NO: 38175474 NR Description: unknown protein [Oryza sativa (japonica
  misc_feature (1)..(151): Homolog of NCBI NO: 687677 NR Description: unknown
  misc_feature (1)..(151): Homolog of NCBI NO: 18411555 NR Description: expressed protein [Arabidopsis thaliana]
MVPRVPAVSTRCSAVPYLPPRSFGRSSFTVPLKLVSGNGLQKVELLKTRASSEETSSIDTNELITDLKEKWDGLENKSTVLIYGGGAIVAVWLSSIVVGAINSVPLLPKVMELVGLGYTGWFVYRYLLFKSSRKELAEDIESLKKKIAGSE

SEQ ID NO: 43974 - DNA, 1983 bp, Arabidopsis thaliana
  misc_feature (1)..(1983): Ceres Seq. ID no. 12488619
  misc_feature: MA Experiment ID: 20000173 Result: Down-regulated in Transcription
  misc_feature: MA Experiment 20000173 PARAMETER Experiment Name: At_42deg_Heat_P Parameter: Age (day) Value: 14
  misc_feature: MA Experiment 20000173 PARAMETER Experiment Name: At_42deg_Heat_P Parameter: Organism Value: A. thaliana
  misc_feature: MA Experiment 20000173 PARAMETER Experiment Name: At_42deg_Heat_P Parameter: Plant Line Value: WS
  misc_feature: MA Experiment 20000173 PARAMETER Experiment Name: At_42deg_Heat_P Parameter: Temperature (deg C) Value: 42 vs. 22
  misc_feature: MA Experiment 20000173 PARAMETER Experiment Name: At_42deg_Heat_P Parameter: Timepoint (hr) Value: 6
  misc_feature: MA Experiment 20000173 PARAMETER Experiment Name: At_42deg_Heat_P Parameter: Tissue Value: Aerial
  misc_feature: MA Experiment ID: 20000179 Result: Up-regulated in Transcription
  misc_feature: MA Experiment 20000179 PARAMETER Experiment Name: At_Germinating_Seeds_P Parameter: Age (hr) Value: 6 vs. 0
  misc_feature: MA Experiment 20000179 PARAMETER Experiment Name: At_Germinating_Seeds_P Parameter: Tissue Value: Germinating Seeds
  misc_feature: MA Experiment ID: 20000180 Result: Up-regulated in Transcription
  misc_feature: MA Experiment 20000180 PARAMETER Experiment Name: At_Germinating_Seeds_P Parameter: Age (hr) Value: 24 vs. 0
  misc_feature: MA Experiment 20000180 PARAMETER Experiment Name: At_Germinating_Seeds_P Parameter: Tissue Value: Germinating Seeds
  misc_feature: MA Experiment ID: 20000185 Result: Down-regulated in Transcription
  misc_feature: MA Experiment 20000185 PARAMETER Experiment Name: At_Roots__P Parameter: Age (day) Value: 7 vs. 21
  misc_feature: MA Experiment 20000185 PARAMETER Experiment Name: At_Roots__P Parameter: Organism Value: A. thaliana
  misc_feature: MA Experiment 20000185 PARAMETER Experiment Name: At_Roots__P Parameter: Tissue Value: Roots vs. Whole Plant
  misc_feature: MA Experiment ID: 20000438 Result: Up-regulated in Transcription
  misc_feature: MA Experiment 20000438 PARAMETER Experiment Name: At_Shoots__P Parameter: Age (day) Value: 14
  misc_feature: MA Experiment 20000438 PARAMETER Experiment Name: At_Shoots__P Parameter: Tissue Value: Shoots vs. Whole Plant
  misc_feature: MA Experiment ID: 20000439 Result: Down-regulated in Transcription
  misc_feature: MA Experiment 20000439 PARAMETER Experiment Name: At_Roots__P Parameter: Age (day) Value: 14 vs. 21
  misc_feature: MA Experiment 20000439 PARAMETER Experiment Name: At_Roots__P Parameter: Organism Value: A. thaliana
  misc_feature: MA Experiment 20000439 PARAMETER Experiment Name: At_Roots__P Parameter: Tissue Value: Roots vs. Whole Plant
  misc_feature: MA Experiment ID: 20001248 Result: Down-regulated in Transcription
  misc_feature: MA Experiment 20001248 PARAMETER Experiment Name: At_Far-red-induction_P Parameter: Age (day) Value: 7
  misc_feature: MA Experiment 20001248 PARAMETER Experiment Name: At_Far-red-induction_P Parameter: Light Value: Far-red vs. White
  misc_feature: MA Experiment 20001248 PARAMETER Experiment Name: At_Far-red-induction_P Parameter: Organism Value: A. thaliana
  misc_feature: MA Experiment 20001248 PARAMETER Experiment Name: At_Far-red-induction_P Parameter: Plant Line Value: Columbia
  misc_feature: MA Experiment 20001248 PARAMETER Experiment Name: At_Far-red-induction_P Parameter: Timepoint (hr) Value: 4
  misc_feature: MA Experiment 20001248 PARAMETER Experiment Name: At_Far-red-induction_P Parameter: Tissue Value: Whole Plant
  misc_feature: MA Experiment ID: 20001557 Result: Down-regulated in Transcription
  misc_feature: MA Experiment 20001557 PARAMETER Experiment Name: At_Drought_Soil_Dry_P Parameter: Age (day) Value: 27
  misc_feature: MA Experiment 20001557 PARAMETER Experiment Name: At_Drought_Soil_Dry_P Parameter: Organism Value: A. thaliana
  misc_feature: MA Experiment 20001557 PARAMETER Experiment Name: At_Drought_Soil_Dry_P Parameter: Plant Line Value: WS
  misc_feature: MA Experiment 20001557 PARAMETER Experiment Name: At_Drought_Soil_Dry_P Parameter: Post Timepoint (hr) Value: 3
  misc_feature: MA Experiment 20001557 PARAMETER Experiment Name: At_Drought_Soil_Dry_P Parameter: Post-Treatment Value: Re-Water vs. No Drought
  misc_feature: MA Experiment 20001557 PARAMETER Experiment Name: At_Drought_Soil_Dry_P Parameter: Timepoint (day) Value: 13
  misc_feature: MA Experiment 20001557 PARAMETER Experiment Name: At_Drought_Soil_Dry_P Parameter: Treatment Value: Drought vs. No Drought
  misc_feature: MA Experiment ID: 20001558 Result: Down-regulated in Transcription
  misc_feature: MA Experiment 20001558 PARAMETER Experiment Name: At_Drought_Soil_Dry_P Parameter: Age (day) Value: 27
  misc_feature: MA Experiment 20001558 PARAMETER Experiment Name: At_Drought_Soil_Dry_P Parameter: Organism Value: A. thaliana
  misc_feature: MA Experiment 20001558 PARAMETER Experiment Name: At_Drought_Soil_Dry_P Parameter: Plant Line Value: WS
  misc_feature: MA Experiment 20001558 PARAMETER Experiment Name: At_Drought_Soil_Dry_P Parameter: Post Timepoint (hr) Value: 6
  misc_feature: MA Experiment 20001558 PARAMETER Experiment Name: At_Drought_Soil_Dry_P Parameter: Post-Treatment Value: Re-Water vs. No Drought
  misc_feature: MA Experiment 20001558 PARAMETER Experiment Name: At_Drought_Soil_Dry_P Parameter: Timepoint (day) Value: 13
  misc_feature: MA Experiment 20001558 PARAMETER Experiment Name: At_Drought_Soil_Dry_P Parameter: Treatment Value: Drought vs. No Drought
  misc_feature: MA Experiment ID: 20001905 Result: Down-regulated in Transcription
  misc_feature: MA Experiment 20001905 PARAMETER Experiment Name: At_Drought_Reproduction_P Parameter: Age (day) Value: 40
  misc_feature: MA Experiment 20001905 PARAMETER Experiment Name: At_Drought_Reproduction_P Parameter: Organism Value: A. thaliana
  misc_feature: MA Experiment 20001905 PARAMETER Experiment Name: At_Drought_Reproduction_P Parameter: Plant Line Value: WS
  misc_feature: MA Experiment 20001905 PARAMETER Experiment Name: At_Drought_Reproduction_P Parameter: Timepoint (day) Value: 10
  misc_feature: MA Experiment 20001905 PARAMETER Experiment Name: At_Drought_Reproduction_P Parameter: Tissue Value: Rosettes
  misc_feature: MA Experiment 20001905 PARAMETER Experiment Name: At_Drought_Reproduction_P Parameter: Treatment Value: Drought vs. No Drought
gcattgattgatccaaggaaggagcaaagtagaggatttaacaatggcgtctctttctctcagttctgctcatttctcttcaacttcttcttcatctcgctcctctatatccacttcatcgctttctccgtcgtcaacttctctccctctcttacaatcaccgatccgccgccgttaccgctccctccgccgccgtctctccttctccgtcattccccgtcggacttctcgctccttctccacttccaattctcagattaggtgttcgataaatgagccgttgaaggtgatgatttcgggtgcaccggcttcaggaaaaggcactcaatgtgagctcattgttcacaagtttggtttggtgcacatatcaacaggggatctattgagagcagaggtgtcatctgggacagatattggaaagagagcaaaagagttcatgaactcgggtagtttggttcctgatgagattgttatagcgatggtggctggaagattatcacgtgaagatgctaaagagcatggatggcttcttgatggatttccacggagttttgcccaggcacaaagtctggacaaactgaacgtgaaacctgacatttttatcttactagatgttcctgatgaaattctgatcgatagatgtgttggtcgaaggttggatccagtgactggaaaaatttatcatatcaaaaattaccctcctgaatcagatgaaattaaagcaagactggttacacgcccggatgatacagaggagaaggtaaaagcacggctgcaaatatacaaacaaaattctgaagcgattatttcagcatactcagatgttatggtcaagattgatgcaaacaggccaaaagaagtggttttcgaggagacccagactctactgtctcagatacagttaaagagaatgataaagactgataaagcatctcctgttcaggataaatggagaggaataccgacgagattgaataacattccacattcgagggatatcagggcttatttttatgaagatgtgctgcaagccacaattagatctatcaaggatggtaacacccgtcttcgggtggacattaatatccctgagctaaatccggaaatggatgtttaccggataggaaccttgatggaacttgttcaagctttagctttatcattcgctgacgatggaaaaagagtgaaggtttgtgttcagggatcaatgggggaaggtgcacttgctgggatgccattgcagttggcaggcactcgaaagattttagaatatatggactggggtgatgatgaaactttgggaactttcgtcaagcttggtgcaattggtggtaaagaagttgatgaagaagatgacatgttcatcttagtggctccacaaaatgccgttggaaactgtattatagatgatctacaagcgatgactactgctgctgggaaaaggccagttgtacttatcaatcctcgcctcaaggacttgcccgcttcgagtggcataatgcaaacaatgggcagggagcaaaggctggaatatgctttgacgtttgacaactgctatgtattccggcttctctattatttgggaacacaatacccgattatgggcgctctaaggatgtcttatccataccggtatgagctttataagagagtgaacgaggaaaatggaaaggagaaatatgtcttgctagcaacgtacgctgaaagaccaacccctgaacaaatcgacgatgccttctctggaaaatcgcgggatcaaagcaagaaggcgtcaggaatctgggggttcttgagtagcgtgttttcgtaatggaactaggaagctgaagttgtggaacattcattaaatgctcatctatcagttaccaaacagagagagagtgatgctgctactttttgttcataattttctccttttattatgtctcagattgttgattatcttactttggggcaaataaaactgaaaactgtgattatttt

SEQ ID NO: 43975 - protein, 588 aa, Arabidopsis thaliana
  peptide (1)..(588): Ceres Seq. ID no. 12488620
  misc_feature (84)..(263): Pfam Name: Adenylate kinase Pfam Description: Adenylate kinase
  misc_feature (80)..(282): Homolog of NCBI NO: 10121071 NR Description: Chain A, Mutant G10v Of Adenylate Kinase From E.
  misc_feature (80)..(282): Homolog of NCBI NO: 15800203 NR Description: adenylate kinase activity
  misc_feature (80)..(282): Homolog of NCBI NO: 1773156 NR Description: adenylate kinase [Escherichia coli]
  misc_feature (79)..(277): Homolog of NCBI NO: 7687936 NR Description: possible adenylate kinase [Leishmania major]
  misc_feature (79)..(288): Homolog of NCBI NO: 37727511 NR Description: adenylate kinase [Trypanosoma cruzi]
  misc_feature (75)..(289): Homolog of NCBI NO: 1170606 NR Description: ADENYLATE KINASE, CHLOROPLAST (ATP-AMP
  misc_feature (28)..(289): Homolog of NCBI NO: 15238822 NR Description: putative protein
  misc_feature (83)..(268): Homolog of NCBI NO: 10176815 NR Description: adenylate kinase-like [Arabidopsis thaliana]
  misc_feature (132)..(586): Homolog of NCBI NO: 38175634 NR Description: putative Adenylate kinase, chloroplast
  misc_feature (1)..(588): Homolog of NCBI NO: 22327339 NR Description: adenylate kinase -like protein
MASLSLSSAHFSSTSSSSRSSISTSSLSPSSTSLPLLQSPIRRRYRSLRRRLSFSVIPRRTSRSFSTSNSQIRCSINEPLKVMISGAPASGKGTQCELIVHKFGLVHISTGDLLRAEVSSGTDIGKRAKEFMNSGSLVPDEIVIAMVAGRLSREDAKEHGWLLDGFPRSFAQAQSLDKLNVKPDIFILLDVPDEILIDRCVGRRLDPVTGKIYHIKNYPPESDEIKARLVTRPDDTEEKVKARLQIYKQNSEAIISAYSDVMVKIDANRPKEVVFEETQTLLSQIQLKRMIKTDKASPVQDKWRGIPTRLNNIPHSRDIRAYFYEDVLQATIRSIKDGNTRLRVDINIPELNPEMDVYRIGTLMELVQALALSFADDGKRVKVCVQGSMGEGALAGMPLQLAGTRKILEYMDWGDDETLGTFVKLGAIGGKEVDEEDDMFILVAPQNAVGNCIIDDLQAMTTAAGKRPVVLINPRLKDLPASSGIMQTMGREQRLEYALTFDNCYVFRLLYYLGTQYPIMGALRMSYPYRYELYKRVNEENGKEKYVLLATYAERPTPEQIDDAFSGKSRDQSKKASGIWGFLSSVFS

SEQ ID NO: 43976 - protein, 506 aa, Arabidopsis thaliana
  peptide (1)..(506): Ceres Seq. ID no. 12488621
  misc_feature (2)..(181): Pfam Name: Adenylate kinase Pfam Description: Adenylate kinase
  misc_feature (1)..(200): Homolog of NCBI NO: 10121071 NR Description: Chain A, Mutant G10v Of Adenylate Kinase From E.
  misc_feature (1)..(200): Homolog of NCBI NO: 15800203 NR Description: adenylate kinase activity
  misc_feature (1)..(200): Homolog of NCBI NO: 1773156 NR Description: adenylate kinase [Escherichia coli]
  misc_feature (1)..(195): Homolog of NCBI NO: 7687936 NR Description: possible adenylate kinase [Leishmania major]
  misc_feature (1)..(206): Homolog of NCBI NO: 37727511 NR Description: adenylate kinase [Trypanosoma cruzi]
  misc_feature (1)..(207): Homolog of NCBI NO: 1170606 NR Description: ADENYLATE KINASE, CHLOROPLAST (ATP-AMP
  misc_feature (1)..(207): Homolog of NCBI NO: 15238822 NR Description: putative protein
  misc_feature (1)..(186): Homolog of NCBI NO: 10176815 NR Description: adenylate kinase-like [Arabidopsis thaliana]
  misc_feature (50)..(504): Homolog of NCBI NO: 38175634 NR Description: putative Adenylate kinase, chloroplast
  misc_feature (1)..(506): Homolog of NCBI NO: 22327339 NR Description: adenylate kinase -like protein
MISGAPASGKGTQCELIVHKFGLVHISTGDLLRAEVSSGTDIGKRAKEFMNSGSLVPDEIVIAMVAGRLSREDAKEHGWLLDGFPRSFAQAQSLDKLNVKPDIFILLDVPDEILIDRCVGRRLDPVTGKIYHIKNYPPESDEIKARLVTRPDDTEEKVKARLQIYKQNSEAIISAYSDVMVKIDANRPKEVVFEETQTLLSQIQLKRMIKTDKASPVQDKWRGIPTRLNNIPHSRDIRAYFYEDVLQATIRSIKDGNTRLRVDINIPELNPEMDVYRIGTLMELVQALALSFADDGKRVKVCVQGSMGEGALAGMPLQLAGTRKILEYMDWGDDETLGTFVKLGAIGGKEVDEEDDMFILVAPQNAVGNCIIDDLQAMTTAAGKRPVVLINPRLKDLPASSGIMQTMGREQRLEYALTFDNCYVFRLLYYLGTQYPIMGALRMSYPYRYELYKRVNEENGKEKYVLLATYAERPTPEQIDDAFSGKSRDQSKKASGIWGFLSSVFS

SEQ ID NO: 43977 - protein, 457 aa, Arabidopsis thaliana
  peptide (1)..(457): Ceres Seq. ID no. 12488622
  misc_feature (1)..(132): Pfam Name: Adenylate kinase Pfam Description: Adenylate kinase
  misc_feature (1)..(151): Homolog of NCBI NO: 10121071 NR Description: Chain A, Mutant G10v Of Adenylate Kinase From E.
  misc_feature (1)..(151): Homolog of NCBI NO: 15800203 NR Description: adenylate kinase activity
  misc_feature (1)..(151): Homolog of NCBI NO: 1773156 NR Description: adenylate kinase [Escherichia coli]
  misc_feature (1)..(146): Homolog of NCBI NO: 7687936 NR Description: possible adenylate kinase [Leishmania major]
  misc_feature (1)..(157): Homolog of NCBI NO: 37727511 NR Description: adenylate kinase [Trypanosoma cruzi]
  misc_feature (1)..(158): Homolog of NCBI NO: 1170606 NR Description: ADENYLATE KINASE, CHLOROPLAST (ATP-AMP
  misc_feature (1)..(158): Homolog of NCBI NO: 15238822 NR Description: putative protein
  misc_feature (1)..(137): Homolog of NCBI NO: 10176815 NR Description: adenylate kinase-like [Arabidopsis thaliana]
  misc_feature (1)..(455): Homolog of NCBI NO: 38175634 NR Description: putative Adenylate kinase, chloroplast
  misc_feature (1)..(457): Homolog of NCBI NO: 22327339 NR Description: adenylate kinase -like protein
MNSGSLVPDEIVIAMVAGRLSREDAKEHGWLLDGFPRSFAQAQSLDKLNVKPDIFILLDVPDEILIDRCVGRRLDPVTGKIYHIKNYPPESDEIKARLVTRPDDTEEKVKARLQIYKQNSEAIISAYSDVMVKIDANRPKEVVFEETQTLLSQIQLKRMIKTDKASPVQDKWRGIPTRLNNIPHSRDIRAYFYEDVLQATIRSIKDGNTRLRVDINIPELNPEMDVYRIGTLMELVQALALSFADDGKRVKVCVQGSMGEGALAGMPLQLAGTRKILEYMDWGDDETLGTFVKLGAIGGKEVDEEDDMFILVAPQNAVGNCIIDDLQAMTTAAGKRPVVLINPRLKDLPASSGIMQTMGREQRLEYALTFDNCYVFRLLYYLGTQYPIMGALRMSYPYRYELYKRVNEENGKEKYVLLATYAERPTPEQIDDAFSGKSRDQSKKASGIWGFLSSVFS

SEQ ID NO: 43978 - DNA, 1752 bp, Arabidopsis thaliana
  misc_feature (1)..(1752): Ceres Seq. ID no. 13502518
  misc_feature: MA Experiment ID: 20000166 Result: Down-regulated in Transcription
  misc_feature: MA Experiment 20000166 PARAMETER Experiment Name: At_100uM_ABA_P Parameter: Age (day) Value: 14
  misc_feature: MA Experiment 20000166 PARAMETER Experiment Name: At_100uM_ABA_P Parameter: Organism Value: A. thaliana
  misc_feature: MA Experiment 20000166 PARAMETER Experiment Name: At_100uM_ABA_P Parameter: Plant Line Value: WS
  misc_feature: MA Experiment 20000166 PARAMETER Experiment Name: At_100uM_ABA_P Parameter: Timepoint (hr) Value: 1
  misc_feature: MA Experiment 20000166 PARAMETER Experiment Name: At_100uM_ABA_P Parameter: Tissue Value: Aerial
  misc_feature: MA Experiment 20000166 PARAMETER Experiment Name: At_100uM_ABA_P Parameter: Treatment Value: 100uM ABA vs. No Treatment
  misc_feature: MA Experiment ID: 20000171 Result: Down-regulated in Transcription
  misc_feature: MA Experiment 20000171 PARAMETER Experiment Name: At_42deg_Heat_P Parameter: Age (day) Value: 14
  misc_feature: MA Experiment 20000171 PARAMETER Experiment Name: At_42deg_Heat_P Parameter: Organism Value: A. thaliana
  misc_feature: MA Experiment 20000171 PARAMETER Experiment Name: At_42deg_Heat_P Parameter: Plant Line Value: WS
  misc_feature: MA Experiment 20000171 PARAMETER Experiment Name: At_42deg_Heat_P Parameter: Temperature (deg C) Value: 42 vs. 22
  misc_feature: MA Experiment 20000171 PARAMETER Experiment Name: At_42deg_Heat_P Parameter: Timepoint (hr) Value: 1
  misc_feature: MA Experiment 20000171 PARAMETER Experiment Name: At_42deg_Heat_P Parameter: Tissue Value: Aerial
  misc_feature: MA Experiment ID: 20000173 Result: Down-regulated in Transcription
  misc_feature: MA Experiment 20000173 PARAMETER Experiment Name: At_42deg_Heat_P Parameter: Age (day) Value: 14
  misc_feature: MA Experiment 20000173 PARAMETER Experiment Name: At_42deg_Heat_P Parameter: Organism Value: A. thaliana
  misc_feature: MA Experiment 20000173 PARAMETER Experiment Name: At_42deg_Heat_P Parameter: Plant Line Value: WS
  misc_feature: MA Experiment 20000173 PARAMETER Experiment Name: At_42deg_Heat_P Parameter: Temperature (deg C) Value: 42 vs. 22
  misc_feature: MA Experiment 20000173 PARAMETER Experiment Name: At_42deg_Heat_P Parameter: Timepoint (hr) Value: 6
  misc_feature: MA Experiment 20000173 PARAMETER Experiment Name: At_42deg_Heat_P Parameter: Tissue Value: Aerial
  misc_feature: MA Experiment ID: 20000185 Result: Up-regulated in Transcription
  misc_feature: MA Experiment 20000185 PARAMETER Experiment Name: At_Roots__P Parameter: Age (day) Value: 7 vs. 21
  misc_feature: MA Experiment 20000185 PARAMETER Experiment Name: At_Roots__P Parameter: Organism Value: A. thaliana
  misc_feature: MA Experiment 20000185 PARAMETER Experiment Name: At_Roots__P Parameter: Tissue Value: Roots vs. Whole Plant
  misc_feature: MA Experiment ID: 20000213 Result: Up-regulated in Transcription
  misc_feature: MA Experiment 20000213 PARAMETER Experiment Name: At_4deg_Cold_P Parameter: Timepoint (hr) Value: 2
  misc_feature: MA Experiment ID: 20000227 Result: Up-regulated in Transcription
  misc_feature: MA Experiment 20000227 PARAMETER Experiment Name: At_Root-Tips-vs-Tops_P Parameter: Tissue Value: Root Tips vs. Root Tops
  misc_feature: MA Experiment ID: 20000234 Result: Down-regulated in Transcription
  misc_feature: MA Experiment 20000234 PARAMETER Experiment Name: At_Siliques_P Parameter: Age (day) Value: 21
  misc_feature: MA Experiment 20000234 PARAMETER Experiment Name: At_Siliques_P Parameter: Organism Value: A. thaliana
  misc_feature: MA Experiment 20000234 PARAMETER Experiment Name: At_Siliques_P Parameter: Plant Line Value: WS
  misc_feature: MA Experiment 20000234 PARAMETER Experiment Name: At_Siliques_P Parameter: Tissue Value: Less Than 5mm Siliques vs. Whole Plant
  misc_feature: MA Experiment ID: 20000235 Result: Down-regulated in Transcription
  misc_feature: MA Experiment 20000235 PARAMETER Experiment Name: At_Siliques_P Parameter: Age (day) Value: 21
  misc_feature: MA Experiment 20000235 PARAMETER Experiment Name: At_Siliques_P Parameter: Organism Value: A. thaliana
  misc_feature: MA Experiment 20000235 PARAMETER Experiment Name: At_Siliques_P Parameter: Plant Line Value: WS
  misc_feature: MA Experiment 20000235 PARAMETER Experiment Name: At_Siliques_P Parameter: Tissue Value: 5-10mm Siliques vs. Whole Plant
  misc_feature: MA Experiment ID: 20000264 Result: Down-regulated in Transcription
  misc_feature: MA Experiment 20000264 PARAMETER Experiment Name: At_Open_Flower_P Parameter: Age (day) Value: 21
  misc_feature: MA Experiment 20000264 PARAMETER Experiment Name: At_Open_Flower_P Parameter: Plant Line Value: WS
  misc_feature: MA Experiment 20000264 PARAMETER Experiment Name: At_Open_Flower_P Parameter: Tissue Value: Open Flower vs. Whole Plant
  misc_feature: MA Experiment ID: 20000265 Result: Down-regulated in Transcription
  misc_feature: MA Experiment 20000265 PARAMETER Experiment Name: At_Open_Flower_P Parameter: Age (day) Value: 21
  misc_feature: MA Experiment 20000265 PARAMETER Experiment Name: At_Open_Flower_P Parameter: Plant Line Value: WS
  misc_feature: MA Experiment 20000265 PARAMETER Experiment Name: At_Open_Flower_P Parameter: Tissue Value: Closed Flower vs. Whole Plant
  misc_feature: MA Experiment ID: 20000286 Result: Down-regulated in Transcription
  misc_feature: MA Experiment 20000286 PARAMETER Experiment Name: At_Open_Flower_P Parameter: Age (day) Value: 21
  misc_feature: MA Experiment 20000286 PARAMETER Experiment Name: At_Open_Flower_P Parameter: Plant Line Value: WS
  misc_feature: MA Experiment 20000286 PARAMETER Experiment Name: At_Open_Flower_P Parameter: Tissue Value: Half Open vs. Whole Plant
  misc_feature: MA Experiment ID: 20000453 Result: Down-regulated in Transcription
  misc_feature: MA Experiment 20000453 PARAMETER Experiment Name: At_100uM_ABA_P Parameter: Age (day) Value: 15
  misc_feature: MA Experiment 20000453 PARAMETER Experiment Name: At_100uM_ABA_P Parameter: Organism Value: A. thaliana
  misc_feature: MA Experiment 20000453 PARAMETER Experiment Name: At_100uM_ABA_P Parameter: Plant Line Value: WS
  misc_feature: MA Experiment 20000453 PARAMETER Experiment Name: At_100uM_ABA_P Parameter: Timepoint (hr) Value: 24
  misc_feature: MA Experiment 20000453 PARAMETER Experiment Name: At_100uM_ABA_P Parameter: Tissue Value: Aerial
  misc_feature: MA Experiment 20000453 PARAMETER Experiment Name: At_100uM_ABA_P Parameter: Treatment Value: 100uM ABA vs. No Treatment
  misc_feature: MA Experiment ID: 20001247 Result: Up-regulated in Transcription
  misc_feature: MA Experiment 20001247 PARAMETER Experiment Name: At_Far-red-induction_P Parameter: Age (day) Value: 7
  misc_feature: MA Experiment 20001247 PARAMETER Experiment Name: At_Far-red-induction_P Parameter: Light Value: Far-red vs. White
  misc_feature: MA Experiment 20001247 PARAMETER Experiment Name: At_Far-red-induction_P Parameter: Organism Value: A. thaliana
  misc_feature: MA Experiment 20001247 PARAMETER Experiment Name: At_Far-red-induction_P Parameter: Plant Line Value: Columbia
  misc_feature: MA Experiment 20001247 PARAMETER Experiment Name: At_Far-red-induction_P Parameter: Timepoint (hr) Value: 1
  misc_feature: MA Experiment 20001247 PARAMETER Experiment Name: At_Far-red-induction_P Parameter: Tissue Value: Whole Plant
  misc_feature: MA Experiment ID: 20001557 Result: Up-regulated in Transcription
  misc_feature: MA Experiment 20001557 PARAMETER Experiment Name: At_Drought_Soil_Dry_P Parameter: Age (day) Value: 27
  misc_feature: MA Experiment 20001557 PARAMETER Experiment Name: At_Drought_Soil_Dry_P Parameter: Organism Value: A. thaliana
  misc_feature: MA Experiment 20001557 PARAMETER Experiment Name: At_Drought_Soil_Dry_P Parameter: Plant Line Value: WS
  misc_feature: MA Experiment 20001557 PARAMETER Experiment Name: At_Drought_Soil_Dry_P Parameter: Post Timepoint (hr) Value: 3
  misc_feature: MA Experiment 20001557 PARAMETER Experiment Name: At_Drought_Soil_Dry_P Parameter: Post-Treatment Value: Re-Water vs. No Drought
  misc_feature: MA Experiment 20001557 PARAMETER Experiment Name: At_Drought_Soil_Dry_P Parameter: Timepoint (day) Value: 13
  misc_feature: MA Experiment 20001557 PARAMETER Experiment Name: At_Drought_Soil_Dry_P Parameter: Treatment Value: Drought vs. No Drought
  misc_feature: MA Experiment ID: 20001904 Result: Up-regulated in Transcription
  misc_feature: MA Experiment 20001904 PARAMETER Experiment Name: At_Drought_Reproduction_P Parameter: Age (day) Value: 37
  misc_feature: MA Experiment 20001904 PARAMETER Experiment Name: At_Drought_Reproduction_P Parameter: Organism Value: A. thaliana
  misc_feature: MA Experiment 20001904 PARAMETER Experiment Name: At_Drought_Reproduction_P Parameter: Plant Line Value: WS
  misc_feature: MA Experiment 20001904 PARAMETER Experiment Name: At_Drought_Reproduction_P Parameter: Timepoint (day) Value: 7
  misc_feature: MA Experiment 20001904 PARAMETER Experiment Name: At_Drought_Reproduction_P Parameter: Tissue Value: Rosettes
  misc_feature: MA Experiment 20001904 PARAMETER Experiment Name: At_Drought_Reproduction_P Parameter: Treatment Value: Drought vs. No Drought
  misc_feature: MA Experiment ID: 20001905 Result: Up-regulated in Transcription
  misc_feature: MA Experiment 20001905 PARAMETER Experiment Name: At_Drought_Reproduction_P Parameter: Age (day) Value: 40
  misc_feature: MA Experiment 20001905 PARAMETER Experiment Name: At_Drought_Reproduction_P Parameter: Organism Value: A. thaliana
  misc_feature: MA Experiment 20001905 PARAMETER Experiment Name: At_Drought_Reproduction_P Parameter: Plant Line Value: WS
  misc_feature: MA Experiment 20001905 PARAMETER Experiment Name: At_Drought_Reproduction_P Parameter: Timepoint (day) Value: 10
  misc_feature: MA Experiment 20001905 PARAMETER Experiment Name: At_Drought_Reproduction_P Parameter: Tissue Value: Rosettes
  misc_feature: MA Experiment 20001905 PARAMETER Experiment Name: At_Drought_Reproduction_P Parameter: Treatment Value: Drought vs. No Drought
  misc_feature: MA Experiment ID: 20001906 Result: Up-regulated in Transcription
  misc_feature: MA Experiment 20001906 PARAMETER Experiment Name: At_Drought_Reproduction_P Parameter: Age (day) Value: 35
  misc_feature: MA Experiment 20001906 PARAMETER Experiment Name: At_Drought_Reproduction_P Parameter: Organism Value: A. thaliana
  misc_feature: MA Experiment 20001906 PARAMETER Experiment Name: At_Drought_Reproduction_P Parameter: Plant Line Value: WS
  misc_feature: MA Experiment 20001906 PARAMETER Experiment Name: At_Drought_Reproduction_P Parameter: Timepoint (day) Value: 5
  misc_feature: MA Experiment 20001906 PARAMETER Experiment Name: At_Drought_Reproduction_P Parameter: Tissue Value: Siliques
  misc_feature: MA Experiment 20001906 PARAMETER Experiment Name: At_Drought_Reproduction_P Parameter: Treatment Value: Drought vs. No Drought
  misc_feature: MA Experiment ID: 20001911 Result: Up-regulated in Transcription
  misc_feature: MA Experiment 20001911 PARAMETER Experiment Name: At_Drought_Reproduction_P Parameter: Age (day) Value: 40
  misc_feature: MA Experiment 20001911 PARAMETER Experiment Name: At_Drought_Reproduction_P Parameter: Organism Value: A. thaliana
  misc_feature: MA Experiment 20001911 PARAMETER Experiment Name: At_Drought_Reproduction_P Parameter: Plant Line Value: WS
  misc_feature: MA Experiment 20001911 PARAMETER Experiment Name: At_Drought_Reproduction_P Parameter: Timepoint (day) Value: 10
  misc_feature: MA Experiment 20001911 PARAMETER Experiment Name: At_Drought_Reproduction_P Parameter: Tissue Value: Flowers
  misc_feature: MA Experiment 20001911 PARAMETER Experiment Name: At_Drought_Reproduction_P Parameter: Treatment Value: Drought vs. No Drought
ataaaacggagtcctataagcgtaaaggaatcatattcctatcaatcaaaaatacaaatcgactttcatattttctctgcataagagagaaagaaaatgggatctcatgtcgcacaaaaacaacacgtagtttgcgttccttatccggctcaaggccacatcaacccaatgatgaaagtggctaaactcctttacgccaaaggcttccatattaccttcgtcaacaccgtctacaaccacaaccgtctcctccggtcccgtgggcctaacgccgttgacgggcttccttctttccggtttgagtccatccctgacggtctacccgagactgacgtggacgtcactcaggacatccctactctttgcgagtccacaatgaagcactgtctcgctccattcaaggagcttctccggcagatcaacgcaagggatgatgttcctcctgtgagctgtatcgtatccgacggttgtatgagcttcacacttgatgctgcggaggagctcggtgtcccggaggttcttttttggacaactagtgcttgtggcttcttggcttacctttactactatcgcttcatcgagaagggattatcaccaataaaagatgagagttacttaaccaaggaacacttggacacaaaaatagactggataccatcgatgaagaacctaagactaaaagacatccctagcttcatccgaacgactaatcctgacgacatcatgctcaactttatcatccgtgaggctgaccgagccaaacgcgcttcagctatcattctcaacacgtttgatgatctcgaacacgacgttatccaatctatgaaatccattgtacctccggtttattctattggaccgttacatttactagagaaacaagagagcggcgagtatagtgaaatcggacggacaggatcgaatctttggagagaggagactgagtgtctggactggctaaacacgaaagctagaaacagtgttgtgtacgttaacttcgggagtataactgttttgagcgcaaaacagcttgtggagtttgcatggggtttggctgcaacggggaaagagtttttgtgggtgatccggccggatttagtagccggggatgaggcaatggttccaccggagtttttaacggctacggcggaccggaggatgttggcaagttggtgtcctcaagagaaagtcctttctcatccggccattggagggttcttgacgcattgcgggtggaactcgacgttggaaagtctatgcggtggagttccaatggtgtgttggccgttttttgcagagcaacaaactaattgtaagttttctcgtgacgaatgggaggttgggattgagattggtggagatgtgaagagagaagaggttgaggcggtggttagggagttgatggatgaagagaagggaaagaatatgagagagaaggcggaagagtggcggcgcttggcgaatgaagcgacggagcataagcatggttcttctaaattgaactttgagatgctcgttaataaggttcttttaggggagtagagactagtaaatatggatttcaagaaaaaagggatttaagcacacaagagtagaccattgctcacaaagaacctctttatttcccaaattaattactcatttactcataatcaaataaacatcttcttattcatcacaaaccaataaaacttactttcctcagttcaaatatttcatactattagactttgttttgataaaaaattgttc

SEQ ID NO: 43979 - protein, 481 aa, Arabidopsis thaliana
  peptide (1)..(481): Ceres Seq. ID no. 13502519
  misc_feature (9)..(481): Pfam Name: UDP-glucoronosyl and UDP-glucosyl transferase Pfam Description: UDP-glucoronosyl and UDP-glucosyl transferase
  misc_feature (2)..(478): Homolog of NCBI NO: 15218268 NR Description: UDP-glucose glucosyltransferase, putative
  misc_feature (4)..(182): Homolog of NCBI NO: 25286822 NR Description: hypothetical protein T16E15.4 - Arabidopsis
  misc_feature (224)..(481): Homolog of NCBI NO: 25286822 NR Description: hypothetical protein T16E15.4 - Arabidopsis
  misc_feature (415)..(481): Homolog of NCBI NO: 15220950 NR Description: glycosyltransferase family [Arabidopsis thaliana]
  misc_feature (1)..(394): Homolog of NCBI NO: 15220950 NR Description: glycosyltransferase family [Arabidopsis thaliana]
  misc_feature (1)..(481): Homolog of NCBI NO: 25286821 NR Description: T16E15.2 protein - Arabidopsis thaliana
  misc_feature (1)..(479): Homolog of NCBI NO: 15219867 NR Description: UDP-glycosyltransferase family [Arabidopsis
  misc_feature (1)..(481): Homolog of NCBI NO: 15219876 NR Description: glycosyltransferase family [Arabidopsis thaliana]
  misc_feature (1)..(481): Homolog of NCBI NO: 17065006 NR Description: UDP-glucose glucosyltransferase [Arabidopsis
  misc_feature (1)..(481): Homolog of NCBI NO: 15219870 NR Description: UDP-glycosyltransferase family [Arabidopsis
MGSHVAQKQHVVCVPYPAQGHINPMMKVAKLLYAKGFHITFVNTVYNHNRLLRSRGPNAVDGLPSFRFESIPDGLPETDVDVTQDIPTLCESTMKHCLAPFKELLRQINARDDVPPVSCIVSDGCMSFTLDAAEELGVPEVLFWTTSACGFLAYLYYYRFIEKGLSPIKDESYLTKEHLDTKIDWIPSMKNLRLKDIPSFIRTTNPDDIMLNFIIREADRAKRASAIILNTFDDLEHDVIQSMKSIVPPVYSIGPLHLLEKQESGEYSEIGRTGSNLWREETECLDWLNTKARNSVVYVNFGSITVLSAKQLVEFAWGLAATGKEFLWVIRPDLVAGDEAMVPPEFLTATADRRMLASWCPQEKVLSHPAIGGFLTHCGWNSTLESLCGGVPMVCWPFFAEQQTNCKFSRDEWEVGIEIGGDVKREEVEAVVRELMDEEKGKNMREKAEEWRRLANEATEHKHGSSKLNFEMLVNKVLLGE

SEQ ID NO: 43980 - protein, 457 aa, Arabidopsis thaliana
  peptide (1)..(457): Ceres Seq. ID no. 13502520
  misc_feature (1)..(457): Pfam Name: UDP-glucoronosyl and UDP-glucosyl transferase Pfam Description: UDP-glucoronosyl and UDP-glucosyl transferase
  misc_feature (1)..(454): Homolog of NCBI NO: 15218268 NR Description: UDP-glucose glucosyltransferase, putative
  misc_feature (1)..(158): Homolog of NCBI NO: 25286822 NR Description: hypothetical protein T16E15.4 - Arabidopsis
  misc_feature (200)..(457): Homolog of NCBI NO: 25286822 NR Description: hypothetical protein T16E15.4 - Arabidopsis
  misc_feature (391)..(457): Homolog of NCBI NO: 15220950 NR Description: glycosyltransferase family [Arabidopsis thaliana]
  misc_feature (1)..(370): Homolog of NCBI NO: 15220950 NR Description: glycosyltransferase family [Arabidopsis thaliana]
  misc_feature (1)..(457): Homolog of NCBI NO: 25286821 NR Description: T16E15.2 protein - Arabidopsis thaliana
  misc_feature (1)..(455): Homolog of NCBI NO: 15219867 NR Description: UDP-glycosyltransferase family [Arabidopsis
  misc_feature (1)..(457): Homolog of NCBI NO: 15219876 NR Description: glycosyltransferase family [Arabidopsis thaliana]
  misc_feature (1)..(457): Homolog of NCBI NO: 17065006 NR Description: UDP-glucose glucosyltransferase [Arabidopsis
  misc_feature (1)..(457): Homolog of NCBI NO: 15219870 NR Description: UDP-glycosyltransferase family [Arabidopsis
MMKVAKLLYAKGFHITFVNTVYNHNRLLRSRGPNAVDGLPSFRFESIPDGLPETDVDVTQDIPTLCESTMKHCLAPFKELLRQINARDDVPPVSCIVSDGCMSFTLDAAEELGVPEVLFWTTSACGFLAYLYYYRFIEKGLSPIKDESYLTKEHLDTKIDWIPSMKNLRLKDIPSFIRTTNPDDIMLNFIIREADRAKRASAIILNTFDDLEHDVIQSMKSIVPPVYSIGPLHLLEKQESGEYSEIGRTGSNLWREETECLDWLNTKARNSVVYVNFGSITVLSAKQLVEFAWGLAATGKEFLWVIRPDLVAGDEAMVPPEFLTATADRRMLASWCPQEKVLSHPAIGGFLTHCGWNSTLESLCGGVPMVCWPFFAEQQTNCKFSRDEWEVGIEIGGDVKREEVEAVVRELMDEEKGKNMREKAEEWRRLANEATEHKHGSSKLNFEMLVNKVLLGE

SEQ ID NO: 43981 - protein, 456 aa, Arabidopsis thaliana
  peptide (1)..(456): Ceres Seq. ID no. 13502521
  misc_feature (1)..(456): Pfam Name: UDP-glucoronosyl and UDP-glucosyl transferase Pfam Description: UDP-glucoronosyl and UDP-glucosyl transferase
  misc_feature (1)..(453): Homolog of NCBI NO: 15218268 NR Description: UDP-glucose glucosyltransferase, putative
  misc_feature (1)..(157): Homolog of NCBI NO: 25286822 NR Description: hypothetical protein T16E15.4 - Arabidopsis
  misc_feature (199)..(456): Homolog of NCBI NO: 25286822 NR Description: hypothetical protein T16E15.4 - Arabidopsis
  misc_feature (390)..(456): Homolog of NCBI NO: 15220950 NR Description: glycosyltransferase family [Arabidopsis thaliana]
  misc_feature (1)..(369): Homolog of NCBI NO: 15220950 NR Description: glycosyltransferase family [Arabidopsis thaliana]
  misc_feature (1)..(456): Homolog of NCBI NO: 25286821 NR Description: T16E15.2 protein - Arabidopsis thaliana
  misc_feature (1)..(454): Homolog of NCBI NO: 15219867 NR Description: UDP-glycosyltransferase family [Arabidopsis
  misc_feature (1)..(456): Homolog of NCBI NO: 15219876 NR Description: glycosyltransferase family [Arabidopsis thaliana]
  misc_feature (1)..(456): Homolog of NCBI NO: 17065006 NR Description: UDP-glucose glucosyltransferase [Arabidopsis
  misc_feature (1)..(456): Homolog of NCBI NO: 15219870 NR Description: UDP-glycosyltransferase family [Arabidopsis
MKVAKLLYAKGFHITFVNTVYNHNRLLRSRGPNAVDGLPSFRFESIPDGLPETDVDVTQDIPTLCESTMKHCLAPFKELLRQINARDDVPPVSCIVSDGCMSFTLDAAEELGVPEVLFWTTSACGFLAYLYYYRFIEKGLSPIKDESYLTKEHLDTKIDWIPSMKNLRLKDIPSFIRTTNPDDIMLNFIIREADRAKRASAIILNTFDDLEHDVIQSMKSIVPPVYSIGPLHLLEKQESGEYSEIGRTGSNLWREETECLDWLNTKARNSVVYVNFGSITVLSAKQLVEFAWGLAATGKEFLWVIRPDLVAGDEAMVPPEFLTATADRRMLASWCPQEKVLSHPAIGGFLTHCGWNSTLESLCGGVPMVCWPFFAEQQTNCKFSRDEWEVGIEIGGDVKREEVEAVVRELMDEEKGKNMREKAEEWRRLANEATEHKHGSSKLNFEMLVNKVLLGE

SEQ ID NO: 43982 - DNA, 1604 bp, Arabidopsis thaliana
  misc_feature (1)..(1604): Ceres Seq. ID no. 13503043
  misc_feature: MA Experiment ID: 20001905 Result: Up-regulated in Transcription
  misc_feature: MA Experiment 20001905 PARAMETER Experiment Name: At_Drought_Reproduction_P Parameter: Age (day) Value: 40
  misc_feature: MA Experiment 20001905 PARAMETER Experiment Name: At_Drought_Reproduction_P Parameter: Organism Value: A. thaliana
  misc_feature: MA Experiment 20001905 PARAMETER Experiment Name: At_Drought_Reproduction_P Parameter: Plant Line Value: WS
  misc_feature: MA Experiment 20001905 PARAMETER Experiment Name: At_Drought_Reproduction_P Parameter: Timepoint (day) Value: 10
  misc_feature: MA Experiment 20001905 PARAMETER Experiment Name: At_Drought_Reproduction_P Parameter: Tissue Value: Rosettes
  misc_feature: MA Experiment 20001905 PARAMETER Experiment Name: At_Drought_Reproduction_P Parameter: Treatment Value: Drought vs. No Drought
gagcgagtgattaatgggacattaatgttacatatagaaaaacaaaaaaataagttattgcctttatacaacaaagttcccaaaattttgaattttttgtaatcatctctaagattctgttaatggtctcgcctgagacatcatcatcacattaccaatcatctccaatggcaaaatacgccggaacaagaaccagaccggttgtatgtatctccgacgtcgttctcttccttggcggagctttcatgtcactaatcctcgtctggtctttcttctccttctcttcaatctccccaaatctcaccgtgaaaaacgaagaatcctccaacaaatgttcttcaggaatcgatatgagccaagatccaaccgacccggtttactacgacgacccggatctaacctacacaatcgaaaaaccggttaaaaactgggacgagaaacgaagacgttggttaaatctacacccttcgtttatccccggagctgagaatcgtacggttatggtaacaggatcacaatctgcgccgtgtaaaaacccaatcggagatcatttgttgcttcgattttttaagaacaaagttgattattgtcggatccatggtcatgatatattctatagtaacgctcttcttcatccgaagatgaattcttattgggcgaaacttccggcggttaaagcggcgatgattgctcatcctgaggcggagtggatctggtgggttgattctgatgctttgtttacggatatggattttacgccgccgtggcgacggtataaggagcataatcttgttgttcatggttggccgggagtgatttataatgatcggagctggacggcgttaaacgccggagtttttctcattaggaattgtcagtggtctatggaactcattgacacgtggacaggtatgggaccagtgagtccagagtacgcaaaatggggacaaatccaacggtcaatattcaaagacaaactcttcccagagtcagatgatcaaacggctctgctttacttactctacaaacacagagaagtgtattatccaaagatatacctcgaaggagacttttatttcgaaggatattggttagagatcgtaccgggtttatccaacgtaacggaacggtatctggagatggaaagagaagacgccacgttgcgtagacgacacgcagagaaagtgagcgaacgatacgctgcgtttcgtgaggaacggtttttaaaaggagaaagaggcgggaaaggaagcaaacggagaccgttcgtgacgcattttacgggatgtcaaccttgtagtggtgatcataacaagatgtacgatggtgacacgtgttggaatgggatgatcaaagccattaatttcgctgataatcaagtgatgcgtaaatatggtttcgtacactcggatctaggcaagacttcccctcttcaacctgtaccgttcgattatcctgatgagccttggtgaaataattgtgttttgttgttttataaactctttagatgtgcttttataatgagttgattattataatccatgaagtgaaaggtttataatgcggaatctttttgaataattcaatgattattggtttatttg

SEQ ID NO: 43983 - protein, 449 aa, Arabidopsis thaliana
  peptide (1)..(449): Ceres Seq. ID no. 13503044
  misc_feature (121)..(399): Pfam Name: galactosyl transferase GMA12/MNN10 family Pfam Description: galactosyl transferase GMA12/MNN10 family
  misc_feature (363)..(431): Homolog of NCBI NO: 15221850 NR Description: transferase - related [Arabidopsis thaliana]
  misc_feature (54)..(337): Homolog of NCBI NO: 25349326 NR Description: hypothetical protein F6A14.20 - Arabidopsis
  misc_feature (54)..(337): Homolog of NCBI NO: 15221850 NR Description: transferase - related [Arabidopsis thaliana]
  misc_feature (363)..(431): Homolog of NCBI NO: 15221224 NR Description: transferase - related [Arabidopsis thaliana]
  misc_feature (66)..(337): Homolog of NCBI NO: 15221224 NR Description: transferase - related [Arabidopsis thaliana]
  misc_feature (365)..(431): Homolog of NCBI NO: 15240848 NR Description: transferase - related [Arabidopsis thaliana]
  misc_feature (66)..(337): Homolog of NCBI NO: 15240848 NR Description: transferase - related [Arabidopsis thaliana]
  misc_feature (21)..(445): Homolog of NCBI NO: 25486551 NR Description: alpha galactosyltransferase (EC 2.4.1.-)
  misc_feature (16)..(449): Homolog of NCBI NO: 22329223 NR Description: transferase - related [Arabidopsis thaliana]
  misc_feature (1)..(449): Homolog of NCBI NO: 18400116 NR Description: transferase - related [Arabidopsis thaliana]
MVSPETSSSHYQSSPMAKYAGTRTRPVVCISDVVLFLGGAFMSLILVWSFFSFSSISPNLTVKNEESSNKCSSGIDMSQDPTDPVYYDDPDLTYTIEKPVKNWDEKRRRWLNLHPSFIPGAENRTVMVTGSQSAPCKNPIGDHLLLRFFKNKVDYCRIHGHDIFYSNALLHPKMNSYWAKLPAVKAAMIAHPEAEWIWWVDSDALFTDMDFTPPWRRYKEHNLVVHGWPGVIYNDRSWTALNAGVFLIRNCQWSMELIDTWTGMGPVSPEYAKWGQIQRSIFKDKLFPESDDQTALLYLLYKHREVYYPKIYLEGDFYFEGYWLEIVPGLSNVTERYLEMEREDATLRRRHAEKVSERYAAFREERFLKGERGGKGSKRRPFVTHFTGCQPCSGDHNKMYDGDTCWNGMIKAINFADNQVMRKYGFVHSDLGKTSPLQPVPFDYPDEPW

SEQ ID NO: 43984 - protein, 434 aa, Arabidopsis thaliana
  peptide (1)..(434): Ceres Seq. ID no. 13503045
  misc_feature (106)..(384): Pfam Name: galactosyl transferase GMA12/MNN10 family Pfam Description: galactosyl transferase GMA12/MNN10 family
  misc_feature (348)..(416): Homolog of NCBI NO: 15221850 NR Description: transferase - related [Arabidopsis thaliana]
  misc_feature (39)..(322): Homolog of NCBI NO: 25349326 NR Description: hypothetical protein F6A14.20 - Arabidopsis
  misc_feature (39)..(322): Homolog of NCBI NO: 15221850 NR Description: transferase - related [Arabidopsis thaliana]
  misc_feature (348)..(416): Homolog of NCBI NO: 15221224 NR Description: transferase - related [Arabidopsis thaliana]
  misc_feature (51)..(322): Homolog of NCBI NO: 15221224 NR Description: transferase - related [Arabidopsis thaliana]
  misc_feature (350)..(416): Homolog of NCBI NO: 15240848 NR Description: transferase - related [Arabidopsis thaliana]
  misc_feature (51)..(322): Homolog of NCBI NO: 15240848 NR Description: transferase - related [Arabidopsis thaliana]
  misc_feature (6)..(430): Homolog of NCBI NO: 25486551 NR Description: alpha galactosyltransferase (EC 2.4.1.-)
  misc_feature (1)..(434): Homolog of NCBI NO: 22329223 NR Description: transferase - related [Arabidopsis thaliana]
  misc_feature (1)..(434): Homolog of NCBI NO: 18400116 NR Description: transferase - related [Arabidopsis thaliana]
MAKYAGTRTRPVVCISDVVLFLGGAFMSLILVWSFFSFSSISPNLTVKNEESSNKCSSGIDMSQDPTDPVYYDDPDLTYTIEKPVKNWDEKRRRWLNLHPSFIPGAENRTVMVTGSQSAPCKNPIGDHLLLRFFKNKVDYCRIHGHDIFYSNALLHPKMNSYWAKLPAVKAAMIAHPEAEWIWWVDSDALFTDMDFTPPWRRYKEHNLVVHGWPGVIYNDRSWTALNAGVFLIRNCQWSMELIDTWTGMGPVSPEYAKWGQIQRSIFKDKLFPESDDQTALLYLLYKHREVYYPKIYLEGDFYFEGYWLEIVPGLSNVTERYLEMEREDATLRRRHAEKVSERYAAFREERFLKGERGGKGSKRRPFVTHFTGCQPCSGDHNKMYDGDTCWNGMIKAINFADNQVMRKYGFVHSDLGKTSPLQPVPFDYPDEPW

SEQ ID NO: 43985 - protein, 408 aa, Arabidopsis thaliana
  peptide (1)..(408): Ceres Seq. ID no. 13503046
  misc_feature (80)..(358): Pfam Name: galactosyl transferase GMA12/MNN10 family Pfam Description: galactosyl transferase GMA12/MNN10 family
  misc_feature (322)..(390): Homolog of NCBI NO: 15221850 NR Description: transferase - related [Arabidopsis thaliana]
  misc_feature (13)..(296): Homolog of NCBI NO: 25349326 NR Description: hypothetical protein F6A14.20 - Arabidopsis
  misc_feature (13)..(296): Homolog of NCBI NO: 15221850 NR Description: transferase - related [Arabidopsis thaliana]
  misc_feature (322)..(390): Homolog of NCBI NO: 15221224 NR Description: transferase - related [Arabidopsis thaliana]
  misc_feature (25)..(296): Homolog of NCBI NO: 15221224 NR Description: transferase - related [Arabidopsis thaliana]
  misc_feature (324)..(390): Homolog of NCBI NO: 15240848 NR Description: transferase - related [Arabidopsis thaliana]
  misc_feature (25)..(296): Homolog of NCBI NO: 15240848 NR Description: transferase - related [Arabidopsis thaliana]
  misc_feature (1)..(404): Homolog of NCBI NO: 25486551 NR Description: alpha galactosyltransferase (EC 2.4.1.-)
  misc_feature (1)..(408): Homolog of NCBI NO: 22329223 NR Description: transferase - related [Arabidopsis thaliana]
  misc_feature (1)..(408): Homolog of NCBI NO: 18400116 NR Description: transferase - related [Arabidopsis thaliana]
MSLILVWSFFSFSSISPNLTVKNEESSNKCSSGIDMSQDPTDPVYYDDPDLTYTIEKPVKNWDEKRRRWLNLHPSFIPGAENRTVMVTGSQSAPCKNPIGDHLLLRFFKNKVDYCRIHGHDIFYSNALLHPKMNSYWAKLPAVKAAMIAHPEAEWIWWVDSDALFTDMDFTPPWRRYKEHNLVVHGWPGVIYNDRSWTALNAGVFLIRNCQWSMELIDTWTGMGPVSPEYAKWGQIQRSIFKDKLFPESDDQTALLYLLYKHREVYYPKIYLEGDFYFEGYWLEIVPGLSNVTERYLEMEREDATLRRRHAEKVSERYAAFREERFLKGERGGKGSKRRPFVTHFTGCQPCSGDHNKMYDGDTCWNGMIKAINFADNQVMRKYGFVHSDLGKTSPLQPVPFDYPDEPW

SEQ ID NO: 43986 - DNA, 1641 bp, Arabidopsis thaliana
  misc_feature (1)..(1641): Ceres Seq. ID no. 12489203
  misc_feature: MA Experiment ID: 20000173 Result: Down-regulated in Transcription
  misc_feature: MA Experiment 20000173 PARAMETER Experiment Name: At_42deg_Heat_P Parameter: Age (day) Value: 14
  misc_feature: MA Experiment 20000173 PARAMETER Experiment Name: At_42deg_Heat_P Parameter: Organism Value: A. thaliana
  misc_feature: MA Experiment 20000173 PARAMETER Experiment Name: At_42deg_Heat_P Parameter: Plant Line Value: WS
  misc_feature: MA Experiment 20000173 PARAMETER Experiment Name: At_42deg_Heat_P Parameter: Temperature (deg C) Value: 42 vs. 22
  misc_feature: MA Experiment 20000173 PARAMETER Experiment Name: At_42deg_Heat_P Parameter: Timepoint (hr) Value: 6
  misc_feature: MA Experiment 20000173 PARAMETER Experiment Name: At_42deg_Heat_P Parameter: Tissue Value: Aerial
  misc_feature: MA Experiment ID: 20000180 Result: Down-regulated in Transcription
  misc_feature: MA Experiment 20000180 PARAMETER Experiment Name: At_Germinating_Seeds_P Parameter: Age (hr) Value: 24 vs. 0
  misc_feature: MA Experiment 20000180 PARAMETER Experiment Name: At_Germinating_Seeds_P Parameter: Tissue Value: Germinating Seeds
  misc_feature: MA Experiment ID: 20000182 Result: Up-regulated in Transcription
  misc_feature: MA Experiment 20000182 PARAMETER Experiment Name: At_2mM_SA_P Parameter: Age (day) Value: 14
  misc_feature: MA Experiment 20000182 PARAMETER Experiment Name: At_2mM_SA_P Parameter: Organism Value: A. thaliana
  misc_feature: MA Experiment 20000182 PARAMETER Experiment Name: At_2mM_SA_P Parameter: Plant Line Value: WS
  misc_feature: MA Experiment 20000182 PARAMETER Experiment Name: At_2mM_SA_P Parameter: Timepoint (hr) Value: 6
  misc_feature: MA Experiment 20000182 PARAMETER Experiment Name: At_2mM_SA_P Parameter: Tissue Value: Aerial
  misc_feature: MA Experiment 20000182 PARAMETER Experiment Name: At_2mM_SA_P Parameter: Treatment Value: 2mM SA vs. No Treatment
  misc_feature: MA Experiment ID: 20000184 Result: Down-regulated in Transcription
  misc_feature: MA Experiment 20000184 PARAMETER Experiment Name: At_Shoots__P Parameter: Age (day) Value: 7
  misc_feature: MA Experiment 20000184 PARAMETER Experiment Name: At_Shoots__P Parameter: Tissue Value: Shoots vs. Whole Plant
  misc_feature: MA Experiment ID: 20000234 Result: Down-regulated in Transcription
  misc_feature: MA Experiment 20000234 PARAMETER Experiment Name: At_Siliques_P Parameter: Age (day) Value: 21
  misc_feature: MA Experiment 20000234 PARAMETER Experiment Name: At_Siliques_P Parameter: Organism Value: A. thaliana
  misc_feature: MA Experiment 20000234 PARAMETER Experiment Name: At_Siliques_P Parameter: Plant Line Value: WS
  misc_feature: MA Experiment 20000234 PARAMETER Experiment Name: At_Siliques_P Parameter: Tissue Value: Less Than 5mm Siliques vs. Whole Plant
  misc_feature: MA Experiment ID: 20000235 Result: Down-regulated in Transcription
  misc_feature: MA Experiment 20000235 PARAMETER Experiment Name: At_Siliques_P Parameter: Age (day) Value: 21
  misc_feature: MA Experiment 20000235 PARAMETER Experiment Name: At_Siliques_P Parameter: Organism Value: A. thaliana
  misc_feature: MA Experiment 20000235 PARAMETER Experiment Name: At_Siliques_P Parameter: Plant Line Value: WS
  misc_feature: MA Experiment 20000235 PARAMETER Experiment Name: At_Siliques_P Parameter: Tissue Value: 5-10mm Siliques vs. Whole Plant
  misc_feature: MA Experiment ID: 20000265 Result: Down-regulated in Transcription
  misc_feature: MA Experiment 20000265 PARAMETER Experiment Name: At_Open_Flower_P Parameter: Age (day) Value: 21
  misc_feature: MA Experiment 20000265 PARAMETER Experiment Name: At_Open_Flower_P Parameter: Plant Line Value: WS
  misc_feature: MA Experiment 20000265 PARAMETER Experiment Name: At_Open_Flower_P Parameter: Tissue Value: Closed Flower vs. Whole Plant
  misc_feature: MA Experiment ID: 20000286 Result: Down-regulated in Transcription
  misc_feature: MA Experiment 20000286 PARAMETER Experiment Name: At_Open_Flower_P Parameter: Age (day) Value: 21
  misc_feature: MA Experiment 20000286 PARAMETER Experiment Name: At_Open_Flower_P Parameter: Plant Line Value: WS
  misc_feature: MA Experiment 20000286 PARAMETER Experiment Name: At_Open_Flower_P Parameter: Tissue Value: Half Open vs. Whole Plant
  misc_feature: MA Experiment ID: 20000438 Result: Down-regulated in Transcription
  misc_feature: MA Experiment 20000438 PARAMETER Experiment Name: At_Shoots__P Parameter: Age (day) Value: 14
  misc_feature: MA Experiment 20000438 PARAMETER Experiment Name: At_Shoots__P Parameter: Tissue Value: Shoots vs. Whole Plant
  misc_feature: MA Experiment ID: 20000439 Result: Down-regulated in Transcription
  misc_feature: MA Experiment 20000439 PARAMETER Experiment Name: At_Roots__P Parameter: Age (day) Value: 14 vs. 21
  misc_feature: MA Experiment 20000439 PARAMETER Experiment Name: At_Roots__P Parameter: Organism Value: A. thaliana
  misc_feature: MA Experiment 20000439 PARAMETER Experiment Name: At_Roots__P Parameter: Tissue Value: Roots vs. Whole Plant
  misc_feature: MA Experiment ID: 20000441 Result: Up-regulated in Transcription
  misc_feature: MA Experiment 20000441 PARAMETER Experiment Name: At_1uM_BR-BRZ__P Parameter: Tissue Value: Shoot Apices
  misc_feature: MA Experiment 20000441 PARAMETER Experiment Name: At_1uM_BR-BRZ__P Parameter: Treatment Value: 1uM BR vs. No Treatment
  misc_feature: MA Experiment ID: 20000445 Result: Up-regulated in Transcription
  misc_feature: MA Experiment 20000445 PARAMETER Experiment Name: At_100uM_NAA__P Parameter: Age (day) Value: 14
  misc_feature: MA Experiment 20000445 PARAMETER Experiment Name: At_100uM_NAA__P Parameter: Organism Value: A. thaliana
  misc_feature: MA Experiment 20000445 PARAMETER Experiment Name: At_100uM_NAA__P Parameter: Plant Line Value: WS
  misc_feature: MA Experiment 20000445 PARAMETER Experiment Name: At_100uM_NAA__P Parameter: Timepoint (hr) Value: 6
  misc_feature: MA Experiment 20000445 PARAMETER Experiment Name: At_100uM_NAA__P Parameter: Tissue Value: Aerial
  misc_feature: MA Experiment 20000445 PARAMETER Experiment Name: At_100uM_NAA__P Parameter: Treatment Value: 100uM NAA vs. No Treatment
  misc_feature: MA Experiment ID: 20000451 Result: Up-regulated in Transcription
  misc_feature: MA Experiment 20000451 PARAMETER Experiment Name: At_CS6879_Shoots-Roots_P Parameter: Age (day) Value: 14
  misc_feature: MA Experiment 20000451 PARAMETER Experiment Name: At_CS6879_Shoots-Roots_P Parameter: Organism Value: A. thaliana
  misc_feature: MA Experiment 20000451 PARAMETER Experiment Name: At_CS6879_Shoots-Roots_P Parameter: Plant Line Value: CS6879 vs. WS
  misc_feature: MA Experiment 20000451 PARAMETER Experiment Name: At_CS6879_Shoots-Roots_P Parameter: Tissue Value: Roots
  misc_feature: MA Experiment ID: 20001248 Result: Up-regulated in Transcription
  misc_feature: MA Experiment 20001248 PARAMETER Experiment Name: At_Far-red-induction_P Parameter: Age (day) Value: 7
  misc_feature: MA Experiment 20001248 PARAMETER Experiment Name: At_Far-red-induction_P Parameter: Light Value: Far-red vs. White
  misc_feature: MA Experiment 20001248 PARAMETER Experiment Name: At_Far-red-induction_P Parameter: Organism Value: A. thaliana
  misc_feature: MA Experiment 20001248 PARAMETER Experiment Name: At_Far-red-induction_P Parameter: Plant Line Value: Columbia
  misc_feature: MA Experiment 20001248 PARAMETER Experiment Name: At_Far-red-induction_P Parameter: Timepoint (hr) Value: 4
  misc_feature: MA Experiment 20001248 PARAMETER Experiment Name: At_Far-red-induction_P Parameter: Tissue Value: Whole Plant
  misc_feature: MA Experiment ID: 20001555 Result: Down-regulated in Transcription
  misc_feature: MA Experiment 20001555 PARAMETER Experiment Name: At_Drought_Soil_Dry_P Parameter: Age (day) Value: 24
  misc_feature: MA Experiment 20001555 PARAMETER Experiment Name: At_Drought_Soil_Dry_P Parameter: Organism Value: A. thaliana
  misc_feature: MA Experiment 20001555 PARAMETER Experiment Name: At_Drought_Soil_Dry_P Parameter: Plant Line Value: WS
  misc_feature: MA Experiment 20001555 PARAMETER Experiment Name: At_Drought_Soil_Dry_P Parameter: Post Timepoint (hr) Value: None
  misc_feature: MA Experiment 20001555 PARAMETER Experiment Name: At_Drought_Soil_Dry_P Parameter: Post-Treatment Value: None
  misc_feature: MA Experiment 20001555 PARAMETER Experiment Name: At_Drought_Soil_Dry_P Parameter: Timepoint (day) Value: 10
  misc_feature: MA Experiment 20001555 PARAMETER Experiment Name: At_Drought_Soil_Dry_P Parameter: Treatment Value: Drought vs. No Drought
  misc_feature: MA Experiment ID: 20001556 Result: Down-regulated in Transcription
  misc_feature: MA Experiment 20001556 PARAMETER Experiment Name: At_Drought_Soil_Dry_P Parameter: Age (day) Value: 26
  misc_feature: MA Experiment 20001556 PARAMETER Experiment Name: At_Drought_Soil_Dry_P Parameter: Organism Value: A. thaliana
  misc_feature: MA Experiment 20001556 PARAMETER Experiment Name: At_Drought_Soil_Dry_P Parameter: Plant Line Value: WS
  misc_feature: MA Experiment 20001556 PARAMETER Experiment Name: At_Drought_Soil_Dry_P Parameter: Post Timepoint (hr) Value: None
  misc_feature: MA Experiment 20001556 PARAMETER Experiment Name: At_Drought_Soil_Dry_P Parameter: Post-Treatment Value: None
  misc_feature: MA Experiment 20001556 PARAMETER Experiment Name: At_Drought_Soil_Dry_P Parameter: Timepoint (day) Value: 12
  misc_feature: MA Experiment 20001556 PARAMETER Experiment Name: At_Drought_Soil_Dry_P Parameter: Treatment Value: Drought vs. No Drought
  misc_feature: MA Experiment ID: 20001560 Result: Down-regulated in Transcription
  misc_feature: MA Experiment 20001560 PARAMETER Experiment Name: At_Drought_Soil_Dry_P Parameter: Age (day) Value: 28
  misc_feature: MA Experiment 20001560 PARAMETER Experiment Name: At_Drought_Soil_Dry_P Parameter: Organism Value: A. thaliana
  misc_feature: MA Experiment 20001560 PARAMETER Experiment Name: At_Drought_Soil_Dry_P Parameter: Plant Line Value: WS
  misc_feature: MA Experiment 20001560 PARAMETER Experiment Name: At_Drought_Soil_Dry_P Parameter: Post Timepoint (hr) Value: None
  misc_feature: MA Experiment 20001560 PARAMETER Experiment Name: At_Drought_Soil_Dry_P Parameter: Post-Treatment Value: None
  misc_feature: MA Experiment 20001560 PARAMETER Experiment Name: At_Drought_Soil_Dry_P Parameter: Timepoint (day) Value: 14
  misc_feature: MA Experiment 20001560 PARAMETER Experiment Name: At_Drought_Soil_Dry_P Parameter: Treatment Value: Drought vs. No Drought
  misc_feature: MA Experiment ID: 20001911 Result: Down-regulated in Transcription
  misc_feature: MA Experiment 20001911 PARAMETER Experiment Name: At_Drought_Reproduction_P Parameter: Age (day) Value: 40
  misc_feature: MA Experiment 20001911 PARAMETER Experiment Name: At_Drought_Reproduction_P Parameter: Organism Value: A. thaliana
  misc_feature: MA Experiment 20001911 PARAMETER Experiment Name: At_Drought_Reproduction_P Parameter: Plant Line Value: WS
  misc_feature: MA Experiment 20001911 PARAMETER Experiment Name: At_Drought_Reproduction_P Parameter: Timepoint (day) Value: 10
  misc_feature: MA Experiment 20001911 PARAMETER Experiment Name: At_Drought_Reproduction_P Parameter: Tissue Value: Flowers
  misc_feature: MA Experiment 20001911 PARAMETER Experiment Name: At_Drought_Reproduction_P Parameter: Treatment Value: Drought vs. No Drought
atgaggagctttatatatttagcataatatctttcagaagtgtgaggccttgttaattaagctcttcttctctatctctctctctccctctcaacctctcaccatggtagctcaagctcctcatgatgatcatcaggatgatgagaaattagcagcagcgagacaaaaagagatcgaagattggttaccaattacttcatcaagaaatgcaaagtggtggtactctgcttttcacaatgtcaccgccatggtcggtgccggagttcttggactcccttacgccatgtctcagctcggatggggaccgggaattgcagtgttggttttgtcatgggtcataacactatacacattatggcaaatggtggaaatgcatgaaatggttcctggaaagcgttttgatcgttaccatgagctcggacaacacgcgtttggagaaaaactcggtctttatatcgttgtgccgcaacaattgatcgttgaaatcggtgtttgcatcgtttatatggtcactggaggcaaatctttaaagaaatttcatgagcttgtttgtgatgattgtaaaccaatcaagcttacttatttcatcatgatctttgcttcggttcacttcgtcctctctcatcttcctaatttcaattccatctccggcgtttctcttgctgctgccgttatgtctctcagctactcaacaatcgcatgggcatcatcagcaagcaaaggtgttcaagaagacgttcaatacggttacaaagcgaaaacaacagccggtacggttttcaatttcttcagcggtttaggtgatgtggcatttgcttacgcgggtcataatgtggtccttgagatccaagcaactatcccttcaacgcctgagaaaccctcaaaaggtcccatgtggagaggagtcatcgttgcttacatcgtcgtagcgctctgttatttccccgtggctctcgttggatactacattttcgggaacggagtcgaagataatattctcatgtcacttaagaaaccggcgtggttaatcgccacggcgaacatcttcgtcgtgatccatgtcattggtagttaccagatatatgcaatgccggtatttgatatgatggagactttattggtcaagaagctaaatttcagaccaaccacaactcttcggttctttgtccgtaatttctacgttgctgcaactatgtttgttggtatgacgtttccgttcttcggtgggcttttggcgttctttggtggattcgcgtttgccccaaccacatacttcctcccttgcgtcatttggttagccatctacaaacccaagaaatacagcttgtcttggtgggccaactgggtatgcatcgtgtttggtcttttcttgatggtcctatcgccaattggagggctaaggacaatcgttattcaagcaaaaggatacaagttttactcataaacgctatgtaattccactaattaagaaacatatctttatattaatatatgtgtgaagaagtttttaagagatcaacacgagacatttatagaagaatcaatggtctggtctgaatctaaatgtagcttttagggtttgtattttcgtgtgtgttatatatattatataaaacaataatattttgctcaaaaaaattt

SEQ ID NO: 43987 - protein, 446 aa, Arabidopsis thaliana
  peptide (1)..(446): Ceres Seq. ID no. 12489204
  misc_feature (13)..(436): Homolog of NCBI NO: 15219896 NR Description: lysine and histidine specific transporter,
  misc_feature (1)..(445): Homolog of NCBI NO: 7489096 NR Description: amino acid permease 1 - wood tobacco
  misc_feature (15)..(446): Homolog of NCBI NO: 15220504 NR Description: putative amino acid permease; protein id:
  misc_feature (15)..(446): Homolog of NCBI NO: 18395471 NR Description: putative lysine/histidine-specific permease
  misc_feature (18)..(446): Homolog of NCBI NO: 30409136 NR Description: histidine amino acid transporter
  misc_feature (20)..(446): Homolog of NCBI NO: 12597815 NR Description: lysine and histidine specific transporter,
  misc_feature (9)..(446): Homolog of NCBI NO: 22330117 NR Description: lysine and histidine specific transporter,
  misc_feature (1)..(446): Homolog of NCBI NO: 2576361 NR Description: lysine and histidine specific transporter
  misc_feature (1)..(446): Homolog of NCBI NO: 30693666 NR Description: lysine and histidine specific transporter,
  misc_feature (1)..(446): Homolog of NCBI NO: 30693663 NR Description: lysine and histidine specific transporter,
MVAQAPHDDHQDDEKLAAARQKEIEDWLPITSSRNAKWWYSAFHNVTAMVGAGVLGLPYAMSQLGWGPGIAVLVLSWVITLYTLWQMVEMHEMVPGKRFDRYHELGQHAFGEKLGLYIVVPQQLIVEIGVCIVYMVTGGKSLKKFHELVCDDCKPIKLTYFIMIFASVHFVLSHLPNFNSISGVSLAAAVMSLSYSTIAWASSASKGVQEDVQYGYKAKTTAGTVFNFFSGLGDVAFAYAGHNVVLEIQATIPSTPEKPSKGPMWRGVIVAYIVVALCYFPVALVGYYIFGNGVEDNILMSLKKPAWLIATANIFVVIHVIGSYQIYAMPVFDMMETLLVKKLNFRPTTTLRFFVRNFYVAATMFVGMTFPFFGGLLAFFGGFAFAPTTYFLPCVIWLAIYKPKKYSLSWWANWVCIVFGLFLMVLSPIGGLRTIVIQAKGYKFYS

SEQ ID NO: 43988 - protein, 398 aa, Arabidopsis thaliana
  peptide (1)..(398): Ceres Seq. ID no. 12489205
  misc_feature (1)..(388): Homolog of NCBI NO: 15219896 NR Description: lysine and histidine specific transporter,
  misc_feature (1)..(397): Homolog of NCBI NO: 7489096 NR Description: amino acid permease 1 - wood tobacco
  misc_feature (1)..(398): Homolog of NCBI NO: 15220504 NR Description: putative amino acid permease; protein id:
  misc_feature (1)..(398): Homolog of NCBI NO: 18395471 NR Description: putative lysine/histidine-specific permease
  misc_feature (1)..(398): Homolog of NCBI NO: 30409136 NR Description: histidine amino acid transporter
  misc_feature (1)..(398): Homolog of NCBI NO: 12597815 NR Description: lysine and histidine specific transporter,
  misc_feature (1)..(398): Homolog of NCBI NO: 22330117 NR Description: lysine and histidine specific transporter,
  misc_feature (1)..(398): Homolog of NCBI NO: 2576361 NR Description: lysine and histidine specific transporter
  misc_feature (1)..(398): Homolog of NCBI NO: 30693666 NR Description: lysine and histidine specific transporter,
  misc_feature (1)..(398): Homolog of NCBI NO: 30693663 NR Description: lysine and histidine specific transporter,
MVGAGVLGLPYAMSQLGWGPGIAVLVLSWVITLYTLWQMVEMHEMVPGKRFDRYHELGQHAFGEKLGLYIVVPQQLIVEIGVCIVYMVTGGKSLKKFHELVCDDCKPIKLTYFIMIFASVHFVLSHLPNFNSISGVSLAAAVMSLSYSTIAWASSASKGVQEDVQYGYKAKTTAGTVFNFFSGLGDVAFAYAGHNVVLEIQATIPSTPEKPSKGPMWRGVIVAYIVVALCYFPVALVGYYIFGNGVEDNILMSLKKPAWLIATANIFVVIHVIGSYQIYAMPVFDMMETLLVKKLNFRPTTTLRFFVRNFYVAATMFVGMTFPFFGGLLAFFGGFAFAPTTYFLPCVIWLAIYKPKKYSLSWWANWVCIVFGLFLMVLSPIGGLRTIVIQAKGYKFYS

SEQ ID NO: 43989 - protein, 386 aa, Arabidopsis thaliana
  peptide (1)..(386): Ceres Seq. ID no. 12489206
  misc_feature (1)..(376): Homolog of NCBI NO: 15219896 NR Description: lysine and histidine specific transporter,
  misc_feature (1)..(385): Homolog of NCBI NO: 7489096 NR Description: amino acid permease 1 - wood tobacco
  misc_feature (1)..(386): Homolog of NCBI NO: 15220504 NR Description: putative amino acid permease; protein id:
  misc_feature (1)..(386): Homolog of NCBI NO: 18395471 NR Description: putative lysine/histidine-specific permease
  misc_feature (1)..(386): Homolog of NCBI NO: 30409136 NR Description: histidine amino acid transporter
  misc_feature (1)..(386): Homolog of NCBI NO: 12597815 NR Description: lysine and histidine specific transporter,
  misc_feature (1)..(386): Homolog of NCBI NO: 22330117 NR Description: lysine and histidine specific transporter,
  misc_feature (1)..(386): Homolog of NCBI NO: 2576361 NR Description: lysine and histidine specific transporter
  misc_feature (1)..(386): Homolog of NCBI NO: 30693666 NR Description: lysine and histidine specific transporter,
  misc_feature (1)..(386): Homolog of NCBI NO: 30693663 NR Description: lysine and histidine specific transporter,
MSQLGWGPGIAVLVLSWVITLYTLWQMVEMHEMVPGKRFDRYHELGQHAFGEKLGLYIVVPQQLIVEIGVCIVYMVTGGKSLKKFHELVCDDCKPIKLTYFIMIFASVHFVLSHLPNFNSISGVSLAAAVMSLSYSTIAWASSASKGVQEDVQYGYKAKTTAGTVFNFFSGLGDVAFAYAGHNVVLEIQATIPSTPEKPSKGPMWRGVIVAYIVVALCYFPVALVGYYIFGNGVEDNILMSLKKPAWLIATANIFVVIHVIGSYQIYAMPVFDMMETLLVKKLNFRPTTTLRFFVRNFYVAATMFVGMTFPFFGGLLAFFGGFAFAPTTYFLPCVIWLAIYKPKKYSLSWWANWVCIVFGLFLMVLSPIGGLRTIVIQAKGYKFYS

SEQ ID NO: 43990 - DNA, 951 bp, Arabidopsis thaliana
  misc_feature (1)..(951): Ceres Seq. ID no. 12559128
  misc_feature: MA Experiment ID: 20000439 Result: Up-regulated in Transcription
  misc_feature: MA Experiment 20000439 PARAMETER Experiment Name: At_Roots__P Parameter: Age (day) Value: 14 vs. 21
  misc_feature: MA Experiment 20000439 PARAMETER Experiment Name: At_Roots__P Parameter: Organism Value: A. thaliana
  misc_feature: MA Experiment 20000439 PARAMETER Experiment Name: At_Roots__P Parameter: Tissue Value: Roots vs. Whole Plant
  misc_feature: MA Experiment ID: 20000495 Result: Up-regulated in Transcription
  misc_feature: MA Experiment 20000495 PARAMETER Experiment Name: At_Guard_Cells_P Parameter: Harvest Date Value: 8/2/2002
  misc_feature: MA Experiment 20000495 PARAMETER Experiment Name: At_Guard_Cells_P Parameter: Organism Value: A. thaliana
  misc_feature: MA Experiment 20000495 PARAMETER Experiment Name: At_Guard_Cells_P Parameter: Tissue Value: Guard Cells vs. Leaves
  misc_feature: MA Experiment ID: 20001247 Result: Up-regulated in Transcription
  misc_feature: MA Experiment 20001247 PARAMETER Experiment Name: At_Far-red-induction_P Parameter: Age (day) Value: 7
  misc_feature: MA Experiment 20001247 PARAMETER Experiment Name: At_Far-red-induction_P Parameter: Light Value: Far-red vs. White
  misc_feature: MA Experiment 20001247 PARAMETER Experiment Name: At_Far-red-induction_P Parameter: Organism Value: A. thaliana
  misc_feature: MA Experiment 20001247 PARAMETER Experiment Name: At_Far-red-induction_P Parameter: Plant Line Value: Columbia
  misc_feature: MA Experiment 20001247 PARAMETER Experiment Name: At_Far-red-induction_P Parameter: Timepoint (hr) Value: 1
  misc_feature: MA Experiment 20001247 PARAMETER Experiment Name: At_Far-red-induction_P Parameter: Tissue Value: Whole Plant
gtcaaaaccccaaatattaaaaaacttatgtttattgctctctctctctgtttctcactactcttactagactcctccatagctaagctccacctactagattagcctccacgcgcttttattattactactgccacagtggcaaatccaccttcttccctctcatggccaccacaaccatcatcatcttcaacacctttcgccgccgtctcaatcccacctgatcactcttcctcctccgtcgccgccgttggaatcagtactactccagactacatgttaggtcttcgaaacatcattctcttatctccaccaccgacgcagataacacggccatctcttcctccggtaaacttcgcggcggtggaagacaacaacacagttggagagaaagtatgcagagactgtggaaacagagcaaagaaagagtgtttgttcgaaagatgtagaacttgttgtaaaagcagaggatacaactgtgtcactcacgtgaagagcacgtggattccttcttctgcaactcgttcttcatcttctccttctgagaggaagaagaagctcaaaatcgataaacagagttcccctaatgtctcgctacttccgacaaccacttctcgtcaagagagaggcttcagagaggggttaccggggaaaattgaagctccggcggtttttaaacggacgagagtaacagcgataagcaacaacgagcaagcagagattggttatcaagcaacagtaactataagtggtcatatcttcaaaggctttcttcattactatggtgttgatcataacaaagcttttccatgtctttctcaaaaatgatggaaactacttcataggattctgtgtataaagtttctctgttttcatctcaaagtttttgtctttttttaactaagtggattttatatatattcgacattaagggacaaaacattaatgggc

SEQ ID NO: 43991 - protein, 183 aa, Arabidopsis thaliana
  peptide (1)..(183): Ceres Seq. ID no. 12559129
  misc_feature (32)..(174): Pfam Name: Domain of unknown function (DUF702) Pfam Description: Domain of unknown function (DUF702)
  misc_feature (41)..(176): Homolog of NCBI NO: 15224110 NR Description: unknown protein; protein id: At2g18120.1
  misc_feature (36)..(174): Homolog of NCBI NO: 15226540 NR Description: hypothetical protein; protein id: At2g21400.1
  misc_feature (41)..(83): Homolog of NCBI NO: 15234365 NR Description: putative protein; protein id: At4g36260.1
  misc_feature (106)..(170): Homolog of NCBI NO: 15234365 NR Description: putative protein; protein id: At4g36260.1
  misc_feature (37)..(170): Homolog of NCBI NO: 15239350 NR Description: zinc finger protein SHI-like
  misc_feature (37)..(83): Homolog of NCBI NO: 18416839 NR Description: lateral root primordia (LRP1); protein id:
  misc_feature (37)..(83): Homolog of NCBI NO: 882341 NR Description: LRP1
  misc_feature (110)..(181): Homolog of NCBI NO: 18416839 NR Description: lateral root primordia (LRP1); protein id:
  misc_feature (110)..(181): Homolog of NCBI NO: 882341 NR Description: LRP1
  misc_feature (1)..(183): Homolog of NCBI NO: 15232522 NR Description: putative protein
MLGLRNIILLSPPPTQITRPSLPPVNFAAVEDNNTVGEKVCRDCGNRAKKECLFERCRTCCKSRGYNCVTHVKSTWIPSSATRSSSSPSERKKKLKIDKQSSPNVSLLPTTTSRQERGFREGLPGKIEAPAVFKRTRVTAISNNEQAEIGYQATVTISGHIFKGFLHYYGVDHNKAFPCLSQK

SEQ ID NO: 43992 - DNA, 779 bp, Arabidopsis thaliana; identical to SEQ ID NO: 36727
  misc_feature (1)..(779): Ceres Seq. ID no. 12580269
  misc_feature: MA Experiment ID: 108434 Result: Up-regulated in Transcription
  misc_feature: MA Experiment 108434 PARAMETER Experiment Name: At_Root_Tips_cDNA_P Parameter: Tissue Value: Root Tips
  misc_feature: MA Experiment ID: 108462 Result: Down-regulated in Transcription
  misc_feature: MA Experiment 108462 PARAMETER Experiment Name: At_Germinating_Seeds_cDNA_P Parameter: Age (day) Value: 2 vs. 0
  misc_feature: MA Experiment 108462 PARAMETER Experiment Name: At_Germinating_Seeds_cDNA_P Parameter: Tissue Value: Germinating Seeds
  misc_feature: MA Experiment ID: 108463 Result: Down-regulated in Transcription
  misc_feature: MA Experiment 108463 PARAMETER Experiment Name: At_Germinating_Seeds_cDNA_P Parameter: Age (day) Value: 3 vs. 0
  misc_feature: MA Experiment 108463 PARAMETER Experiment Name: At_Germinating_Seeds_cDNA_P Parameter: Tissue Value: Germinating Seeds
  misc_feature: MA Experiment ID: 108464 Result: Down-regulated in Transcription
  misc_feature: MA Experiment 108464 PARAMETER Experiment Name: At_Germinating_Seeds_cDNA_P Parameter: Age (day) Value: 4 vs. 0
  misc_feature: MA Experiment 108464 PARAMETER Experiment Name: At_Germinating_Seeds_cDNA_P Parameter: Tissue Value: Germinating Seeds
  misc_feature: MA Experiment ID: 108561 Result: Down-regulated in Transcription
  misc_feature: MA Experiment 108561 PARAMETER Experiment Name: At_100uM_ABA_cDNA_P Parameter: Timepoint (hr) Value: 6
  misc_feature: MA Experiment 108561 PARAMETER Experiment Name: At_100uM_ABA_cDNA_P Parameter: Tissue Value: Aerial
  misc_feature: MA Experiment 108561 PARAMETER Experiment Name: At_100uM_ABA_cDNA_P Parameter: Treatment Value: 100uM ABA vs. No Treatment
  misc_feature: MA Experiment ID: 108573 Result: Down-regulated in Transcription
  misc_feature: MA Experiment 108573 PARAMETER Experiment Name: At_Drought_cDNA_P Parameter: Timepoint (hr) Value: 6
  misc_feature: MA Experiment 108573 PARAMETER Experiment Name: At_Drought_cDNA_P Parameter: Tissue Value: Aerial
  misc_feature: MA Experiment 108573 PARAMETER Experiment Name: At_Drought_cDNA_P Parameter: Treatment Value: Drought vs. No Drought
  misc_feature: MA Experiment ID: 108585 Result: Down-regulated in Transcription
  misc_feature: MA Experiment 108585 PARAMETER Experiment Name: At_5mM_NaNP_cDNA_P Parameter: Timepoint (hr) Value: 6
  misc_feature: MA Experiment 108585 PARAMETER Experiment Name: At_5mM_NaNP_cDNA_P Parameter: Tissue Value: Aerial
  misc_feature: MA Experiment 108585 PARAMETER Experiment Name: At_5mM_NaNP_cDNA_P Parameter: Treatment Value: null
  misc_feature: MA Experiment ID: 108595 Result: Down-regulated in Transcription
  misc_feature: MA Experiment 108595 PARAMETER Experiment Name: At_Ler-pi_Ovule_cDNA_P Parameter: Plant Line Value: null
  misc_feature: MA Experiment ID: 108607 Result: Down-regulated in Transcription
  misc_feature: MA Experiment 108607 PARAMETER Experiment Name: At_100uM_ABA_cDNA_P Parameter: Timepoint (hr) Value: 4
  misc_feature: MA Experiment 108607 PARAMETER Experiment Name: At_100uM_ABA_cDNA_P Parameter: Tissue Value: Aerial
  misc_feature: MA Experiment 108607 PARAMETER Experiment Name: At_100uM_ABA_cDNA_P Parameter: Treatment Value: 100uM ABA vs. No Treatment
  misc_feature: MA Experiment ID: 108609 Result: Down-regulated in Transcription
  misc_feature: MA Experiment 108609 PARAMETER Experiment Name: At_100uM_ABA_cDNA_P Parameter: Timepoint (hr) Value: 24
  misc_feature: MA Experiment 108609 PARAMETER Experiment Name: At_100uM_ABA_cDNA_P Parameter: Tissue Value: Aerial
  misc_feature: MA Experiment 108609 PARAMETER Experiment Name: At_100uM_ABA_cDNA_P Parameter: Treatment Value: 100uM ABA vs. No Treatment
  misc_feature: MA Experiment ID: 108668 Result: Down-regulated in Transcription
  misc_feature: MA Experiment 108668 PARAMETER Experiment Name: At_2mM_SA_cDNA_P Parameter: Plant Line Value: WS
  misc_feature: MA Experiment 108668 PARAMETER Experiment Name: At_2mM_SA_cDNA_P Parameter: Timepoint (hr) Value: 6
  misc_feature: MA Experiment 108668 PARAMETER Experiment Name: At_2mM_SA_cDNA_P Parameter: Treatment Value: 2mM SA vs. No Treatment
  misc_feature: MA Experiment ID: 20000307 Result: Up-regulated in Transcription
  misc_feature: MA Experiment 20000307 PARAMETER Experiment Name: At_Germinating_Seeds_Sub_P Parameter: Age (hr) Value: 24 vs. 0
  misc_feature: MA Experiment 20000307 PARAMETER Experiment Name: At_Germinating_Seeds_Sub_P Parameter: Organism Value: A. thaliana
  misc_feature: MA Experiment 20000307 PARAMETER Experiment Name: At_Germinating_Seeds_Sub_P Parameter: Plant Line Value: WS
  misc_feature: MA Experiment 20000307 PARAMETER Experiment Name: At_Germinating_Seeds_Sub_P Parameter: Tissue Value: Germinating Seeds
  misc_feature: MA Experiment ID: 20000314 Result: Down-regulated in Transcription
  misc_feature: MA Experiment 20000314 PARAMETER Experiment Name: At_14day_Shoots-Roots_Sub_P Parameter: Age (day) Value: 14
  misc_feature: MA Experiment 20000314 PARAMETER Experiment Name: At_14day_Shoots-Roots_Sub_P Parameter: Organism Value: A. thaliana
  misc_feature: MA Experiment 20000314 PARAMETER Experiment Name: At_14day_Shoots-Roots_Sub_P Parameter: Plant Line Value: WS
  misc_feature: MA Experiment 20000314 PARAMETER Experiment Name: At_14day_Shoots-Roots_Sub_P Parameter: Tissue Value: Roots vs. Whole Plant
  misc_feature: MA Experiment ID: 20000315 Result: Up-regulated in Transcription
  misc_feature: MA Experiment 20000315 PARAMETER Experiment Name: At_14day_Shoots-Roots_Sub_P Parameter: Age (day) Value: 14
  misc_feature: MA Experiment 20000315 PARAMETER Experiment Name: At_14day_Shoots-Roots_Sub_P Parameter: Organism Value: A. thaliana
  misc_feature: MA Experiment 20000315 PARAMETER Experiment Name: At_14day_Shoots-Roots_Sub_P Parameter: Plant Line Value: WS
  misc_feature: MA Experiment 20000315 PARAMETER Experiment Name: At_14day_Shoots-Roots_Sub_P Parameter: Tissue Value: Shoots vs. Whole Plant
  misc_feature: MA Experiment ID: 20000347 Result: Down-regulated in Transcription
  misc_feature: MA Experiment 20000347 PARAMETER Experiment Name: At_2mM_SA_Sub_P Parameter: Age (day) Value: 14
  misc_feature: MA Experiment 20000347 PARAMETER Experiment Name: At_2mM_SA_Sub_P Parameter: Organism Value: A. thaliana
  misc_feature: MA Experiment 20000347 PARAMETER Experiment Name: At_2mM_SA_Sub_P Parameter: Plant Line Value: WS
  misc_feature: MA Experiment 20000347 PARAMETER Experiment Name: At_2mM_SA_Sub_P Parameter: Timepoint (hr) Value: 6
  misc_feature: MA Experiment 20000347 PARAMETER Experiment Name: At_2mM_SA_Sub_P Parameter: Tissue Value: Aerial
  misc_feature: MA Experiment 20000347 PARAMETER Experiment Name: At_2mM_SA_Sub_P Parameter: Treatment Value: 2mM SA vs. No Treatment
  misc_feature: MA Experiment ID: 20000349 Result: Down-regulated in Transcription
  misc_feature: MA Experiment 20000349 PARAMETER Experiment Name: At_100uM_ABA_Sub_P Parameter: Age (day) Value: 14
  misc_feature: MA Experiment 20000349 PARAMETER Experiment Name: At_100uM_ABA_Sub_P Parameter: Organism Value: A. thaliana
  misc_feature: MA Experiment 20000349 PARAMETER Experiment Name: At_100uM_ABA_Sub_P Parameter: Plant Line Value: WS
  misc_feature: MA Experiment 20000349 PARAMETER Experiment Name: At_100uM_ABA_Sub_P Parameter: Timepoint (hr) Value: 6
  misc_feature: MA Experiment 20000349 PARAMETER Experiment Name: At_100uM_ABA_Sub_P Parameter: Tissue Value: Aerial
  misc_feature: MA Experiment 20000349 PARAMETER Experiment Name: At_100uM_ABA_Sub_P Parameter: Treatment Value: 100uM ABA vs. No Treatment
  misc_feature: MA Experiment ID: 20000352 Result: Down-regulated in Transcription
  misc_feature: MA Experiment 20000352 PARAMETER Experiment Name: At_Drought_Sub_P Parameter: Age (day) Value: 7
  misc_feature: MA Experiment 20000352 PARAMETER Experiment Name: At_Drought_Sub_P Parameter: Organism Value: A. thaliana
  misc_feature: MA Experiment 20000352 PARAMETER Experiment Name: At_Drought_Sub_P Parameter: Plant Line Value: WS
  misc_feature: MA Experiment 20000352 PARAMETER Experiment Name: At_Drought_Sub_P Parameter: Timepoint (hr) Value: 6
  misc_feature: MA Experiment 20000352 PARAMETER Experiment Name: At_Drought_Sub_P Parameter: Tissue Value: Whole Plant
  misc_feature: MA Experiment 20000352 PARAMETER Experiment Name: At_Drought_Sub_P Parameter: Treatment Value: Drought vs. No Drought
  misc_feature: MA Experiment ID: 20000355 Result: Up-regulated in Transcription
  misc_feature: MA Experiment 20000355 PARAMETER Experiment Name: At_Siliques_Sub_P Parameter: Age (day) Value: 21
  misc_feature: MA Experiment 20000355 PARAMETER Experiment Name: At_Siliques_Sub_P Parameter: Organism Value: A. thaliana
  misc_feature: MA Experiment 20000355 PARAMETER Experiment Name: At_Siliques_Sub_P Parameter: Plant Line Value: WS
  misc_feature: MA Experiment 20000355 PARAMETER Experiment Name: At_Siliques_Sub_P Parameter: Tissue Value: Less Than 5mm Siliques vs. Whole Plant

SEQ ID NO: 43993 - protein, 122 aa, Arabidopsis thaliana; identical to SEQ ID NO: 36728
  peptide (1)..(122): Ceres Seq. ID no. 12580270
  misc_feature (54)..(117): Pfam Name: Protein of unknown function (DUF861) Pfam Description: Protein of unknown function (DUF861)
  misc_feature (54)..(117): Pfam Name: Protein of unknown function (DUF861) Pfam Description: Protein of unknown function (DUF861)
  misc_feature (54)..(117): Pfam Name: Protein of unknown function (DUF861) Pfam Description: Protein of unknown function (DUF861)
  misc_feature (46)..(114): Homolog of NCBI NO: 17229206 NR Description: hypothetical protein [Nostoc sp. PCC 7120]
  misc_feature (20)..(114): Homolog of NCBI NO: 15234988 NR Description: putative protein
  misc_feature (42)..(114): Homolog of NCBI NO: 15235021 NR Description: putative protein
  misc_feature (46)..(114): Homolog of NCBI NO: 23127631 NR Description: hypothetical protein [Nostoc punctiforme]
  misc_feature (24)..(114): Homolog of NCBI NO: 21553516 NR Description: unknown [Arabidopsis thaliana]
  misc_feature (46)..(114): Homolog of NCBI NO: 17229206 NR Description: hypothetical protein [Nostoc sp. PCC 7120]
  misc_feature (42)..(114): Homolog of NCBI NO: 15235021 NR Description: putative protein
  misc_feature (24)..(114): Homolog of NCBI NO: 21553516 NR Description: unknown [Arabidopsis thaliana]
  misc_feature (46)..(114): Homolog of NCBI NO: 23127631 NR Description: hypothetical protein [Nostoc punctiforme]
  misc_feature (42)..(114): Homolog of NCBI NO: 15235021 NR Description: putative protein
  misc_feature (20)..(114): Homolog of NCBI NO: 15234988 NR Description: putative protein
  misc_feature (46)..(114): Homolog of NCBI NO: 17229206 NR Description: hypothetical protein [Nostoc sp. PCC 7120]
  misc_feature (1)..(117): Homolog of NCBI NO: 21592432 NR Description: unknown [Arabidopsis thaliana]
  misc_feature (1)..(117): Homolog of NCBI NO: 15225202 NR Description: hypothetical protein; protein id: At2g32180.1
  misc_feature (1)..(117): Homolog of NCBI NO: 18403036 NR Description: expressed protein
  misc_feature (6)..(57): Homolog of NCBI NO: 26451964 NR Description: unknown protein [Arabidopsis thaliana]
  misc_feature (23)..(114): Homolog of NCBI NO: 38344542 NR Description: OSJNBa0027P08.10 [Oryza sativa (japonica
  misc_feature (1)..(117): Homolog of NCBI NO: 21592432 NR Description: unknown [Arabidopsis thaliana]
  misc_feature (1)..(117): Homolog of NCBI NO: 15225202 NR Description: hypothetical protein; protein id: At2g32180.1
  misc_feature (1)..(117): Homolog of NCBI NO: 18403036 NR Description: expressed protein
  misc_feature (6)..(57): Homolog of NCBI NO: 26451964 NR Description: unknown protein [Arabidopsis thaliana]
  misc_feature (23)..(114): Homolog of NCBI NO: 38344542 NR Description: OSJNBa0027P08.10 [Oryza sativa (japonica
  misc_feature (24)..(114): Homolog of NCBI NO: 21553516 NR Description: unknown [Arabidopsis thaliana]
  misc_feature (46)..(114): Homolog of NCBI NO: 23127631 NR Description: hypothetical protein [Nostoc punctiforme]
  misc_feature (20)..(114): Homolog of NCBI NO: 15234988 NR Description: putative protein
  misc_feature (23)..(114): Homolog of NCBI NO: 38344542 NR Description: OSJNBa0027P08.10 [Oryza sativa (japonica
  misc_feature (6)..(57): Homolog of NCBI NO: 26451964 NR Description: unknown protein [Arabidopsis thaliana]
  misc_feature (1)..(117): Homolog of NCBI NO: 18403036 NR Description: expressed protein
  misc_feature (1)..(117): Homolog of NCBI NO: 15225202 NR Description: hypothetical protein; protein id: At2g32180.1
  misc_feature (1)..(117): Homolog of NCBI NO: 21592432 NR Description: unknown [Arabidopsis thaliana]

SEQ ID NO: 43994 - protein, 117 aa, Arabidopsis thaliana; identical to SEQ ID NO: 36729
  peptide (1)..(117): Ceres Seq. ID no. 12580271
  misc_feature (49)..(112): Pfam Name: Protein of unknown function (DUF861) Pfam Description: Protein of unknown function (DUF861)
  misc_feature (49)..(112): Pfam Name: Protein of unknown function (DUF861) Pfam Description: Protein of unknown function (DUF861)
  misc_feature (49)..(112): Pfam Name: Protein of unknown function (DUF861) Pfam Description: Protein of unknown function (DUF861)
  misc_feature (41)..(109): Homolog of NCBI NO: 17229206 NR Description: hypothetical protein [Nostoc sp. PCC 7120]
  misc_feature (15)..(109): Homolog of NCBI NO: 15234988 NR Description: putative protein
  misc_feature (37)..(109): Homolog of NCBI NO: 15235021 NR Description: putative protein
  misc_feature (41)..(109): Homolog of NCBI NO: 23127631 NR Description: hypothetical protein [Nostoc punctiforme]
  misc_feature (19)..(109): Homolog of NCBI NO: 21553516 NR Description: unknown [Arabidopsis thaliana]
  misc_feature (41)..(109): Homolog of NCBI NO: 17229206 NR Description: hypothetical protein [Nostoc sp. PCC 7120]
  misc_feature (37)..(109): Homolog of NCBI NO: 15235021 NR Description: putative protein
  misc_feature (19)..(109): Homolog of NCBI NO: 21553516 NR Description: unknown [Arabidopsis thaliana]
  misc_feature (41)..(109): Homolog of NCBI NO: 23127631 NR Description: hypothetical protein [Nostoc punctiforme]
  misc_feature (37)..(109): Homolog of NCBI NO: 15235021 NR Description: putative protein
  misc_feature (15)..(109): Homolog of NCBI NO: 15234988 NR Description: putative protein
  misc_feature (41)..(109): Homolog of NCBI NO: 17229206 NR Description: hypothetical protein [Nostoc sp. PCC 7120]
  misc_feature (1)..(112): Homolog of NCBI NO: 21592432 NR Description: unknown [Arabidopsis thaliana]
  misc_feature (1)..(112): Homolog of NCBI NO: 15225202 NR Description: hypothetical protein; protein id: At2g32180.1
  misc_feature (1)..(112): Homolog of NCBI NO: 18403036 NR Description: expressed protein
  misc_feature (1)..(52): Homolog of NCBI NO: 26451964 NR Description: unknown protein [Arabidopsis thaliana]
  misc_feature (18)..(109): Homolog of NCBI NO: 38344542 NR Description: OSJNBa0027P08.10 [Oryza sativa (japonica
  misc_feature (1)..(112): Homolog of NCBI NO: 21592432 NR Description: unknown [Arabidopsis thaliana]
  misc_feature (1)..(112): Homolog of NCBI NO: 15225202 NR Description: hypothetical protein; protein id: At2g32180.1
  misc_feature (1)..(112): Homolog of NCBI NO: 18403036 NR Description: expressed protein
  misc_feature (1)..(52): Homolog of NCBI NO: 26451964 NR Description: unknown protein [Arabidopsis thaliana]
  misc_feature (18)..(109): Homolog of NCBI NO: 38344542 NR Description: OSJNBa0027P08.10 [Oryza sativa (japonica
  misc_feature (19)..(109): Homolog of NCBI NO: 21553516 NR Description: unknown [Arabidopsis thaliana]
  misc_feature (41)..(109): Homolog of NCBI NO: 23127631 NR Description: hypothetical protein [Nostoc punctiforme]
  misc_feature (15)..(109): Homolog of NCBI NO: 15234988 NR Description: putative protein
  misc_feature (18)..(109): Homolog of NCBI NO: 38344542 NR Description: OSJNBa0027P08.10 [Oryza sativa (japonica
  misc_feature (1)..(52): Homolog of NCBI NO: 26451964 NR Description: unknown protein [Arabidopsis thaliana]
  misc_feature (1)..(112): Homolog of NCBI NO: 18403036 NR Description: expressed protein
  misc_feature (1)..(112): Homolog of NCBI NO: 15225202 NR Description: hypothetical protein; protein id: At2g32180.1
  misc_feature (1)..(112): Homolog of NCBI NO: 21592432 NR Description: unknown [Arabidopsis thaliana]

SEQ ID NO: 43995 - protein, 89 aa, Arabidopsis thaliana; identical to SEQ ID NO: 36730
  peptide (1)..(89): Ceres Seq. ID no. 12580272
  misc_feature (21)..(84): Pfam Name: Protein of unknown function (DUF861) Pfam Description: Protein of unknown function (DUF861)
  misc_feature (21)..(84): Pfam Name: Protein of unknown function (DUF861) Pfam Description: Protein of unknown function (DUF861)
  misc_feature (21)..(84): Pfam Name: Protein of unknown function (DUF861) Pfam Description: Protein of unknown function (DUF861)
  misc_feature (13)..(81): Homolog of NCBI NO: 17229206 NR Description: hypothetical protein [Nostoc sp. PCC 7120]
  misc_feature (1)..(81): Homolog of NCBI NO: 15234988 NR Description: putative protein
  misc_feature (9)..(81): Homolog of NCBI NO: 15235021 NR Description: putative protein
  misc_feature (13)..(81): Homolog of NCBI NO: 23127631 NR Description: hypothetical protein [Nostoc punctiforme]
  misc_feature (1)..(81): Homolog of NCBI NO: 21553516 NR Description: unknown [Arabidopsis thaliana]
  misc_feature (13)..(81): Homolog of NCBI NO: 17229206 NR Description: hypothetical protein [Nostoc sp. PCC 7120]
  misc_feature (9)..(81): Homolog of NCBI NO: 15235021 NR Description: putative protein
  misc_feature (1)..(81): Homolog of NCBI NO: 21553516 NR Description: unknown [Arabidopsis thaliana]
  misc_feature (13)..(81): Homolog of NCBI NO: 23127631 NR Description: hypothetical protein [Nostoc punctiforme]
  misc_feature (9)..(81): Homolog of NCBI NO: 15235021 NR Description: putative protein
  misc_feature (1)..(81): Homolog of NCBI NO: 15234988 NR Description: putative protein
  misc_feature (13)..(81): Homolog of NCBI NO: 17229206 NR Description: hypothetical protein [Nostoc sp. PCC 7120]
  misc_feature (1)..(84): Homolog of NCBI NO: 21592432 NR Description: unknown [Arabidopsis thaliana]
  misc_feature (1)..(84): Homolog of NCBI NO: 15225202 NR Description: hypothetical protein; protein id: At2g32180.1
  misc_feature (1)..(84): Homolog of NCBI NO: 18403036 NR Description: expressed protein
  misc_feature (1)..(24): Homolog of NCBI NO: 26451964 NR Description: unknown protein [Arabidopsis thaliana]
  misc_feature (1)..(81): Homolog of NCBI NO: 38344542 NR Description: OSJNBa0027P08.10 [Oryza sativa (japonica
  misc_feature (1)..(84): Homolog of NCBI NO: 21592432 NR Description: unknown [Arabidopsis thaliana]
  misc_feature (1)..(84): Homolog of NCBI NO: 15225202 NR Description: hypothetical protein; protein id: At2g32180.1
  misc_feature (1)..(84): Homolog of NCBI NO: 18403036 NR Description: expressed protein
  misc_feature (1)..(24): Homolog of NCBI NO: 26451964 NR Description: unknown protein [Arabidopsis thaliana]
  misc_feature (1)..(81): Homolog of NCBI NO: 38344542 NR Description: OSJNBa0027P08.10 [Oryza sativa (japonica
  misc_feature (1)..(81): Homolog of NCBI NO: 21553516 NR Description: unknown [Arabidopsis thaliana]
  misc_feature (13)..(81): Homolog of NCBI NO: 23127631 NR Description: hypothetical protein [Nostoc punctiforme]
  misc_feature (1)..(81): Homolog of NCBI NO: 15234988 NR Description: putative protein
  misc_feature (1)..(81): Homolog of NCBI NO: 38344542 NR Description: OSJNBa0027P08.10 [Oryza sativa (japonica
  misc_feature (1)..(24): Homolog of NCBI NO: 26451964 NR Description: unknown protein [Arabidopsis thaliana]
  misc_feature (1)..(84): Homolog of NCBI NO: 18403036 NR Description: expressed protein
  misc_feature (1)..(84): Homolog of NCBI NO: 15225202 NR Description: hypothetical protein; protein id: At2g32180.1
  misc_feature (1)..(84): Homolog of NCBI NO: 21592432 NR Description: unknown [Arabidopsis thaliana]

SEQ ID NO: 43996 - DNA, 1868 bp, Arabidopsis thaliana
  misc_feature (1)..(1868): Ceres Seq. ID no. 12488517
  misc_feature: MA Experiment ID: 20000171 Result: Up-regulated in Transcription
  misc_feature: MA Experiment 20000171 PARAMETER Experiment Name: At_42deg_Heat_P Parameter: Age (day) Value: 14
  misc_feature: MA Experiment 20000171 PARAMETER Experiment Name: At_42deg_Heat_P Parameter: Organism Value: A. thaliana
  misc_feature: MA Experiment 20000171 PARAMETER Experiment Name: At_42deg_Heat_P Parameter: Plant Line Value: WS
  misc_feature: MA Experiment 20000171 PARAMETER Experiment Name: At_42deg_Heat_P Parameter: Temperature (deg C) Value: 42 vs. 22
  misc_feature: MA Experiment 20000171 PARAMETER Experiment Name: At_42deg_Heat_P Parameter: Timepoint (hr) Value: 1
  misc_feature: MA Experiment 20000171 PARAMETER Experiment Name: At_42deg_Heat_P Parameter: Tissue Value: Aerial
  misc_feature: MA Experiment ID: 20000179 Result: Up-regulated in Transcription
  misc_feature: MA Experiment 20000179 PARAMETER Experiment Name: At_Germinating_Seeds_P Parameter: Age (hr) Value: 6 vs. 0
  misc_feature: MA Experiment 20000179 PARAMETER Experiment Name: At_Germinating_Seeds_P Parameter: Tissue Value: Germinating Seeds
  misc_feature: MA Experiment ID: 20000180 Result: Up-regulated in Transcription
  misc_feature: MA Experiment 20000180 PARAMETER Experiment Name: At_Germinating_Seeds_P Parameter: Age (hr) Value: 24 vs. 0
  misc_feature: MA Experiment 20000180 PARAMETER Experiment Name: At_Germinating_Seeds_P Parameter: Tissue Value: Germinating Seeds
  misc_feature: MA Experiment ID: 20000184 Result: Up-regulated in Transcription
  misc_feature: MA Experiment 20000184 PARAMETER Experiment Name: At_Shoots__P Parameter: Age (day) Value: 7
  misc_feature: MA Experiment 20000184 PARAMETER Experiment Name: At_Shoots__P Parameter: Tissue Value: Shoots vs. Whole Plant
  misc_feature: MA Experiment ID: 20000185 Result: Up-regulated in Transcription
  misc_feature: MA Experiment 20000185 PARAMETER Experiment Name: At_Roots__P Parameter: Age (day) Value: 7 vs. 21
  misc_feature: MA Experiment 20000185 PARAMETER Experiment Name: At_Roots__P Parameter: Organism Value: A. thaliana
  misc_feature: MA Experiment 20000185 PARAMETER Experiment Name: At_Roots__P Parameter: Tissue Value: Roots vs. Whole Plant
  misc_feature: MA Experiment ID: 20000227 Result: Up-regulated in Transcription
  misc_feature: MA Experiment 20000227 PARAMETER Experiment Name: At_Root-Tips-vs-Tops_P Parameter: Tissue Value: Root Tips vs. Root Tops
  misc_feature: MA Experiment ID: 20000438 Result: Up-regulated in Transcription
  misc_feature: MA Experiment 20000438 PARAMETER Experiment Name: At_Shoots__P Parameter: Age (day) Value: 14
  misc_feature: MA Experiment 20000438 PARAMETER Experiment Name: At_Shoots__P Parameter: Tissue Value: Shoots vs. Whole Plant
  misc_feature: MA Experiment ID: 20000439 Result: Up-regulated in Transcription
  misc_feature: MA Experiment 20000439 PARAMETER Experiment Name: At_Roots__P Parameter: Age (day) Value: 14 vs. 21
  misc_feature: MA Experiment 20000439 PARAMETER Experiment Name: At_Roots__P Parameter: Organism Value: A. thaliana
  misc_feature: MA Experiment 20000439 PARAMETER Experiment Name: At_Roots__P Parameter: Tissue Value: Roots vs. Whole Plant
  misc_feature: MA Experiment ID: 20000527 Result: Down-regulated in Transcription
  misc_feature: MA Experiment 20000527 PARAMETER Experiment Name: At_10percent_PEG_P Parameter: Age (day) Value: 20
  misc_feature: MA Experiment 20000527 PARAMETER Experiment Name: At_10percent_PEG_P Parameter: Organism Value: A. thaliana
  misc_feature: MA Experiment 20000527 PARAMETER Experiment Name: At_10percent_PEG_P Parameter: Plant Line Value: WS
  misc_feature: MA Experiment 20000527 PARAMETER Experiment Name: At_10percent_PEG_P Parameter: Timepoint (day) Value: 20
  misc_feature: MA Experiment 20000527 PARAMETER Experiment Name: At_10percent_PEG_P Parameter: Tissue Value: Whole Plant
  misc_feature: MA Experiment 20000527 PARAMETER Experiment Name: At_10percent_PEG_P Parameter: Treatment Value: 10percent PEG vs. No Treatment
aaatcatcacaaacttgttctcttccaaaagaccaaaaattagaaaccatggcattgcaaaagttccctctcctggggcttctttttctcataaccattgtcgtctcttcgacaatagccgtcgatgatcctgtgtgcccaacgacgtccaaactaagccgagcaagtttccctaatgggtttgtgtttggcacagctactgctgcgtttcaggttgaaggtgcaattaatgaaacttgtcgtggacctgctctatgggatatcttctgtaagagaaatccagagagatgtagtggccacaacgccgatgtggccgttgatttcttccatcgttataaggaagatattcaactaatgaagaatctaaacacagacgcattcagactctcaatcgcatggtcaagaatatttcctcatgggagaaaggagaagggagtgagtcaagctggtgtgaaattctaccacgacctgatcgatgagctccttaaaaatggtataattccgtttgtgactgttttccattgggacactccacaagatttagaagacgaatatggcggtttcttaagcgagaacattgtgaaagatttccgagaatatgcagattatgttttcactgaatacggtggaaaagtgaaaaactggatcactttcaacgagccatgggtcttcgctcatgcaggttacgacgtaggcaagaaggcgccaggacgttgttctcgctaccttaaaggttgtgaagaccgagatggacgatcaggttatgaggcttatctagttagtcacaacctcctcaacgctcatgcagaagctgttgaagttttccgccaaaaggttaaaggtgggaaaattggaatcgcacatagtccggcttggttcgaaccacatgatcttaaagattcaaatgacgttccaactgttagccgtgtacttgactttatgttgggatggcatctagacccaactacttttggagattatccacaaatcatgaaagaccttcttggtcacagattgcccaaattcacttcttcacaaaaagcaaaattgaaagattcgaccgatttcgtagggcttaactactatacttcaacattttcaaaccataatgaaaagccagatccgtctacaccaagttggaagcaagattctcttgttgcttgggaacctaagaatgtagatcacagcgccattggtagccagcctcttaccgctgcattgcccgtctacgctaaaggttttagaagtcttttaaagtacatcaaagataaatacgcaaacccggaaattatgatcatggaaaatggatatggagataaacttaaggacaaagattcggttgaggttggtactgctgattataacaggaaatactatcttcagaggcatcttctagctatgaacgaagctatttgcattgacaaagtgagagttacgggatactttgtatggtcattattagataactttgaatggcaagatggttataataacagattcggactctattacgtcgatttcaaaaataacctcacacgttatgagaaagaatcagccaagtactacaaagatttcctcggtcaaggtgttcgtccatccgcgctcaagaaggatgagctttaagttatattttgaggatttggttttctgttcaatgcttctttcctatgttttagtttgtgattgatcatgattcatgaagtcttggttaataataataaaagtgttttgtattccttcagtttctagcttatttgacatgatcaagaatgctttagtataaatatattatccttatatgaaggtatctttaccttcaaaacatgaagaaatattgtattatatatattaaaaaaagtcttaaattt

SEQ ID NO: 43997 - protein, 540 aa, Arabidopsis thaliana
  peptide (1)..(540): Ceres Seq. ID no. 12488518
  misc_feature (21)..(537): Homolog of NCBI NO: 16604493 NR Description: AT3g21370/MHC9_5 [Arabidopsis thaliana]
  misc_feature (21)..(537): Homolog of NCBI NO: 22331243 NR Description: glycosyl hydrolase family 1
  misc_feature (106)..(540): Homolog of NCBI NO: 1732572 NR Description: beta-glucosidase [Brassica nigra]
  misc_feature (17)..(540): Homolog of NCBI NO: 15241841 NR Description: glycosyl hydrolase family 1; protein id:
  misc_feature (17)..(540): Homolog of NCBI NO: 1732570 NR Description: beta-glucosidase [Arabidopsis thaliana]
  misc_feature (17)..(540): Homolog of NCBI NO: 1363489 NR Description: thioglucosidase (EC 3.2.1.147) 3D precursor -
  misc_feature (17)..(540): Homolog of NCBI NO: 15232626 NR Description: glycosyl hydrolase family 1
  misc_feature (17)..(540): Homolog of NCBI NO: 2286069 NR Description: beta-glucosidase [Arabidopsis thaliana]
  misc_feature (17)..(540): Homolog of NCBI NO: 15219605 NR Description: glycosyl hydrolase family 1, beta-glucosidase
  misc_feature (17)..(540): Homolog of NCBI NO: 15219623 NR Description: glycosyl hydrolase family 1
KSSQTCSLPKDQKLETMALQKFPLLGLLFLITIVVSSTIAVDDPVCPTTSKLSRASFPNGFVFGTATAAFQVEGAINETCRGPALWDIFCKRNPERCSGHNADVAVDFFHRYKEDIQLMKNLNTDAFRLSIAWSRIFPHGRKEKGVSQAGVKFYHDLIDELLKNGIIPFVTVFHWDTPQDLEDEYGGFLSENIVKDFREYADYVFTEYGGKVKNWITFNEPWVFAHAGYDVGKKAPGRCSRYLKGCEDRDGRSGYEAYLVSHNLLNAHAEAVEVFRQKVKGGKIGIAHSPAWFEPHDLKDSNDVPTVSRVLDFMLGWHLDPTTFGDYPQIMKDLLGHRLPKFTSSQKAKLKDSTDFVGLNYYTSTFSNHNEKPDPSTPSWKQDSLVAWEPKNVDHSAIGSQPLTAALPVYAKGFRSLLKYIKDKYANPEIMIMENGYGDKLKDKDSVEVGTADYNRKYYLQRHLLAMNEAICIDKVRVTGYFVWSLLDNFEWQDGYNNRFGLYYVDFKNNLTRYEKESAKYYKDFLGQGVRPSALKKDEL

SEQ ID NO: 43998 - protein, 524 aa, Arabidopsis thaliana
  peptide (1)..(524): Ceres Seq. ID no. 12488519
  misc_feature (5)..(521): Homolog of NCBI NO: 16604493 NR Description: AT3g21370/MHC9_5 [Arabidopsis thaliana]
  misc_feature (5)..(521): Homolog of NCBI NO: 22331243 NR Description: glycosyl hydrolase family 1
  misc_feature (90)..(524): Homolog of NCBI NO: 1732572 NR Description: beta-glucosidase [Brassica nigra]
  misc_feature (1)..(524): Homolog of NCBI NO: 15241841 NR Description: glycosyl hydrolase family 1; protein id:
  misc_feature (1)..(524): Homolog of NCBI NO: 1732570 NR Description: beta-glucosidase [Arabidopsis thaliana]
  misc_feature (1)..(524): Homolog of NCBI NO: 1363489 NR Description: thioglucosidase (EC 3.2.1.147) 3D precursor -
  misc_feature (1)..(524): Homolog of NCBI NO: 15232626 NR Description: glycosyl hydrolase family 1
  misc_feature (1)..(524): Homolog of NCBI NO: 2286069 NR Description: beta-glucosidase [Arabidopsis thaliana]
  misc_feature (1)..(524): Homolog of NCBI NO: 15219605 NR Description: glycosyl hydrolase family 1, beta-glucosidase
  misc_feature (1)..(524): Homolog of NCBI NO: 15219623 NR Description: glycosyl hydrolase family 1
MALQKFPLLGLLFLITIVVSSTIAVDDPVCPTTSKLSRASFPNGFVFGTATAAFQVEGAINETCRGPALWDIFCKRNPERCSGHNADVAVDFFHRYKEDIQLMKNLNTDAFRLSIAWSRIFPHGRKEKGVSQAGVKFYHDLIDELLKNGIIPFVTVFHWDTPQDLEDEYGGFLSENIVKDFREYADYVFTEYGGKVKNWITFNEPWVFAHAGYDVGKKAPGRCSRYLKGCEDRDGRSGYEAYLVSHNLLNAHAEAVEVFRQKVKGGKIGIAHSPAWFEPHDLKDSNDVPTVSRVLDFMLGWHLDPTTFGDYPQIMKDLLGHRLPKFTSSQKAKLKDSTDFVGLNYYTSTFSNHNEKPDPSTPSWKQDSLVAWEPKNVDHSAIGSQPLTAALPVYAKGFRSLLKYIKDKYANPEIMIMENGYGDKLKDKDSVEVGTADYNRKYYLQRHLLAMNEAICIDKVRVTGYFVWSLLDNFEWQDGYNNRFGLYYVDFKNNLTRYEKESAKYYKDFLGQGVRPSALKKDEL

SEQ ID NO: 43999 - protein, 422 aa, Arabidopsis thaliana
  peptide (1)..(422): Ceres Seq. ID no. 12488520
  misc_feature (1)..(419): Homolog of NCBI NO: 16604493 NR Description: AT3g21370/MHC9_5 [Arabidopsis thaliana]
  misc_feature (1)..(419): Homolog of NCBI NO: 22331243 NR Description: glycosyl hydrolase family 1
  misc_feature (1)..(422): Homolog of NCBI NO: 1732572 NR Description: beta-glucosidase [Brassica nigra]
  misc_feature (1)..(422): Homolog of NCBI NO: 15241841 NR Description: glycosyl hydrolase family 1; protein id:
  misc_feature (1)..(422): Homolog of NCBI NO: 1732570 NR Description: beta-glucosidase [Arabidopsis thaliana]
  misc_feature (1)..(422): Homolog of NCBI NO: 1363489 NR Description: thioglucosidase (EC 3.2.1.147) 3D precursor -
  misc_feature (1)..(422): Homolog of NCBI NO: 15232626 NR Description: glycosyl hydrolase family 1
  misc_feature (1)..(422): Homolog of NCBI NO: 2286069 NR Description: beta-glucosidase [Arabidopsis thaliana]
  misc_feature (1)..(422): Homolog of NCBI NO: 15219605 NR Description: glycosyl hydrolase family 1, beta-glucosidase
  misc_feature (1)..(422): Homolog of NCBI NO: 15219623 NR Description: glycosyl hydrolase family 1
MKNLNTDAFRLSIAWSRIFPHGRKEKGVSQAGVKFYHDLIDELLKNGIIPFVTVFHWDTPQDLEDEYGGFLSENIVKDFREYADYVFTEYGGKVKNWITFNEPWVFAHAGYDVGKKAPGRCSRYLKGCEDRDGRSGYEAYLVSHNLLNAHAEAVEVFRQKVKGGKIGIAHSPAWFEPHDLKDSNDVPTVSRVLDFMLGWHLDPTTFGDYPQIMKDLLGHRLPKFTSSQKAKLKDSTDFVGLNYYTSTFSNHNEKPDPSTPSWKQDSLVAWEPKNVDHSAIGSQPLTAALPVYAKGFRSLLKYIKDKYANPEIMIMENGYGDKLKDKDSVEVGTADYNRKYYLQRHLLAMNEAICIDKVRVTGYFVWSLLDNFEWQDGYNNRFGLYYVDFKNNLTRYEKESAKYYKDFLGQGVRPSALKKDEL

SEQ ID NO: 44000 - DNA, 2019 bp, Arabidopsis thaliana
  misc_feature (1)..(2019): Ceres Seq. ID no. 12489150
  misc_feature: MA Experiment ID: 20000307 Result: Down-regulated in Transcription
  misc_feature: MA Experiment 20000307 PARAMETER Experiment Name: At_Germinating_Seeds_Sub_P Parameter: Age (hr) Value: 24 vs. 0
  misc_feature: MA Experiment 20000307 PARAMETER Experiment Name: At_Germinating_Seeds_Sub_P Parameter: Organism Value: A. thaliana
  misc_feature: MA Experiment 20000307 PARAMETER Experiment Name: At_Germinating_Seeds_Sub_P Parameter: Plant Line Value: WS
  misc_feature: MA Experiment 20000307 PARAMETER Experiment Name: At_Germinating_Seeds_Sub_P Parameter: Tissue Value: Germinating Seeds
  misc_feature: MA Experiment ID: 20000314 Result: Up-regulated in Transcription
  misc_feature: MA Experiment 20000314 PARAMETER Experiment Name: At_14day_Shoots-Roots_Sub_P Parameter: Age (day) Value: 14
  misc_feature: MA Experiment 20000314 PARAMETER Experiment Name: At_14day_Shoots-Roots_Sub_P Parameter: Organism Value: A. thaliana
  misc_feature: MA Experiment 20000314 PARAMETER Experiment Name: At_14day_Shoots-Roots_Sub_P Parameter: Plant Line Value: WS
  misc_feature: MA Experiment 20000314 PARAMETER Experiment Name: At_14day_Shoots-Roots_Sub_P Parameter: Tissue Value: Roots vs. Whole Plant
  misc_feature: MA Experiment ID: 20000315 Result: Down-regulated in Transcription
  misc_feature: MA Experiment 20000315 PARAMETER Experiment Name: At_14day_Shoots-Roots_Sub_P Parameter: Age (day) Value: 14
  misc_feature: MA Experiment 20000315 PARAMETER Experiment Name: At_14day_Shoots-Roots_Sub_P Parameter: Organism Value: A. thaliana
  misc_feature: MA Experiment 20000315 PARAMETER Experiment Name: At_14day_Shoots-Roots_Sub_P Parameter: Plant Line Value: WS
  misc_feature: MA Experiment 20000315 PARAMETER Experiment Name: At_14day_Shoots-Roots_Sub_P Parameter: Tissue Value: Shoots vs. Whole Plant
aaagggttttgcttcgaattcaagtgtctcccttcactttctctctctctattgctgctctgtttctgctgtcaattccctaagaaagtcctgatttttagggtgatcgagagaagttgaagaatcatgtttattgagtttccttttttgatccatagggtcatctaattttgctaattttattgtcatctccttcaggtaagggattgttgttgccaatggggtggctaactaaaatccttaaaggttctagccataagttttctgatggacaatgtaatggaagatatagagaagatagaaacttggaaggtcctcgttattctgcggaaggatctgattttgacaaagaggagattgaatgtgctattgcactttctctttctgaacaagaacatgtaattccacaagatgacaaaggaaagaaaataatcgagtacaaatctgaaaccgaagaagatgacgatgacgatgaggatgaggatgaagaatacatgagagctcagctagaagcagcagaggaagaggaaagacgggtagctcaagctcaaatcgaggaagaagagaaaaggagagctgaagctcaactagaagaaacagagaaactgcttgcaaaagctcgattagaagaggaagaaatgaggcgttctaaagcccaactggaggaagatgagctactcgccaaggcccttcaagaaagtatgaatgtgggatctcctcctcgatatgatccaggaaatatacttcaaccatatcccttcctcattccttctagtcacaggatatgtgtcggttgccaagctgagataggacatggaaggtttctgagtgcatgggtggcgtttggcatcctgaatgtttctgttgcaatgcatgtgataagcccatcatagattatgagttctcaatgtcaggaaatcggccttatcacaaattatgttacaaggagcagcatcatcctaaatgtgatgtttgccataactttattccgacaaatccagctggtcttattgagtatagggcacatcccttttggatgcaaaagtattgtccttcacatgagcgtgatggaactcctcgttgttgcagttgtgagcgaatggagccaaaagatacaaaatatctcattcttgatgatggtcgaaaactgtgtcttgaatgtctcgactcagccattatggacactcatgaatgccaaccattgtaccttgagatacgtgaattttacgaaggcttacatatgaaagtggaacagtcaaattcctatgcttttggtggagagatcagctctaaacgagctatggaaggagagaaacacggacatcatcatttacctgaaactagaggactttgtttgtctgaagaacaaactgtcaccacggtgttaaggagaccaagaattggggcaggctacaagttaatagacatgatcacagagccttgcaggctgatacgtcgttgtgaagtcactgcgattctcattttatatggacttcctcgtttgttaaccgggtcaatccttgctcatgagatgatgcatgcatggcttcgactaaatgggtatccaaatcttagaccagaagtggaagaaggaatatgtcaagttttagcacacatgtggttggaatctgagacttatgctggctctacattagtagacatcgcatcttcttcatcatctgctgtggtgtcagcatcgtccaagaaaggtgagaggtctgattttgagaagaaacttggtgagtttttcaagcatcaaatcgagtcggattcttcatcggcatatggggatgggttcaggcaaggtaaccaagcagttcttaagcatggtctgaggcgaaccctcgaccatattcgcttgaccggtacatttcctaaatggatttaaactataaaaagagagaaaacaagctttgttatagttttttagagtatagacttgagaagaaaagaaaaagaaaaatgtataggttacaacaatacacacatttaagtgtcataaagtttccactttttaag

SEQ ID NO: 44001 - protein, 351 aa, Arabidopsis thaliana
  peptide (1)..(351): Ceres Seq. ID no. 12489151
  misc_feature (1)..(42): Pfam Name: LIM domain Pfam Description: LIM domain
  misc_feature (1)..(341): Homolog of NCBI NO: 27808630 NR Description: At5g66630 [Arabidopsis thaliana]
  misc_feature (1)..(341): Homolog of NCBI NO: 30698240 NR Description: expressed protein [Arabidopsis thaliana]
  misc_feature (2)..(350): Homolog of NCBI NO: 22326876 NR Description: disease resistance protein (TIR-NBS-LRR class),
  misc_feature (1)..(341): Homolog of NCBI NO: 15240018 NR Description: putative protein; protein id: At5g66620.1
  misc_feature (1)..(348): Homolog of NCBI NO: 29893641 NR Description: hypothetical protein [Oryza sativa (japonica
  misc_feature (1)..(348): Homolog of NCBI NO: 15221983 NR Description: unknown protein; protein id: At1g19270.1
  misc_feature (1)..(349): Homolog of NCBI NO: 25518496 NR Description: hypothetical protein T29M8.14 - Arabidopsis
  misc_feature (1)..(351): Homolog of NCBI NO: 22329212 NR Description: putative protein
  misc_feature (52)..(351): Homolog of NCBI NO: 25407769 NR Description: hypothetical protein AT4g36860 [imported] -
  misc_feature (1)..(348): Homolog of NCBI NO: 17065046 NR Description: Unknown protein [Arabidopsis thaliana]
MGGVWHPECFCCNACDKPIIDYEFSMSGNRPYHKLCYKEQHHPKCDVCHNFIPTNPAGLIEYRAHPFWMQKYCPSHERDGTPRCCSCERMEPKDTKYLILDDGRKLCLECLDSAIMDTHECQPLYLEIREFYEGLHMKVEQSNSYAFGGEISSKRAMEGEKHGHHHLPETRGLCLSEEQTVTTVLRRPRIGAGYKLIDMITEPCRLIRRCEVTAILILYGLPRLLTGSILAHEMMHAWLRLNGYPNLRPEVEEGICQVLAHMWLESETYAGSTLVDIASSSSSAVVSASSKKGERSDFEKKLGEFFKHQIESDSSSAYGDGFRQGNQAVLKHGLRRTLDHIRLTGTFPKWI

SEQ ID NO: 44002 - protein, 326 aa, Arabidopsis thaliana
  peptide (1)..(326): Ceres Seq. ID no. 12489152
  misc_feature (1)..(316): Homolog of NCBI NO: 27808630 NR Description: At5g66630 [Arabidopsis thaliana]
  misc_feature (1)..(316): Homolog of NCBI NO: 30698240 NR Description: expressed protein [Arabidopsis thaliana]
  misc_feature (1)..(325): Homolog of NCBI NO: 22326876 NR Description: disease resistance protein (TIR-NBS-LRR class),
  misc_feature (1)..(316): Homolog of NCBI NO: 15240018 NR Description: putative protein; protein id: At5g66620.1
  misc_feature (1)..(323): Homolog of NCBI NO: 29893641 NR Description: hypothetical protein [Oryza sativa (japonica
  misc_feature (1)..(323): Homolog of NCBI NO: 15221983 NR Description: unknown protein; protein id: At1g19270.1
  misc_feature (1)..(324): Homolog of NCBI NO: 25518496 NR Description: hypothetical protein T29M8.14 - Arabidopsis
  misc_feature (1)..(326): Homolog of NCBI NO: 22329212 NR Description: putative protein
  misc_feature (27)..(326): Homolog of NCBI NO: 25407769 NR Description: hypothetical protein AT4g36860 [imported] -
  misc_feature (1)..(323): Homolog of NCBI NO: 17065046 NR Description: Unknown protein [Arabidopsis thaliana]
MSGNRPYHKLCYKEQHHPKCDVCHNFIPTNPAGLIEYRAHPFWMQKYCPSHERDGTPRCCSCERMEPKDTKYLILDDGRKLCLECLDSAIMDTHECQPLYLEIREFYEGLHMKVEQSNSYAFGGEISSKRAMEGEKHGHHHLPETRGLCLSEEQTVTTVLRRPRIGAGYKLIDMITEPCRLIRRCEVTAILILYGLPRLLTGSILAHEMMHAWLRLNGYPNLRPEVEEGICQVLAHMWLESETYAGSTLVDIASSSSSAVVSASSKKGERSDFEKKLGEFFKHQIESDSSSAYGDGFRQGNQAVLKHGLRRTLDHIRLTGTFPKWI

SEQ ID NO: 44003 - protein, 283 aa, Arabidopsis thaliana
  peptide (1)..(283): Ceres Seq. ID no. 12489153
  misc_feature (1)..(273): Homolog of NCBI NO: 27808630 NR Description: At5g66630 [Arabidopsis thaliana]
  misc_feature (1)..(273): Homolog of NCBI NO: 30698240 NR Description: expressed protein [Arabidopsis thaliana]
  misc_feature (1)..(282): Homolog of NCBI NO: 22326876 NR Description: disease resistance protein (TIR-NBS-LRR class),
  misc_feature (1)..(273): Homolog of NCBI NO: 15240018 NR Description: putative protein; protein id: At5g66620.1
  misc_feature (1)..(280): Homolog of NCBI NO: 29893641 NR Description: hypothetical protein [Oryza sativa (japonica
  misc_feature (1)..(280): Homolog of NCBI NO: 15221983 NR Description: unknown protein; protein id: At1g19270.1
  misc_feature (1)..(281): Homolog of NCBI NO: 25518496 NR Description: hypothetical protein T29M8.14 - Arabidopsis
  misc_feature (1)..(283): Homolog of NCBI NO: 22329212 NR Description: putative protein
  misc_feature (1)..(283): Homolog of NCBI NO: 25407769 NR Description: hypothetical protein AT4g36860 [imported] -
  misc_feature (1)..(280): Homolog of NCBI NO: 17065046 NR Description: Unknown protein [Arabidopsis thaliana]
MQKYCPSHERDGTPRCCSCERMEPKDTKYLILDDGRKLCLECLDSAIMDTHECQPLYLEIREFYEGLHMKVEQSNSYAFGGEISSKRAMEGEKHGHHHLPETRGLCLSEEQTVTTVLRRPRIGAGYKLIDMITEPCRLIRRCEVTAILILYGLPRLLTGSILAHEMMHAWLRLNGYPNLRPEVEEGICQVLAHMWLESETYAGSTLVDIASSSSSAVVSASSKKGERSDFEKKLGEFFKHQIESDSSSAYGDGFRQGNQAVLKHGLRRTLDHIRLTGTFPKWI

SEQ ID NO: 44004 - DNA, 995 bp, Arabidopsis thaliana
  misc_feature (1)..(995): Ceres Seq. ID no. 12462179
  misc_feature: MA Experiment ID: 20000166 Result: Up-regulated in Transcription
  misc_feature: MA Experiment 20000166 PARAMETER Experiment Name: At_100uM_ABA_P Parameter: Age (day) Value: 14
  misc_feature: MA Experiment 20000166 PARAMETER Experiment Name: At_100uM_ABA_P Parameter: Organism Value: A. thaliana
  misc_feature: MA Experiment 20000166 PARAMETER Experiment Name: At_100uM_ABA_P Parameter: Plant Line Value: WS
  misc_feature: MA Experiment 20000166 PARAMETER Experiment Name: At_100uM_ABA_P Parameter: Timepoint (hr) Value: 1
  misc_feature: MA Experiment 20000166 PARAMETER Experiment Name: At_100uM_ABA_P Parameter: Tissue Value: Aerial
  misc_feature: MA Experiment 20000166 PARAMETER Experiment Name: At_100uM_ABA_P Parameter: Treatment Value: 100uM ABA vs. No Treatment
  misc_feature: MA Experiment ID: 20000169 Result: Up-regulated in Transcription
  misc_feature: MA Experiment 20000169 PARAMETER Experiment Name: At_100uM_ABA_P Parameter: Age (day) Value: 14
  misc_feature: MA Experiment 20000169 PARAMETER Experiment Name: At_100uM_ABA_P Parameter: Organism Value: A. thaliana
  misc_feature: MA Experiment 20000169 PARAMETER Experiment Name: At_100uM_ABA_P Parameter: Plant Line Value: WS
  misc_feature: MA Experiment 20000169 PARAMETER Experiment Name: At_100uM_ABA_P Parameter: Timepoint (hr) Value: 6
  misc_feature: MA Experiment 20000169 PARAMETER Experiment Name: At_100uM_ABA_P Parameter: Tissue Value: Aerial
  misc_feature: MA Experiment 20000169 PARAMETER Experiment Name: At_100uM_ABA_P Parameter: Treatment Value: 100uM ABA vs. No Treatment
  misc_feature: MA Experiment ID: 20000182 Result: Up-regulated in Transcription
  misc_feature: MA Experiment 20000182 PARAMETER Experiment Name: At_2mM_SA_P Parameter: Age (day) Value: 14
  misc_feature: MA Experiment 20000182 PARAMETER Experiment Name: At_2mM_SA_P Parameter: Organism Value: A. thaliana
  misc_feature: MA Experiment 20000182 PARAMETER Experiment Name: At_2mM_SA_P Parameter: Plant Line Value: WS
  misc_feature: MA Experiment 20000182 PARAMETER Experiment Name: At_2mM_SA_P Parameter: Timepoint (hr) Value: 6
  misc_feature: MA Experiment 20000182 PARAMETER Experiment Name: At_2mM_SA_P Parameter: Tissue Value: Aerial
  misc_feature: MA Experiment 20000182 PARAMETER Experiment Name: At_2mM_SA_P Parameter: Treatment Value: 2mM SA vs. No Treatment
  misc_feature: MA Experiment ID: 20000184 Result: Down-regulated in Transcription
  misc_feature: MA Experiment 20000184 PARAMETER Experiment Name: At_Shoots__P Parameter: Age (day) Value: 7
  misc_feature: MA Experiment 20000184 PARAMETER Experiment Name: At_Shoots__P Parameter: Tissue Value: Shoots vs. Whole Plant
  misc_feature: MA Experiment ID: 20000185 Result: Down-regulated in Transcription
  misc_feature: MA Experiment 20000185 PARAMETER Experiment Name: At_Roots__P Parameter: Age (day) Value: 7 vs. 21
  misc_feature: MA Experiment 20000185 PARAMETER Experiment Name: At_Roots__P Parameter: Organism Value: A. thaliana
  misc_feature: MA Experiment 20000185 PARAMETER Experiment Name: At_Roots__P Parameter: Tissue Value: Roots vs. Whole Plant
  misc_feature: MA Experiment ID: 20000211 Result: Up-regulated in Transcription
  misc_feature: MA Experiment 20000211 PARAMETER Experiment Name: At_0.001percent_MeJA__P Parameter: Age (day) Value: 14
  misc_feature: MA Experiment 20000211 PARAMETER Experiment Name: At_0.001percent_MeJA__P Parameter: Organism Value: A. thaliana
  misc_feature: MA Experiment 20000211 PARAMETER Experiment Name: At_0.001percent_MeJA__P Parameter: Plant Line Value: WS
  misc_feature: MA Experiment 20000211 PARAMETER Experiment Name: At_0.001percent_MeJA__P Parameter: Timepoint (hr) Value: 1
  misc_feature: MA Experiment 20000211 PARAMETER Experiment Name: At_0.001percent_MeJA__P Parameter: Tissue Value: Aerial
  misc_feature: MA Experiment 20000211 PARAMETER Experiment Name: At_0.001percent_MeJA__P Parameter: Treatment Value: 0.001percent MeJA vs. No Treatment
  misc_feature: MA Experiment ID: 20000264 Result: Up-regulated in Transcription
  misc_feature: MA Experiment 20000264 PARAMETER Experiment Name: At_Open_Flower_P Parameter: Age (day) Value: 21
  misc_feature: MA Experiment 20000264 PARAMETER Experiment Name: At_Open_Flower_P Parameter: Plant Line Value: WS
  misc_feature: MA Experiment 20000264 PARAMETER Experiment Name: At_Open_Flower_P Parameter: Tissue Value: Open Flower vs. Whole Plant
  misc_feature: MA Experiment ID: 20000265 Result: Up-regulated in Transcription
  misc_feature: MA Experiment 20000265 PARAMETER Experiment Name: At_Open_Flower_P Parameter: Age (day) Value: 21
  misc_feature: MA Experiment 20000265 PARAMETER Experiment Name: At_Open_Flower_P Parameter: Plant Line Value: WS
  misc_feature: MA Experiment 20000265 PARAMETER Experiment Name: At_Open_Flower_P Parameter: Tissue Value: Closed Flower vs. Whole Plant
  misc_feature: MA Experiment ID: 20000268 Result: Up-regulated in Transcription
  misc_feature: MA Experiment 20000268 PARAMETER Experiment Name: At_100mM_NaCl__P Parameter: Age (day) Value: 14
  misc_feature: MA Experiment 20000268 PARAMETER Experiment Name: At_100mM_NaCl__P Parameter: Organism Value: A. thaliana
  misc_feature: MA Experiment 20000268 PARAMETER Experiment Name: At_100mM_NaCl__P Parameter: Plant Line Value: WS
  misc_feature: MA Experiment 20000268 PARAMETER Experiment Name: At_100mM_NaCl__P Parameter: Timepoint (hr) Value: 6
  misc_feature: MA Experiment 20000268 PARAMETER Experiment Name: At_100mM_NaCl__P Parameter: Tissue Value: Whole Plant
  misc_feature: MA Experiment 20000268 PARAMETER Experiment Name: At_100mM_NaCl__P Parameter: Treatment Value: 100mM NaCl vs. No Treatment
  misc_feature: MA Experiment ID: 20000308 Result: Up-regulated in Transcription
  misc_feature: MA Experiment 20000308 PARAMETER Experiment Name: At_100mM_NaCl__P Parameter: Age (day) Value: 17
  misc_feature: MA Experiment 20000308 PARAMETER Experiment Name: At_100mM_NaCl__P Parameter: Organism Value: A. thaliana
  misc_feature: MA Experiment 20000308 PARAMETER Experiment Name: At_100mM_NaCl__P Parameter: Plant Line Value: WS
  misc_feature: MA Experiment 20000308 PARAMETER Experiment Name: At_100mM_NaCl__P Parameter: Timepoint (hr) Value: 72
  misc_feature: MA Experiment 20000308 PARAMETER Experiment Name: At_100mM_NaCl__P Parameter: Tissue Value: Whole Plant
  misc_feature: MA Experiment 20000308 PARAMETER Experiment Name: At_100mM_NaCl__P Parameter: Treatment Value: 100mM NaCl vs. No Treatment
  misc_feature: MA Experiment ID: 20000436 Result: Up-regulated in Transcription
  misc_feature: MA Experiment 20000436 PARAMETER Experiment Name: At_Drought_P Parameter: Age (day) Value: 7
  misc_feature: MA Experiment 20000436 PARAMETER Experiment Name: At_Drought_P Parameter: Organism Value: A. thaliana
  misc_feature: MA Experiment 20000436 PARAMETER Experiment Name: At_Drought_P Parameter: Plant Line Value: WS
  misc_feature: MA Experiment 20000436 PARAMETER Experiment Name: At_Drought_P Parameter: Timepoint (hr) Value: 12
  misc_feature: MA Experiment 20000436 PARAMETER Experiment Name: At_Drought_P Parameter: Tissue Value: Whole Plant
  misc_feature: MA Experiment 20000436 PARAMETER Experiment Name: At_Drought_P Parameter: Treatment Value: Drought vs. No Drought
  misc_feature: MA Experiment ID: 20000437 Result: Up-regulated in Transcription
  misc_feature: MA Experiment 20000437 PARAMETER Experiment Name: At_Drought_P Parameter: Age (day) Value: 8
  misc_feature: MA Experiment 20000437 PARAMETER Experiment Name: At_Drought_P Parameter: Organism Value: A. thaliana
  misc_feature: MA Experiment 20000437 PARAMETER Experiment Name: At_Drought_P Parameter: Plant Line Value: WS
  misc_feature: MA Experiment 20000437 PARAMETER Experiment Name: At_Drought_P Parameter: Timepoint (hr) Value: 24
  misc_feature: MA Experiment 20000437 PARAMETER Experiment Name: At_Drought_P Parameter: Tissue Value: Whole Plant
  misc_feature: MA Experiment 20000437 PARAMETER Experiment Name: At_Drought_P Parameter: Treatment Value: Drought vs. No Drought
  misc_feature: MA Experiment ID: 20000438 Result: Down-regulated in Transcription
  misc_feature: MA Experiment 20000438 PARAMETER Experiment Name: At_Shoots__P Parameter: Age (day) Value: 14
  misc_feature: MA Experiment 20000438 PARAMETER Experiment Name: At_Shoots__P Parameter: Tissue Value: Shoots vs. Whole Plant
  misc_feature: MA Experiment ID: 20000445 Result: Up-regulated in Transcription
  misc_feature: MA Experiment 20000445 PARAMETER Experiment Name: At_100uM_NAA__P Parameter: Age (day) Value: 14
  misc_feature: MA Experiment 20000445 PARAMETER Experiment Name: At_100uM_NAA__P Parameter: Organism Value: A. thaliana
  misc_feature: MA Experiment 20000445 PARAMETER Experiment Name: At_100uM_NAA__P Parameter: Plant Line Value: WS
  misc_feature: MA Experiment 20000445 PARAMETER Experiment Name: At_100uM_NAA__P Parameter: Timepoint (hr) Value: 6
  misc_feature: MA Experiment 20000445 PARAMETER Experiment Name: At_100uM_NAA__P Parameter: Tissue Value: Aerial
  misc_feature: MA Experiment 20000445 PARAMETER Experiment Name: At_100uM_NAA__P Parameter: Treatment Value: 100uM NAA vs. No Treatment
  misc_feature: MA Experiment ID: 20000453 Result: Up-regulated in Transcription
  misc_feature: MA Experiment 20000453 PARAMETER Experiment Name: At_100uM_ABA_P Parameter: Age (day) Value: 15
  misc_feature: MA Experiment 20000453 PARAMETER Experiment Name: At_100uM_ABA_P Parameter: Organism Value: A. thaliana
  misc_feature: MA Experiment 20000453 PARAMETER Experiment Name: At_100uM_ABA_P Parameter: Plant Line Value: WS
  misc_feature: MA Experiment 20000453 PARAMETER Experiment Name: At_100uM_ABA_P Parameter: Timepoint (hr) Value: 24
  misc_feature: MA Experiment 20000453 PARAMETER Experiment Name: At_100uM_ABA_P Parameter: Tissue Value: Aerial
  misc_feature: MA Experiment 20000453 PARAMETER Experiment Name: At_100uM_ABA_P Parameter: Treatment Value: 100uM ABA vs. No Treatment
  misc_feature: MA Experiment ID: 20000455 Result: Up-regulated in Transcription
  misc_feature: MA Experiment 20000455 PARAMETER Experiment Name: At_100uM_ABA_P Parameter: Age (day) Value: 16
  misc_feature: MA Experiment 20000455 PARAMETER Experiment Name: At_100uM_ABA_P Parameter: Organism Value: A. thaliana
  misc_feature: MA Experiment 20000455 PARAMETER Experiment Name: At_100uM_ABA_P Parameter: Plant Line Value: WS
  misc_feature: MA Experiment 20000455 PARAMETER Experiment Name: At_100uM_ABA_P Parameter: Timepoint (hr) Value: 48
  misc_feature: MA Experiment 20000455 PARAMETER Experiment Name: At_100uM_ABA_P Parameter: Tissue Value: Aerial
  misc_feature: MA Experiment 20000455 PARAMETER Experiment Name: At_100uM_ABA_P Parameter: Treatment Value: 100uM ABA vs. No Treatment
  misc_feature: MA Experiment ID: 20000506 Result: Up-regulated in Transcription
  misc_feature: MA Experiment 20000506 PARAMETER Experiment Name: At_Wounding_P Parameter: Organism Value: A. thaliana
  misc_feature: MA Experiment 20000506 PARAMETER Experiment Name: At_Wounding_P Parameter: Plant Line Value: WS
  misc_feature: MA Experiment 20000506 PARAMETER Experiment Name: At_Wounding_P Parameter: Timepoint (hr) Value: 6
  misc_feature: MA Experiment 20000506 PARAMETER Experiment Name: At_Wounding_P Parameter: Tissue Value: Aerial
  misc_feature: MA Experiment 20000506 PARAMETER Experiment Name: At_Wounding_P Parameter: Treatment Value: Wounding vs. No Wounding
  misc_feature: MA Experiment ID: 20000575 Result: Up-regulated in Transcription
  misc_feature: MA Experiment 20000575 PARAMETER Experiment Name: At_100uM_ABA_Mutants__P Parameter: Organism Value: A. thaliana
  misc_feature: MA Experiment 20000575 PARAMETER Experiment Name: At_100uM_ABA_Mutants__P Parameter: Plant Line Value: CS22
  misc_feature: MA Experiment 20000575 PARAMETER Experiment Name: At_100uM_ABA_Mutants__P Parameter: Timepoint (hr) Value: 6
  misc_feature: MA Experiment 20000575 PARAMETER Experiment Name: At_100uM_ABA_Mutants__P Parameter: Tissue Value: Whole Plant
  misc_feature: MA Experiment 20000575 PARAMETER Experiment Name: At_100uM_ABA_Mutants__P Parameter: Treatment Value: 1uM ABA vs. No Treatment
  misc_feature: MA Experiment ID: 20000576 Result: Up-regulated in Transcription
  misc_feature: MA Experiment 20000576 PARAMETER Experiment Name: At_100uM_ABA_Mutants__P Parameter: Organism Value: A. thaliana
  misc_feature: MA Experiment 20000576 PARAMETER Experiment Name: At_100uM_ABA_Mutants__P Parameter: Plant Line Value: CS23
  misc_feature: MA Experiment 20000576 PARAMETER Experiment Name: At_100uM_ABA_Mutants__P Parameter: Timepoint (hr) Value: 6
  misc_feature: MA Experiment 20000576 PARAMETER Experiment Name: At_100uM_ABA_Mutants__P Parameter: Tissue Value: Whole Plant
  misc_feature: MA Experiment 20000576 PARAMETER Experiment Name: At_100uM_ABA_Mutants__P Parameter: Treatment Value: 1uM ABA vs. No Treatment
  misc_feature: MA Experiment ID: 20000709 Result: Down-regulated in Transcription
  misc_feature: MA Experiment 20000709 PARAMETER Experiment Name: At_15mM_NH4NO3_L-to-H_P Parameter: Age (hr) Value: 14
  misc_feature: MA Experiment 20000709 PARAMETER Experiment Name: At_15mM_NH4NO3_L-to-H_P Parameter: Organism Value: A. thaliana
  misc_feature: MA Experiment 20000709 PARAMETER Experiment Name: At_15mM_NH4NO3_L-to-H_P Parameter: Plant Line Value: WS
  misc_feature: MA Experiment 20000709 PARAMETER Experiment Name: At_15mM_NH4NO3_L-to-H_P Parameter: Timepoint (hr) Value: 4
  misc_feature: MA Experiment 20000709 PARAMETER Experiment Name: At_15mM_NH4NO3_L-to-H_P Parameter: Tissue Value: Aerial
  misc_feature: MA Experiment 20000709 PARAMETER Experiment Name: At_15mM_NH4NO3_L-to-H_P Parameter: Treatment Value: 15mM NH4NO3 vs. 30mM Mannitol
  misc_feature: MA Experiment ID: 20000794 Result: Up-regulated in Transcription
  misc_feature: MA Experiment 20000794 PARAMETER Experiment Name: At_Petals_P Parameter: Age (day) Value: 23-25 days
  misc_feature: MA Experiment 20000794 PARAMETER Experiment Name: At_Petals_P Parameter: Plant Line Value: WS
  misc_feature: MA Experiment 20000794 PARAMETER Experiment Name: At_Petals_P Parameter: Tissue Value: Petals vs. Whole plant
  misc_feature: MA Experiment ID: 20001248 Result: Down-regulated in Transcription
  misc_feature: MA Experiment 20001248 PARAMETER Experiment Name: At_Far-red-induction_P Parameter: Age (day) Value: 7
  misc_feature: MA Experiment 20001248 PARAMETER Experiment Name: At_Far-red-induction_P Parameter: Light Value: Far-red vs. White
  misc_feature: MA Experiment 20001248 PARAMETER Experiment Name: At_Far-red-induction_P Parameter: Organism Value: A. thaliana
  misc_feature: MA Experiment 20001248 PARAMETER Experiment Name: At_Far-red-induction_P Parameter: Plant Line Value: Columbia
  misc_feature: MA Experiment 20001248 PARAMETER Experiment Name: At_Far-red-induction_P Parameter: Timepoint (hr) Value: 4
  misc_feature: MA Experiment 20001248 PARAMETER Experiment Name: At_Far-red-induction_P Parameter: Tissue Value: Whole Plant
  misc_feature: MA Experiment ID: 20001451 Result: Up-regulated in Transcription
  misc_feature: MA Experiment 20001451 PARAMETER Experiment Name: At_Far-red-induction_P Parameter: Age (day) Value: 7
  misc_feature: MA Experiment 20001451 PARAMETER Experiment Name: At_Far-red-induction_P Parameter: Light Value: Far-red vs. White
  misc_feature: MA Experiment 20001451 PARAMETER Experiment Name: At_Far-red-induction_P Parameter: Organism Value: A. thaliana
  misc_feature: MA Experiment 20001451 PARAMETER Experiment Name: At_Far-red-induction_P Parameter: Plant Line Value: Columbia
  misc_feature: MA Experiment 20001451 PARAMETER Experiment Name: At_Far-red-induction_P Parameter: Timepoint (hr) Value: 24
  misc_feature: MA Experiment 20001451 PARAMETER Experiment Name: At_Far-red-induction_P Parameter: Tissue Value: Whole Plant
  misc_feature: MA Experiment ID: 20001504 Result: Up-regulated in Transcription
  misc_feature: MA Experiment 20001504 PARAMETER Experiment Name: At_Far-red-enriched_P Parameter: Age (day) Value: 10
  misc_feature: MA Experiment 20001504 PARAMETER Experiment Name: At_Far-red-enriched_P Parameter: Light Value: Far-red enriched vs. White
  misc_feature: MA Experiment 20001504 PARAMETER Experiment Name: At_Far-red-enriched_P Parameter: Organism Value: A. thaliana
  misc_feature: MA Experiment 20001504 PARAMETER Experiment Name: At_Far-red-enriched_P Parameter: Plant Line Value: Columbia
  misc_feature: MA Experiment 20001504 PARAMETER Experiment Name: At_Far-red-enriched_P Parameter: Timepoint (day) Value: 6
  misc_feature: MA Experiment 20001504 PARAMETER Experiment Name: At_Far-red-enriched_P Parameter: Tissue Value: Whole Plant
  misc_feature: MA Experiment ID: 20001553 Result: Up-regulated in Transcription
  misc_feature: MA Experiment 20001553 PARAMETER Experiment Name: At_Drought_Soil_Dry_P Parameter: Age (day) Value: 19
  misc_feature: MA Experiment 20001553 PARAMETER Experiment Name: At_Drought_Soil_Dry_P Parameter: Organism Value: A. thaliana
  misc_feature: MA Experiment 20001553 PARAMETER Experiment Name: At_Drought_Soil_Dry_P Parameter: Plant Line Value: WS
  misc_feature: MA Experiment 20001553 PARAMETER Experiment Name: At_Drought_Soil_Dry_P Parameter: Post Timepoint (hr) Value: None
  misc_feature: MA Experiment 20001553 PARAMETER Experiment Name: At_Drought_Soil_Dry_P Parameter: Post-Treatment Value: None
  misc_feature: MA Experiment 20001553 PARAMETER Experiment Name: At_Drought_Soil_Dry_P Parameter: Timepoint (day) Value: 5
  misc_feature: MA Experiment 20001553 PARAMETER Experiment Name: At_Drought_Soil_Dry_P Parameter: Treatment Value: Drought vs. No Drought
  misc_feature: MA Experiment ID: 20001554 Result: Up-regulated in Transcription
  misc_feature: MA Experiment 20001554 PARAMETER Experiment Name: At_Drought_Soil_Dry_P Parameter: Age (day) Value: 21
  misc_feature: MA Experiment 20001554 PARAMETER Experiment Name: At_Drought_Soil_Dry_P Parameter: Organism Value: A. thaliana
  misc_feature: MA Experiment 20001554 PARAMETER Experiment Name: At_Drought_Soil_Dry_P Parameter: Plant Line Value: WS
  misc_feature: MA Experiment 20001554 PARAMETER Experiment Name: At_Drought_Soil_Dry_P Parameter: Post Timepoint (hr) Value: None
  misc_feature: MA Experiment 20001554 PARAMETER Experiment Name: At_Drought_Soil_Dry_P Parameter: Post-Treatment Value: None
  misc_feature: MA Experiment 20001554 PARAMETER Experiment Name: At_Drought_Soil_Dry_P Parameter: Timepoint (day) Value: 7
  misc_feature: MA Experiment 20001554 PARAMETER Experiment Name: At_Drought_Soil_Dry_P Parameter: Treatment Value: Drought vs. No Drought
  misc_feature: MA Experiment ID: 20001555 Result: Up-regulated in Transcription
  misc_feature: MA Experiment 20001555 PARAMETER Experiment Name: At_Drought_Soil_Dry_P Parameter: Age (day) Value: 24
  misc_feature: MA Experiment 20001555 PARAMETER Experiment Name: At_Drought_Soil_Dry_P Parameter: Organism Value: A. thaliana
  misc_feature: MA Experiment 20001555 PARAMETER Experiment Name: At_Drought_Soil_Dry_P Parameter: Plant Line Value: WS
  misc_feature: MA Experiment 20001555 PARAMETER Experiment Name: At_Drought_Soil_Dry_P Parameter: Post Timepoint (hr) Value: None
  misc_feature: MA Experiment 20001555 PARAMETER Experiment Name: At_Drought_Soil_Dry_P Parameter: Post-Treatment Value: None
  misc_feature: MA Experiment 20001555 PARAMETER Experiment Name: At_Drought_Soil_Dry_P Parameter: Timepoint (day) Value: 10
  misc_feature: MA Experiment 20001555 PARAMETER Experiment Name: At_Drought_Soil_Dry_P Parameter: Treatment Value: Drought vs. No Drought
  misc_feature: MA Experiment ID: 20001556 Result: Up-regulated in Transcription
  misc_feature: MA Experiment 20001556 PARAMETER Experiment Name: At_Drought_Soil_Dry_P Parameter: Age (day) Value: 26
  misc_feature: MA Experiment 20001556 PARAMETER Experiment Name: At_Drought_Soil_Dry_P Parameter: Organism Value: A. thaliana
  misc_feature: MA Experiment 20001556 PARAMETER Experiment Name: At_Drought_Soil_Dry_P Parameter: Plant Line Value: WS
  misc_feature: MA Experiment 20001556 PARAMETER Experiment Name: At_Drought_Soil_Dry_P Parameter: Post Timepoint (hr) Value: None
  misc_feature: MA Experiment 20001556 PARAMETER Experiment Name: At_Drought_Soil_Dry_P Parameter: Post-Treatment Value: None
  misc_feature: MA Experiment 20001556 PARAMETER Experiment Name: At_Drought_Soil_Dry_P Parameter: Timepoint (day) Value: 12
  misc_feature: MA Experiment 20001556 PARAMETER Experiment Name: At_Drought_Soil_Dry_P Parameter: Treatment Value: Drought vs. No Drought
  misc_feature: MA Experiment ID: 20001559 Result: Up-regulated in Transcription
  misc_feature: MA Experiment 20001559 PARAMETER Experiment Name: At_Drought_Soil_Dry_P Parameter: Age (day) Value: 28
  misc_feature: MA Experiment 20001559 PARAMETER Experiment Name: At_Drought_Soil_Dry_P Parameter: Organism Value: A. thaliana
  misc_feature: MA Experiment 20001559 PARAMETER Experiment Name: At_Drought_Soil_Dry_P Parameter: Plant Line Value: WS
  misc_feature: MA Experiment 20001559 PARAMETER Experiment Name: At_Drought_Soil_Dry_P Parameter: Post Timepoint (hr) Value: 29
  misc_feature: MA Experiment 20001559 PARAMETER Experiment Name: At_Drought_Soil_Dry_P Parameter: Post-Treatment Value: Re-Water vs. No Drought
  misc_feature: MA Experiment 20001559 PARAMETER Experiment Name: At_Drought_Soil_Dry_P Parameter: Timepoint (day) Value: 14
  misc_feature: MA Experiment 20001559 PARAMETER Experiment Name: At_Drought_Soil_Dry_P Parameter: Treatment Value: Drought vs. No Drought
  misc_feature: MA Experiment ID: 20001757 Result: Down-regulated in Transcription
  misc_feature: MA Experiment 20001757 PARAMETER Experiment Name: At_50mM_NH4NO3_L-to-H_P Parameter: Timepoint (hr) Value: 6
  misc_feature: MA Experiment 20001757 PARAMETER Experiment Name: At_50mM_NH4NO3_L-to-H_P Parameter: Tissue Value: Leaf
  misc_feature: MA Experiment 20001757 PARAMETER Experiment Name: At_50mM_NH4NO3_L-to-H_P Parameter: Treatment Value: 50mM NH4NO3 vs 100mM Mannitol
  misc_feature: MA Experiment ID: 20001768 Result: Up-regulated in Transcription
  misc_feature: MA Experiment 20001768 PARAMETER Experiment Name: At_Far-red-enriched-adult_P Parameter: Age (day) Value: 28
  misc_feature: MA Experiment 20001768 PARAMETER Experiment Name: At_Far-red-enriched-adult_P Parameter: Light Value: Far-red enriched vs. White
  misc_feature: MA Experiment 20001768 PARAMETER Experiment Name: At_Far-red-enriched-adult_P Parameter: Organism Value: A. thaliana
  misc_feature: MA Experiment 20001768 PARAMETER Experiment Name: At_Far-red-enriched-adult_P Parameter: Plant Line Value: Columbia
  misc_feature: MA Experiment 20001768 PARAMETER Experiment Name: At_Far-red-enriched-adult_P Parameter: Timepoint (hr) Value: 1
  misc_feature: MA Experiment 20001768 PARAMETER Experiment Name: At_Far-red-enriched-adult_P Parameter: Tissue Value: Aerial
  misc_feature: MA Experiment ID: 20001770 Result: Up-regulated in Transcription
  misc_feature: MA Experiment 20001770 PARAMETER Experiment Name: At_Far-red-enriched-adult_P Parameter: Age (day) Value: 28
  misc_feature: MA Experiment 20001770 PARAMETER Experiment Name: At_Far-red-enriched-adult_P Parameter: Light Value: Far-red enriched vs. White
  misc_feature: MA Experiment 20001770 PARAMETER Experiment Name: At_Far-red-enriched-adult_P Parameter: Organism Value: A. thaliana
  misc_feature: MA Experiment 20001770 PARAMETER Experiment Name: At_Far-red-enriched-adult_P Parameter: Plant Line Value: Columbia
  misc_feature: MA Experiment 20001770 PARAMETER Experiment Name: At_Far-red-enriched-adult_P Parameter: Timepoint (hr) Value: 8
  misc_feature: MA Experiment 20001770 PARAMETER Experiment Name: At_Far-red-enriched-adult_P Parameter: Tissue Value: Aerial
  misc_feature: MA Experiment ID: 20001771 Result: Up-regulated in Transcription
  misc_feature: MA Experiment 20001771 PARAMETER Experiment Name: At_Far-red-enriched-adult_P Parameter: Age (day) Value: 28
  misc_feature: MA Experiment 20001771 PARAMETER Experiment Name: At_Far-red-enriched-adult_P Parameter: Light Value: Far-red enriched vs. White
  misc_feature: MA Experiment 20001771 PARAMETER Experiment Name: At_Far-red-enriched-adult_P Parameter: Organism Value: A. thaliana
  misc_feature: MA Experiment 20001771 PARAMETER Experiment Name: At_Far-red-enriched-adult_P Parameter: Plant Line Value: Columbia
  misc_feature: MA Experiment 20001771 PARAMETER Experiment Name: At_Far-red-enriched-adult_P Parameter: Timepoint (hr) Value: 16
  misc_feature: MA Experiment 20001771 PARAMETER Experiment Name: At_Far-red-enriched-adult_P Parameter: Tissue Value: Aerial
  misc_feature: MA Experiment ID: 20001774 Result: Up-regulated in Transcription
  misc_feature: MA Experiment 20001774 PARAMETER Experiment Name: At_Far-red-enriched-adult_P Parameter: Age (day) Value: 31
  misc_feature: MA Experiment 20001774 PARAMETER Experiment Name: At_Far-red-enriched-adult_P Parameter: Light Value: Far-red enriched vs. White
  misc_feature: MA Experiment 20001774 PARAMETER Experiment Name: At_Far-red-enriched-adult_P Parameter: Organism Value: A. thaliana
  misc_feature: MA Experiment 20001774 PARAMETER Experiment Name: At_Far-red-enriched-adult_P Parameter: Plant Line Value: Columbia
  misc_feature: MA Experiment 20001774 PARAMETER Experiment Name: At_Far-red-enriched-adult_P Parameter: Timepoint (hr) Value: 72
  misc_feature: MA Experiment 20001774 PARAMETER Experiment Name: At_Far-red-enriched-adult_P Parameter: Tissue Value: Aerial
  misc_feature: MA Experiment ID: 20001904 Result: Up-regulated in Transcription
  misc_feature: MA Experiment 20001904 PARAMETER Experiment Name: At_Drought_Reproduction_P Parameter: Age (day) Value: 37
  misc_feature: MA Experiment 20001904 PARAMETER Experiment Name: At_Drought_Reproduction_P Parameter: Organism Value: A. thaliana
  misc_feature: MA Experiment 20001904 PARAMETER Experiment Name: At_Drought_Reproduction_P Parameter: Plant Line Value: WS
  misc_feature: MA Experiment 20001904 PARAMETER Experiment Name: At_Drought_Reproduction_P Parameter: Timepoint (day) Value: 7
  misc_feature: MA Experiment 20001904 PARAMETER Experiment Name: At_Drought_Reproduction_P Parameter: Tissue Value: Rosettes
  misc_feature: MA Experiment 20001904 PARAMETER Experiment Name: At_Drought_Reproduction_P Parameter: Treatment Value: Drought vs. No Drought
  misc_feature: MA Experiment ID: 20001905 Result: Up-regulated in Transcription
  misc_feature: MA Experiment 20001905 PARAMETER Experiment Name: At_Drought_Reproduction_P Parameter: Age (day) Value: 40
  misc_feature: MA Experiment 20001905 PARAMETER Experiment Name: At_Drought_Reproduction_P Parameter: Organism Value: A. thaliana
  misc_feature: MA Experiment 20001905 PARAMETER Experiment Name: At_Drought_Reproduction_P Parameter: Plant Line Value: WS
  misc_feature: MA Experiment 20001905 PARAMETER Experiment Name: At_Drought_Reproduction_P Parameter: Timepoint (day) Value: 10
  misc_feature: MA Experiment 20001905 PARAMETER Experiment Name: At_Drought_Reproduction_P Parameter: Tissue Value: Rosettes
  misc_feature: MA Experiment 20001905 PARAMETER Experiment Name: At_Drought_Reproduction_P Parameter: Treatment Value: Drought vs. No Drought
  misc_feature: MA Experiment ID: 20001906 Result: Up-regulated in Transcription
  misc_feature: MA Experiment 20001906 PARAMETER Experiment Name: At_Drought_Reproduction_P Parameter: Age (day) Value: 35
  misc_feature: MA Experiment 20001906 PARAMETER Experiment Name: At_Drought_Reproduction_P Parameter: Organism Value: A. thaliana
  misc_feature: MA Experiment 20001906 PARAMETER Experiment Name: At_Drought_Reproduction_P Parameter: Plant Line Value: WS
  misc_feature: MA Experiment 20001906 PARAMETER Experiment Name: At_Drought_Reproduction_P Parameter: Timepoint (day) Value: 5
  misc_feature: MA Experiment 20001906 PARAMETER Experiment Name: At_Drought_Reproduction_P Parameter: Tissue Value: Siliques
  misc_feature: MA Experiment 20001906 PARAMETER Experiment Name: At_Drought_Reproduction_P Parameter: Treatment Value: Drought vs. No Drought
  misc_feature: MA Experiment ID: 20001908 Result: Up-regulated in Transcription
  misc_feature: MA Experiment 20001908 PARAMETER Experiment Name: At_Drought_Reproduction_P Parameter: Age (day) Value: 40
  misc_feature: MA Experiment 20001908 PARAMETER Experiment Name: At_Drought_Reproduction_P Parameter: Organism Value: A. thaliana
  misc_feature: MA Experiment 20001908 PARAMETER Experiment Name: At_Drought_Reproduction_P Parameter: Plant Line Value: WS
  misc_feature: MA Experiment 20001908 PARAMETER Experiment Name: At_Drought_Reproduction_P Parameter: Timepoint (day) Value: 10
  misc_feature: MA Experiment 20001908 PARAMETER Experiment Name: At_Drought_Reproduction_P Parameter: Tissue Value: Siliques
  misc_feature: MA Experiment 20001908 PARAMETER Experiment Name: At_Drought_Reproduction_P Parameter: Treatment Value: Drought vs. No Drought
  misc_feature: MA Experiment ID: 20001910 Result: Up-regulated in Transcription
  misc_feature: MA Experiment 20001910 PARAMETER Experiment Name: At_Drought_Reproduction_P Parameter: Age (day) Value: 37
  misc_feature: MA Experiment 20001910 PARAMETER Experiment Name: At_Drought_Reproduction_P Parameter: Organism Value: A. thaliana
  misc_feature: MA Experiment 20001910 PARAMETER Experiment Name: At_Drought_Reproduction_P Parameter: Plant Line Value: WS
  misc_feature: MA Experiment 20001910 PARAMETER Experiment Name: At_Drought_Reproduction_P Parameter: Timepoint (day) Value: 7
  misc_feature: MA Experiment 20001910 PARAMETER Experiment Name: At_Drought_Reproduction_P Parameter: Tissue Value: Flowers
  misc_feature: MA Experiment 20001910 PARAMETER Experiment Name: At_Drought_Reproduction_P Parameter: Treatment Value: Drought vs. No Drought
  misc_feature: MA Experiment ID: 20001911 Result: Up-regulated in Transcription
  misc_feature: MA Experiment 20001911 PARAMETER Experiment Name: At_Drought_Reproduction_P Parameter: Age (day) Value: 40
  misc_feature: MA Experiment 20001911 PARAMETER Experiment Name: At_Drought_Reproduction_P Parameter: Organism Value: A. thaliana
  misc_feature: MA Experiment 20001911 PARAMETER Experiment Name: At_Drought_Reproduction_P Parameter: Plant Line Value: WS
  misc_feature: MA Experiment 20001911 PARAMETER Experiment Name: At_Drought_Reproduction_P Parameter: Timepoint (day) Value: 10
  misc_feature: MA Experiment 20001911 PARAMETER Experiment Name: At_Drought_Reproduction_P Parameter: Tissue Value: Flowers
  misc_feature: MA Experiment 20001911 PARAMETER Experiment Name: At_Drought_Reproduction_P Parameter: Treatment Value: Drought vs. No Drought
aatgtgtacgtcttttgcataagaagaaacagagagcattatcaattattaacaattacacaagacagcgagattgtaaaagagtaagagagagagaatggcaggagaggcagaggctttggccacgacggcaccgttagctccggtcaccagtcagcgaaaagtacggaacgatttggaggaaacattaccaaaaccatacatggcaagagcattagcagctccagatacagagcatccgaatggaacagaaggtcacgatagcaaaggaatgagtgttatgcaacaacatgttgctttcttcgaccaaaacgacgatggaatcgtctatccttgggagacttataagggatttcgtgaccttggtttcaacccaatttcctctatcttttggaccttactcataaacttagcgttcagctacgttacacttccgagttgggtgccatcaccattattgccggtttatatcgacaacatacacaaagccaagcatgggagtgattcgagcacctatgacaccgaaggaaggtatgtcccagttaacctcgagaacatatttagcaaatacgcgctaacggttaaagataagttatcatttaaagaggtttggaatgtaaccgagggaaatcgaatggcaatcgatccttttggatggctttcaaacaaagttgaatggatactactctatattcttgctaaggacgaagatggtttcctatctaaagaagctgtgagaggttgctttgatggaagtttatttgaacaaattgccaaagagagggccaattctcgcaaacaagactaagaatgtgtgtgtttggttagcgaataaagctttttgaagaaaagcattgtgtaatttagcttctttcgtcttgttattcagtttggggatttgtataattaatgtgtttgtaaactatgtttcaaagttatataaataagagaagatgttacaaaaaaaaaaaaaagactaataagaagaatttggt

SEQ ID NO: 44005 - protein, 236 aa, Arabidopsis thaliana
  peptide (1)..(236): Ceres Seq. ID no. 12462180
  misc_feature (54)..(227): Pfam Name: Caleosin related protein Pfam Description: Caleosin related protein
  misc_feature (1)..(236): Homolog of NCBI NO: 15226103 NR Description: RD20 protein
MAGEAEALATTAPLAPVTSQRKVRNDLEETLPKPYMARALAAPDTEHPNGTEGHDSKGMSVMQQHVAFFDQNDDGIVYPWETYKGFRDLGFNPISSIFWTLLINLAFSYVTLPSWVPSPLLPVYIDNIHKAKHGSDSSTYDTEGRYVPVNLENIFSKYALTVKDKLSFKEVWNVTEGNRMAIDPFGWLSNKVEWILLYILAKDEDGFLSKEAVRGCFDGSLFEQIAKERANSRKQD

SEQ ID NO: 44006 - protein, 201 aa, Arabidopsis thaliana
  peptide (1)..(201): Ceres Seq. ID no. 12462181
  misc_feature (19)..(192): Pfam Name: Caleosin related protein Pfam Description: Caleosin related protein
  misc_feature (1)..(201): Homolog of NCBI NO: 15226103 NR Description: RD20 protein
MARALAAPDTEHPNGTEGHDSKGMSVMQQHVAFFDQNDDGIVYPWETYKGFRDLGFNPISSIFWTLLINLAFSYVTLPSWVPSPLLPVYIDNIHKAKHGSDSSTYDTEGRYVPVNLENIFSKYALTVKDKLSFKEVWNVTEGNRMAIDPFGWLSNKVEWILLYILAKDEDGFLSKEAVRGCFDGSLFEQIAKERANSRKQD

SEQ ID NO: 44007 - protein, 178 aa, Arabidopsis thaliana
  peptide (1)..(178): Ceres Seq. ID no. 12462182
  misc_feature (1)..(169): Pfam Name: Caleosin related protein Pfam Description: Caleosin related protein
  misc_feature (1)..(178): Homolog of NCBI NO: 15226103 NR Description: RD20 protein
MSVMQQHVAFFDQNDDGIVYPWETYKGFRDLGFNPISSIFWTLLINLAFSYVTLPSWVPSPLLPVYIDNIHKAKHGSDSSTYDTEGRYVPVNLENIFSKYALTVKDKLSFKEVWNVTEGNRMAIDPFGWLSNKVEWILLYILAKDEDGFLSKEAVRGCFDGSLFEQIAKERANSRKQD

SEQ ID NO: 44008 - DNA, 3088 bp, Arabidopsis thaliana
  misc_feature (1)..(3088): Ceres Seq. ID no. 12489219
  misc_feature: MA Experiment ID: 20000185 Result: Up-regulated in Transcription
  misc_feature: MA Experiment 20000185 PARAMETER Experiment Name: At_Roots__P Parameter: Age (day) Value: 7 vs. 21
  misc_feature: MA Experiment 20000185 PARAMETER Experiment Name: At_Roots__P Parameter: Organism Value: A. thaliana
  misc_feature: MA Experiment 20000185 PARAMETER Experiment Name: At_Roots__P Parameter: Tissue Value: Roots vs. Whole Plant
  misc_feature: MA Experiment ID: 20000227 Result: Down-regulated in Transcription
  misc_feature: MA Experiment 20000227 PARAMETER Experiment Name: At_Root-Tips-vs-Tops_P Parameter: Tissue Value: Root Tips vs. Root Tops
  misc_feature: MA Experiment ID: 20000439 Result: Up-regulated in Transcription
  misc_feature: MA Experiment 20000439 PARAMETER Experiment Name: At_Roots__P Parameter: Age (day) Value: 14 vs. 21
  misc_feature: MA Experiment 20000439 PARAMETER Experiment Name: At_Roots__P Parameter: Organism Value: A. thaliana
  misc_feature: MA Experiment 20000439 PARAMETER Experiment Name: At_Roots__P Parameter: Tissue Value: Roots vs. Whole Plant
acttcaaacctcaaagcaaccactgaatctcgactttgatcaattgagagagaaatgaacaccggcggtggccaatacacggattttccggcggtggaaactcacggaggacagttcataagttacgatatcttcggtagtttattcgagatcacatctaagtatcgtcctccgattataccaattggtcgtggagcttatggaatcgtttgctctgtgttggatacggagacgaacgagctagtagcgatgaagaagatagctaatgcttttgataatcatatggatgctaagcgtacgcttcgtgagatcaagcttcttcgtcatcttgatcatgaaaacattatagctataagagatgttgttccaccaccactaagaagacagttcagtgatgtttatatctctactgaattaatggatactgatcttcatcaaatcatcagatctaaccagagtttatcagaagaacactgtcagtacttcttgtaccagctacttcgaggactgaagtatatccactcagctaacattattcatagggatttaaagccgagcaatcttctgttgaacgcgaattgcgatttaaagatttgtgatttcggtcttgctagacctacttcagagaatgattttatgactgagtatgttgttacgagatggtatagagcacctgagcttctgttgaactcttcagattacacagctgctattgatgtttggtctgttggttgtatctttatggagcttatgaatagaaagcctttgttccctggtaaagaccatgttcatcaaatgcgcttattgacagagttgcttggcacaccgacagaatctgatctcggttttactcacaatgaggatgcgaaaagatacatccggcaacttcccaacttcccacgtcagcccttagctaaacttttctctcatgttaacccaatggccattgatcttgttgacagaatgttgacgtttgaccccaacagaagaatcactgttgaacaagctctgaatcaccagtaccttgctaaattgcacgacccgaatgatgagccaatctgtcaaaagccattctcttttgagttcgaacaacagcctctggatgaggaacagataaaagagatgatctaccaagaagccatagcactcaatccaacatacggttagaagtgcagcagccccgtgaatgcctgaatttcaggccattgttgacaaaaatagtgaaagatttctgcttgattttgagacatggctagttcagttactggcgatgcagaaacagcgatatcagcagattcaagcaccaaacgccgtggtggaggttggattacctttccgtttatgatagctacgttgttaggcttgacaatagctgcgtggggttggttacttaacttgatcgtctacctgatcgaggaattcaacgtgaagagcattgcagcggctcagattgctaatattgttagtggttgtatctgtatggttccagctgttgcagccattgcatctgactctttctttggaaccattcctgttatctcagtttcagctttcatttctcttatgggtgtagctctactgactctaactgcttcacttgacactttaagacctagaccctgcgaaacagcttcaatactatgccagtctccttcgaaaacccagctcggagtcctttacacggccataactctagcctctataggaacaggtgggacacggttcacattagcaactgctggtgcgaaccagtatgaaaaaactaaagaccaaggaagctttttcaactggtttttcttcacaacatatctagccggagctataagtgcaaccgccattgtctacaccgaagacaatatcagctggacccttgggtttggtctgtctgtagccgctaatttcttcagttttttggttttcgtctcggggaaaagattctacaagcatgacaagcctttgggaagtcccttcacaagtctactatgcgtcattttcgcagcattacgcaaaagaaaagctgtggtttccaccaacgaaaaagactaccacaatgaatcaatcacaatgcccacaaagagtttcaggttctttaaccgtgcagcattgaaacaggaagacgaggtaaaaccagatggcacaattcgcaatccatggagactatgcagcgttcaacaagtggaagatttcaaagcagtcataagaatcatccctctcgccttagccacaatattcttgagcactccaatcgcaatgcaactaagcttaacagttcttcaaggtctggtgatggaccggaggcttggtcctagcttcaaaatccctgcaggctctctccaagtcataacacttctctccacttgcctatttatcatagtcaacgatagggttctctatccattttaccaaaagttaacgggaaagcacctcacaccgctccaacgagttgggataggccatgcgttcaacattctaagcatggctgtgactgccatagttgaagcaaagcgattaaagatagtacagaagggtcattttctcggatcatcatctgttgctgacatgtcagtcttatggctcttccctcctctagtcatagtaggaatcggagaggccttccatttcccagggaatgtagctctgtgctatcaagagtttccagagtctatgagaagcaccgcaacatcgataacctcggtggtgattgggatatgtttctacacaagcactgctttgatagatctgattcaaaggaccacggcgtggttaccagatgacataaaccatggaagagttgacaatgtttactggattttagtcataggaggagtcttgaatcttggctattttcttgtgtgttcttggctatacagatacagaaacctcaaggatgatgatcataagcaagctgcaaatgtctctcactgatctttaagctggagaaagaaagaacatgtcctttgttgttatcatttgcatttctttacagagagctttgtctgaaagtatctccaatttgtagccattgaaaaacagtttttcatatgtagaattgatttggaaatttgtggtaatataatcgttttgtttc

SEQ ID NO: 44009 - protein, 558 aa, Arabidopsis thaliana
  peptide (1)..(558): Ceres Seq. ID no. 12489220
  misc_feature (94)..(485): Pfam Name: POT family Pfam Description: POT family
  misc_feature (3)..(536): Homolog of NCBI NO: 30696666 NR Description: oligopeptide transporter -related [Arabidopsis
  misc_feature (1)..(552): Homolog of NCBI NO: 26449486 NR Description: putative transporter protein [Arabidopsis
  misc_feature (1)..(552): Homolog of NCBI NO: 15231217 NR Description: putative transporter protein; protein id:
  misc_feature (1)..(552): Homolog of NCBI NO: 11358696 NR Description: probable transporter protein - Arabidopsis
  misc_feature (1)..(558): Homolog of NCBI NO: 15231221 NR Description: putative transporter protein; protein id:
  misc_feature (1)..(552): Homolog of NCBI NO: 30692629 NR Description: transporter protein -related [Arabidopsis
  misc_feature (1)..(552): Homolog of NCBI NO: 26450397 NR Description: putative transporter protein [Arabidopsis
  misc_feature (1)..(552): Homolog of NCBI NO: 15231215 NR Description: putative transporter protein; protein id:
  misc_feature (1)..(558): Homolog of NCBI NO: 15231202 NR Description: putative protein; protein id: At3g45660.1
  misc_feature (1)..(558): Homolog of NCBI NO: 15231199 NR Description: putative protein; protein id: At3g45650.1
MASSVTGDAETAISADSSTKRRGGGWITFPFMIATLLGLTIAAWGWLLNLIVYLIEEFNVKSIAAAQIANIVSGCICMVPAVAAIASDSFFGTIPVISVSAFISLMGVALLTLTASLDTLRPRPCETASILCQSPSKTQLGVLYTAITLASIGTGGTRFTLATAGANQYEKTKDQGSFFNWFFFTTYLAGAISATAIVYTEDNISWTLGFGLSVAANFFSFLVFVSGKRFYKHDKPLGSPFTSLLCVIFAALRKRKAVVSTNEKDYHNESITMPTKSFRFFNRAALKQEDEVKPDGTIRNPWRLCSVQQVEDFKAVIRIIPLALATIFLSTPIAMQLSLTVLQGLVMDRRLGPSFKIPAGSLQVITLLSTCLFIIVNDRVLYPFYQKLTGKHLTPLQRVGIGHAFNILSMAVTAIVEAKRLKIVQKGHFLGSSSVADMSVLWLFPPLVIVGIGEAFHFPGNVALCYQEFPESMRSTATSITSVVIGICFYTSTALIDLIQRTTAWLPDDINHGRVDNVYWILVIGGVLNLGYFLVCSWLYRYRNLKDDDHKQAANVSH

SEQ ID NO: 44010 - protein, 527 aa, Arabidopsis thaliana
  peptide (1)..(527): Ceres Seq. ID no. 12489221
  misc_feature (63)..(454): Pfam Name: POT family Pfam Description: POT family
  misc_feature (1)..(505): Homolog of NCBI NO: 30696666 NR Description: oligopeptide transporter -related [Arabidopsis
  misc_feature (1)..(521): Homolog of NCBI NO: 26449486 NR Description: putative transporter protein [Arabidopsis
  misc_feature (1)..(521): Homolog of NCBI NO: 15231217 NR Description: putative transporter protein; protein id:
  misc_feature (1)..(521): Homolog of NCBI NO: 11358696 NR Description: probable transporter protein - Arabidopsis
  misc_feature (1)..(527): Homolog of NCBI NO: 15231221 NR Description: putative transporter protein; protein id:
  misc_feature (1)..(521): Homolog of NCBI NO: 30692629 NR Description: transporter protein -related [Arabidopsis
  misc_feature (1)..(521): Homolog of NCBI NO: 26450397 NR Description: putative transporter protein [Arabidopsis
  misc_feature (1)..(521): Homolog of NCBI NO: 15231215 NR Description: putative transporter protein; protein id:
  misc_feature (1)..(527): Homolog of NCBI NO: 15231202 NR Description: putative protein; protein id: At3g45660.1
  misc_feature (1)..(527): Homolog of NCBI NO: 15231199 NR Description: putative protein; protein id: At3g45650.1
MIATLLGLTIAAWGWLLNLIVYLIEEFNVKSIAAAQIANIVSGCICMVPAVAAIASDSFFGTIPVISVSAFISLMGVALLTLTASLDTLRPRPCETASILCQSPSKTQLGVLYTAITLASIGTGGTRFTLATAGANQYEKTKDQGSFFNWFFFTTYLAGAISATAIVYTEDNISWTLGFGLSVAANFFSFLVFVSGKRFYKHDKPLGSPFTSLLCVIFAALRKRKAVVSTNEKDYHNESITMPTKSFRFFNRAALKQEDEVKPDGTIRNPWRLCSVQQVEDFKAVIRIIPLALATIFLSTPIAMQLSLTVLQGLVMDRRLGPSFKIPAGSLQVITLLSTCLFIIVNDRVLYPFYQKLTGKHLTPLQRVGIGHAFNILSMAVTAIVEAKRLKIVQKGHFLGSSSVADMSVLWLFPPLVIVGIGEAFHFPGNVALCYQEFPESMRSTATSITSVVIGICFYTSTALIDLIQRTTAWLPDDINHGRVDNVYWILVIGGVLNLGYFLVCSWLYRYRNLKDDDHKQAANVSH

SEQ ID NO: 44011 - protein, 481 aa, Arabidopsis thaliana
  peptide (1)..(481): Ceres Seq. ID no. 12489222
  misc_feature (17)..(408): Pfam Name: POT family Pfam Description: POT family
  misc_feature (1)..(459): Homolog of NCBI NO: 30696666 NR Description: oligopeptide transporter -related [Arabidopsis
  misc_feature (1)..(475): Homolog of NCBI NO: 26449486 NR Description: putative transporter protein [Arabidopsis
  misc_feature (1)..(475): Homolog of NCBI NO: 15231217 NR Description: putative transporter protein; protein id:
  misc_feature (1)..(475): Homolog of NCBI NO: 11358696 NR Description: probable transporter protein - Arabidopsis
  misc_feature (1)..(481): Homolog of NCBI NO: 15231221 NR Description: putative transporter protein; protein id:
  misc_feature (1)..(475): Homolog of NCBI NO: 30692629 NR Description: transporter protein -related [Arabidopsis
  misc_feature (1)..(475): Homolog of NCBI NO: 26450397 NR Description: putative transporter protein [Arabidopsis
  misc_feature (1)..(475): Homolog of NCBI NO: 15231215 NR Description: putative transporter protein; protein id:
  misc_feature (1)..(481): Homolog of NCBI NO: 15231202 NR Description: putative protein; protein id: At3g45660.1
  misc_feature (1)..(481): Homolog of NCBI NO: 15231199 NR Description: putative protein; protein id: At3g45650.1
MVPAVAAIASDSFFGTIPVISVSAFISLMGVALLTLTASLDTLRPRPCETASILCQSPSKTQLGVLYTAITLASIGTGGTRFTLATAGANQYEKTKDQGSFFNWFFFTTYLAGAISATAIVYTEDNISWTLGFGLSVAANFFSFLVFVSGKRFYKHDKPLGSPFTSLLCVIFAALRKRKAVVSTNEKDYHNESITMPTKSFRFFNRAALKQEDEVKPDGTIRNPWRLCSVQQVEDFKAVIRIIPLALATIFLSTPIAMQLSLTVLQGLVMDRRLGPSFKIPAGSLQVITLLSTCLFIIVNDRVLYPFYQKLTGKHLTPLQRVGIGHAFNILSMAVTAIVEAKRLKIVQKGHFLGSSSVADMSVLWLFPPLVIVGIGEAFHFPGNVALCYQEFPESMRSTATSITSVVIGICFYTSTALIDLIQRTTAWLPDDINHGRVDNVYWILVIGGVLNLGYFLVCSWLYRYRNLKDDDHKQAANVSH

SEQ ID NO: 44012 - DNA, 686 bp, Arabidopsis thaliana
  misc_feature (1)..(686): Ceres Seq. ID no. 12466305
  misc_feature: MA Experiment ID: 20000173 Result: Down-regulated in Transcription
  misc_feature: MA Experiment 20000173 PARAMETER Experiment Name: At_42deg_Heat_P Parameter: Age (day) Value: 14
  misc_feature: MA Experiment 20000173 PARAMETER Experiment Name: At_42deg_Heat_P Parameter: Organism Value: A. thaliana
  misc_feature: MA Experiment 20000173 PARAMETER Experiment Name: At_42deg_Heat_P Parameter: Plant Line Value: WS
  misc_feature: MA Experiment 20000173 PARAMETER Experiment Name: At_42deg_Heat_P Parameter: Temperature (deg C) Value: 42 vs. 22
  misc_feature: MA Experiment 20000173 PARAMETER Experiment Name: At_42deg_Heat_P Parameter: Timepoint (hr) Value: 6
  misc_feature: MA Experiment 20000173 PARAMETER Experiment Name: At_42deg_Heat_P Parameter: Tissue Value: Aerial
  misc_feature: MA Experiment ID: 20000213 Result: Up-regulated in Transcription
  misc_feature: MA Experiment 20000213 PARAMETER Experiment Name: At_4deg_Cold_P Parameter: Timepoint (hr) Value: 2
  misc_feature: MA Experiment ID: 20000453 Result: Down-regulated in Transcription
  misc_feature: MA Experiment 20000453 PARAMETER Experiment Name: At_100uM_ABA_P Parameter: Age (day) Value: 15
  misc_feature: MA Experiment 20000453 PARAMETER Experiment Name: At_100uM_ABA_P Parameter: Organism Value: A. thaliana
  misc_feature: MA Experiment 20000453 PARAMETER Experiment Name: At_100uM_ABA_P Parameter: Plant Line Value: WS
  misc_feature: MA Experiment 20000453 PARAMETER Experiment Name: At_100uM_ABA_P Parameter: Timepoint (hr) Value: 24
  misc_feature: MA Experiment 20000453 PARAMETER Experiment Name: At_100uM_ABA_P Parameter: Tissue Value: Aerial
  misc_feature: MA Experiment 20000453 PARAMETER Experiment Name: At_100uM_ABA_P Parameter: Treatment Value: 100uM ABA vs. No Treatment
  misc_feature: MA Experiment ID: 20001247 Result: Down-regulated in Transcription
  misc_feature: MA Experiment 20001247 PARAMETER Experiment Name: At_Far-red-induction_P Parameter: Age (day) Value: 7
  misc_feature: MA Experiment 20001247 PARAMETER Experiment Name: At_Far-red-induction_P Parameter: Light Value: Far-red vs. White
  misc_feature: MA Experiment 20001247 PARAMETER Experiment Name: At_Far-red-induction_P Parameter: Organism Value: A. thaliana
  misc_feature: MA Experiment 20001247 PARAMETER Experiment Name: At_Far-red-induction_P Parameter: Plant Line Value: Columbia
  misc_feature: MA Experiment 20001247 PARAMETER Experiment Name: At_Far-red-induction_P Parameter: Timepoint (hr) Value: 1
  misc_feature: MA Experiment 20001247 PARAMETER Experiment Name: At_Far-red-induction_P Parameter: Tissue Value: Whole Plant
  misc_feature: MA Experiment ID: 20001248 Result: Up-regulated in Transcription
  misc_feature: MA Experiment 20001248 PARAMETER Experiment Name: At_Far-red-induction_P Parameter: Age (day) Value: 7
  misc_feature: MA Experiment 20001248 PARAMETER Experiment Name: At_Far-red-induction_P Parameter: Light Value: Far-red vs. White
  misc_feature: MA Experiment 20001248 PARAMETER Experiment Name: At_Far-red-induction_P Parameter: Organism Value: A. thaliana
  misc_feature: MA Experiment 20001248 PARAMETER Experiment Name: At_Far-red-induction_P Parameter: Plant Line Value: Columbia
  misc_feature: MA Experiment 20001248 PARAMETER Experiment Name: At_Far-red-induction_P Parameter: Timepoint (hr) Value: 4
  misc_feature: MA Experiment 20001248 PARAMETER Experiment Name: At_Far-red-induction_P Parameter: Tissue Value: Whole Plant
  misc_feature: MA Experiment ID: 20001557 Result: Up-regulated in Transcription
  misc_feature: MA Experiment 20001557 PARAMETER Experiment Name: At_Drought_Soil_Dry_P Parameter: Age (day) Value: 27
  misc_feature: MA Experiment 20001557 PARAMETER Experiment Name: At_Drought_Soil_Dry_P Parameter: Organism Value: A. thaliana
  misc_feature: MA Experiment 20001557 PARAMETER Experiment Name: At_Drought_Soil_Dry_P Parameter: Plant Line Value: WS
  misc_feature: MA Experiment 20001557 PARAMETER Experiment Name: At_Drought_Soil_Dry_P Parameter: Post Timepoint (hr) Value: 3
  misc_feature: MA Experiment 20001557 PARAMETER Experiment Name: At_Drought_Soil_Dry_P Parameter: Post-Treatment Value: Re-Water vs. No Drought
  misc_feature: MA Experiment 20001557 PARAMETER Experiment Name: At_Drought_Soil_Dry_P Parameter: Timepoint (day) Value: 13
  misc_feature: MA Experiment 20001557 PARAMETER Experiment Name: At_Drought_Soil_Dry_P Parameter: Treatment Value: Drought vs. No Drought
atcacataagtctctctcttacattttgaaaccctaatttctcaaaaaaaatgtctgaagttgagtaccggtgctttgtcggcggccttgcctgggccaccaatgatgaagatcttcaaaggacgttctcacagttcggcgacgttatcgattctaagatcattaacgaccgcgagagtggaagatcaaggggattcggattcgtcaccttcaaggacgagaaagccatgagggatgcgattgaagagatgaacggtaaagagctcgatggacgtgtcatcaccgtgaacgaggctcagtcgagaggtagcggcggtggcggaggaggccgtggtggaagcggtggtggttaccgcagcggaggcggtggtggatactcaggaggcggtggcggcggatactcaggaggaggcggtggtggttacgagaggcggtgatggtggaagttacggcggcggtggtggcggctggtaatcaaagatagagttgtttgcgtgctgctgctctgtttttggtttagatttggatttgtgtcnccncttctggtttggttatcgttcgtttggtttacttttttgatgaaacagtttcgtttaagtcttctttgtctggatcgaaatgttaattcgcgtgttgtttactaaatttataacgtttccttttaaccagattcgagattttccctc

SEQ ID NO: 44013 - protein, 128 aa, Arabidopsis thaliana
  peptide (1)..(128): Ceres Seq. ID no. 12466306
  misc_feature (8)..(79): Pfam Name: RNA recognition motif. (a.k.a. RRM, RBD, or RNP domain) Pfam Description: RNA recognition motif. (a.k.a. RRM, RBD, or RNP
  misc_feature (3)..(125): Homolog of NCBI NO: 30681492 NR Description: glycine-rich RNA-binding protein (AtGRP7)
  misc_feature (2)..(127): Homolog of NCBI NO: 112994 NR Description: Glycine-rich RNA-binding, abscisic acid-inducible
  misc_feature (1)..(125): Homolog of NCBI NO: 2119042 NR Description: glycine-rich RNA-binding protein RGP-1a - wood
  misc_feature (1)..(125): Homolog of NCBI NO: 544416 NR Description: Glycine-rich RNA-binding protein 10
  misc_feature (3)..(125): Homolog of NCBI NO: 21553354 NR Description: glycine-rich RNA binding protein 7 [Arabidopsis
  misc_feature (3)..(125): Homolog of NCBI NO: 15226605 NR Description: glycine-rich RNA binding protein AtGRP7
  misc_feature (3)..(125): Homolog of NCBI NO: 1346180 NR Description: Glycine-rich RNA-binding protein GRP1A
  misc_feature (1)..(125): Homolog of NCBI NO: 544426 NR Description: Glycine-rich RNA-binding protein
  misc_feature (1)..(124): Homolog of NCBI NO: 30692254 NR Description: glycine-rich RNA-binding protein 8 (GRP8) (CCR1)
  misc_feature (1)..(128): Homolog of NCBI NO: 15235002 NR Description: glycine-rich RNA-binding protein 8 (GRP8)
MSEVEYRCFVGGLAWATNDEDLQRTFSQFGDVIDSKIINDRESGRSRGFGFVTFKDEKAMRDAIEEMNGKELDGRVITVNEAQSRGSGGGGGGRGGSGGGYRSGGGGGYSGGGGGGYSGGGGGGYERR

SEQ ID NO: 44014 - protein, 69 aa, Arabidopsis thaliana
  peptide (1)..(69): Ceres Seq. ID no. 12466307
  misc_feature (1)..(66): Homolog of NCBI NO: 30681492 NR Description: glycine-rich RNA-binding protein (AtGRP7)
  misc_feature (1)..(68): Homolog of NCBI NO: 112994 NR Description: Glycine-rich RNA-binding, abscisic acid-inducible
  misc_feature (1)..(66): Homolog of NCBI NO: 2119042 NR Description: glycine-rich RNA-binding protein RGP-1a - wood
  misc_feature (1)..(66): Homolog of NCBI NO: 544416 NR Description: Glycine-rich RNA-binding protein 10
  misc_feature (1)..(66): Homolog of NCBI NO: 21553354 NR Description: glycine-rich RNA binding protein 7 [Arabidopsis
  misc_feature (1)..(66): Homolog of NCBI NO: 15226605 NR Description: glycine-rich RNA binding protein AtGRP7
  misc_feature (1)..(66): Homolog of NCBI NO: 1346180 NR Description: Glycine-rich RNA-binding protein GRP1A
  misc_feature (1)..(66): Homolog of NCBI NO: 544426 NR Description: Glycine-rich RNA-binding protein
  misc_feature (1)..(65): Homolog of NCBI NO: 30692254 NR Description: glycine-rich RNA-binding protein 8 (GRP8) (CCR1)
  misc_feature (1)..(69): Homolog of NCBI NO: 15235002 NR Description: glycine-rich RNA-binding protein 8 (GRP8)
MRDAIEEMNGKELDGRVITVNEAQSRGSGGGGGGRGGSGGGYRSGGGGGYSGGGGGGYSGGGGGGYERR

SEQ ID NO: 44015 - DNA, 1135 bp, Arabidopsis thaliana
  misc_feature (1)..(1135): Ceres Seq. ID no. 12489310
  misc_feature: MA Experiment ID: 20000180 Result: Up-regulated in Transcription
  misc_feature: MA Experiment 20000180 PARAMETER Experiment Name: At_Germinating_Seeds_P Parameter: Age (hr) Value: 24 vs. 0
  misc_feature: MA Experiment 20000180 PARAMETER Experiment Name: At_Germinating_Seeds_P Parameter: Tissue Value: Germinating Seeds
  misc_feature: MA Experiment ID: 20000182 Result: Down-regulated in Transcription
  misc_feature: MA Experiment 20000182 PARAMETER Experiment Name: At_2mM_SA_P Parameter: Age (day) Value: 14
  misc_feature: MA Experiment 20000182 PARAMETER Experiment Name: At_2mM_SA_P Parameter: Organism Value: A. thaliana
  misc_feature: MA Experiment 20000182 PARAMETER Experiment Name: At_2mM_SA_P Parameter: Plant Line Value: WS
  misc_feature: MA Experiment 20000182 PARAMETER Experiment Name: At_2mM_SA_P Parameter: Timepoint (hr) Value: 6
  misc_feature: MA Experiment 20000182 PARAMETER Experiment Name: At_2mM_SA_P Parameter: Tissue Value: Aerial
  misc_feature: MA Experiment 20000182 PARAMETER Experiment Name: At_2mM_SA_P Parameter: Treatment Value: 2mM SA vs. No Treatment
  misc_feature: MA Experiment ID: 20000184 Result: Up-regulated in Transcription
  misc_feature: MA Experiment 20000184 PARAMETER Experiment Name: At_Shoots__P Parameter: Age (day) Value: 7
  misc_feature: MA Experiment 20000184 PARAMETER Experiment Name: At_Shoots__P Parameter: Tissue Value: Shoots vs. Whole Plant
  misc_feature: MA Experiment ID: 20000185 Result: Down-regulated in Transcription
  misc_feature: MA Experiment 20000185 PARAMETER Experiment Name: At_Roots__P Parameter: Age (day) Value: 7 vs. 21
  misc_feature: MA Experiment 20000185 PARAMETER Experiment Name: At_Roots__P Parameter: Organism Value: A. thaliana
  misc_feature: MA Experiment 20000185 PARAMETER Experiment Name: At_Roots__P Parameter: Tissue Value: Roots vs. Whole Plant
  misc_feature: MA Experiment ID: 20000264 Result: Down-regulated in Transcription
  misc_feature: MA Experiment 20000264 PARAMETER Experiment Name: At_Open_Flower_P Parameter: Age (day) Value: 21
  misc_feature: MA Experiment 20000264 PARAMETER Experiment Name: At_Open_Flower_P Parameter: Plant Line Value: WS
  misc_feature: MA Experiment 20000264 PARAMETER Experiment Name: At_Open_Flower_P Parameter: Tissue Value: Open Flower vs. Whole Plant
  misc_feature: MA Experiment ID: 20000265 Result: Down-regulated in Transcription
  misc_feature: MA Experiment 20000265 PARAMETER Experiment Name: At_Open_Flower_P Parameter: Age (day) Value: 21
  misc_feature: MA Experiment 20000265 PARAMETER Experiment Name: At_Open_Flower_P Parameter: Plant Line Value: WS
  misc_feature: MA Experiment 20000265 PARAMETER Experiment Name: At_Open_Flower_P Parameter: Tissue Value: Closed Flower vs. Whole Plant
  misc_feature: MA Experiment ID: 20000286 Result: Down-regulated in Transcription
  misc_feature: MA Experiment 20000286 PARAMETER Experiment Name: At_Open_Flower_P Parameter: Age (day) Value: 21
  misc_feature: MA Experiment 20000286 PARAMETER Experiment Name: At_Open_Flower_P Parameter: Plant Line Value: WS
  misc_feature: MA Experiment 20000286 PARAMETER Experiment Name: At_Open_Flower_P Parameter: Tissue Value: Half Open vs. Whole Plant
  misc_feature: MA Experiment ID: 20000439 Result: Down-regulated in Transcription
  misc_feature: MA Experiment 20000439 PARAMETER Experiment Name: At_Roots__P Parameter: Age (day) Value: 14 vs. 21
  misc_feature: MA Experiment 20000439 PARAMETER Experiment Name: At_Roots__P Parameter: Organism Value: A. thaliana
  misc_feature: MA Experiment 20000439 PARAMETER Experiment Name: At_Roots__P Parameter: Tissue Value: Roots vs. Whole Plant
  misc_feature: MA Experiment ID: 20000573 Result: Down-regulated in Transcription
  misc_feature: MA Experiment 20000573 PARAMETER Experiment Name: At_100uM_ABA_Mutants__P Parameter: Organism Value: A. thaliana
  misc_feature: MA Experiment 20000573 PARAMETER Experiment Name: At_100uM_ABA_Mutants__P Parameter: Plant Line Value: CS22 vs. Ler wt
  misc_feature: MA Experiment 20000573 PARAMETER Experiment Name: At_100uM_ABA_Mutants__P Parameter: Timepoint (hr) Value: N/A
  misc_feature: MA Experiment 20000573 PARAMETER Experiment Name: At_100uM_ABA_Mutants__P Parameter: Tissue Value: Whole Plant
  misc_feature: MA Experiment 20000573 PARAMETER Experiment Name: At_100uM_ABA_Mutants__P Parameter: Treatment Value: None
  misc_feature: MA Experiment ID: 20000574 Result: Down-regulated in Transcription
  misc_feature: MA Experiment 20000574 PARAMETER Experiment Name: At_100uM_ABA_Mutants__P Parameter: Organism Value: A. thaliana
  misc_feature: MA Experiment 20000574 PARAMETER Experiment Name: At_100uM_ABA_Mutants__P Parameter: Plant Line Value: CS23 vs. Ler wt
  misc_feature: MA Experiment 20000574 PARAMETER Experiment Name: At_100uM_ABA_Mutants__P Parameter: Timepoint (hr) Value: N/A
  misc_feature: MA Experiment 20000574 PARAMETER Experiment Name: At_100uM_ABA_Mutants__P Parameter: Tissue Value: Whole Plant
  misc_feature: MA Experiment 20000574 PARAMETER Experiment Name: At_100uM_ABA_Mutants__P Parameter: Treatment Value: None
  misc_feature: MA Experiment ID: 20000794 Result: Down-regulated in Transcription
  misc_feature: MA Experiment 20000794 PARAMETER Experiment Name: At_Petals_P Parameter: Age (day) Value: 23-25 days
  misc_feature: MA Experiment 20000794 PARAMETER Experiment Name: At_Petals_P Parameter: Plant Line Value: WS
  misc_feature: MA Experiment 20000794 PARAMETER Experiment Name: At_Petals_P Parameter: Tissue Value: Petals vs. Whole plant
  misc_feature: MA Experiment ID: 20001248 Result: Down-regulated in Transcription
  misc_feature: MA Experiment 20001248 PARAMETER Experiment Name: At_Far-red-induction_P Parameter: Age (day) Value: 7
  misc_feature: MA Experiment 20001248 PARAMETER Experiment Name: At_Far-red-induction_P Parameter: Light Value: Far-red vs. White
  misc_feature: MA Experiment 20001248 PARAMETER Experiment Name: At_Far-red-induction_P Parameter: Organism Value: A. thaliana
  misc_feature: MA Experiment 20001248 PARAMETER Experiment Name: At_Far-red-induction_P Parameter: Plant Line Value: Columbia
  misc_feature: MA Experiment 20001248 PARAMETER Experiment Name: At_Far-red-induction_P Parameter: Timepoint (hr) Value: 4
  misc_feature: MA Experiment 20001248 PARAMETER Experiment Name: At_Far-red-induction_P Parameter: Tissue Value: Whole Plant
  misc_feature: MA Experiment ID: 20001451 Result: Down-regulated in Transcription
  misc_feature: MA Experiment 20001451 PARAMETER Experiment Name: At_Far-red-induction_P Parameter: Age (day) Value: 7
  misc_feature: MA Experiment 20001451 PARAMETER Experiment Name: At_Far-red-induction_P Parameter: Light Value: Far-red vs. White
  misc_feature: MA Experiment 20001451 PARAMETER Experiment Name: At_Far-red-induction_P Parameter: Organism Value: A. thaliana
  misc_feature: MA Experiment 20001451 PARAMETER Experiment Name: At_Far-red-induction_P Parameter: Plant Line Value: Columbia
  misc_feature: MA Experiment 20001451 PARAMETER Experiment Name: At_Far-red-induction_P Parameter: Timepoint (hr) Value: 24
  misc_feature: MA Experiment 20001451 PARAMETER Experiment Name: At_Far-red-induction_P Parameter: Tissue Value: Whole Plant
  misc_feature: MA Experiment ID: 20001557 Result: Down-regulated in Transcription
  misc_feature: MA Experiment 20001557 PARAMETER Experiment Name: At_Drought_Soil_Dry_P Parameter: Age (day) Value: 27
  misc_feature: MA Experiment 20001557 PARAMETER Experiment Name: At_Drought_Soil_Dry_P Parameter: Organism Value: A. thaliana
  misc_feature: MA Experiment 20001557 PARAMETER Experiment Name: At_Drought_Soil_Dry_P Parameter: Plant Line Value: WS
  misc_feature: MA Experiment 20001557 PARAMETER Experiment Name: At_Drought_Soil_Dry_P Parameter: Post Timepoint (hr) Value: 3
  misc_feature: MA Experiment 20001557 PARAMETER Experiment Name: At_Drought_Soil_Dry_P Parameter: Post-Treatment Value: Re-Water vs. No Drought
  misc_feature: MA Experiment 20001557 PARAMETER Experiment Name: At_Drought_Soil_Dry_P Parameter: Timepoint (day) Value: 13
  misc_feature: MA Experiment 20001557 PARAMETER Experiment Name: At_Drought_Soil_Dry_P Parameter: Treatment Value: Drought vs. No Drought
  misc_feature: MA Experiment ID: 20001558 Result: Down-regulated in Transcription
  misc_feature: MA Experiment 20001558 PARAMETER Experiment Name: At_Drought_Soil_Dry_P Parameter: Age (day) Value: 27
  misc_feature: MA Experiment 20001558 PARAMETER Experiment Name: At_Drought_Soil_Dry_P Parameter: Organism Value: A. thaliana
  misc_feature: MA Experiment 20001558 PARAMETER Experiment Name: At_Drought_Soil_Dry_P Parameter: Plant Line Value: WS
  misc_feature: MA Experiment 20001558 PARAMETER Experiment Name: At_Drought_Soil_Dry_P Parameter: Post Timepoint (hr) Value: 6
  misc_feature: MA Experiment 20001558 PARAMETER Experiment Name: At_Drought_Soil_Dry_P Parameter: Post-Treatment Value: Re-Water vs. No Drought
  misc_feature: MA Experiment 20001558 PARAMETER Experiment Name: At_Drought_Soil_Dry_P Parameter: Timepoint (day) Value: 13
  misc_feature: MA Experiment 20001558 PARAMETER Experiment Name: At_Drought_Soil_Dry_P Parameter: Treatment Value: Drought vs. No Drought
  misc_feature: MA Experiment ID: 20001905 Result: Down-regulated in Transcription
  misc_feature: MA Experiment 20001905 PARAMETER Experiment Name: At_Drought_Reproduction_P Parameter: Age (day) Value: 40
  misc_feature: MA Experiment 20001905 PARAMETER Experiment Name: At_Drought_Reproduction_P Parameter: Organism Value: A. thaliana
  misc_feature: MA Experiment 20001905 PARAMETER Experiment Name: At_Drought_Reproduction_P Parameter: Plant Line Value: WS
  misc_feature: MA Experiment 20001905 PARAMETER Experiment Name: At_Drought_Reproduction_P Parameter: Timepoint (day) Value: 10
  misc_feature: MA Experiment 20001905 PARAMETER Experiment Name: At_Drought_Reproduction_P Parameter: Tissue Value: Rosettes
  misc_feature: MA Experiment 20001905 PARAMETER Experiment Name: At_Drought_Reproduction_P Parameter: Treatment Value: Drought vs. No Drought
  misc_feature: MA Experiment ID: 20001906 Result: Down-regulated in Transcription
  misc_feature: MA Experiment 20001906 PARAMETER Experiment Name: At_Drought_Reproduction_P Parameter: Age (day) Value: 35
  misc_feature: MA Experiment 20001906 PARAMETER Experiment Name: At_Drought_Reproduction_P Parameter: Organism Value: A. thaliana
  misc_feature: MA Experiment 20001906 PARAMETER Experiment Name: At_Drought_Reproduction_P Parameter: Plant Line Value: WS
  misc_feature: MA Experiment 20001906 PARAMETER Experiment Name: At_Drought_Reproduction_P Parameter: Timepoint (day) Value: 5
  misc_feature: MA Experiment 20001906 PARAMETER Experiment Name: At_Drought_Reproduction_P Parameter: Tissue Value: Siliques
  misc_feature: MA Experiment 20001906 PARAMETER Experiment Name: At_Drought_Reproduction_P Parameter: Treatment Value: Drought vs. No Drought
atcaagaaacggatctttcttctctatcttctgaatatcacaaaacccaattagccggagatggccgcaacatccgccgctgctgcagctgcttcttccatcatgggtactcgggtggctcccggtatccatcccggttcaggtcggttcacagccgtgttcggtttcggaaagaagaaggcagctcccaaaaagagtgccaaaaagacggtgactacggaccggcctctttggtacccaggcgccatttctcctgactggcttgatggttccttggttggagattacggttttgatcccttcggtttaggcaaaccggccgagtatcttcaattcgatatcgattcactagaccagaatctggctaagaacttggccggagacgtgatcggaacccgtacggaagctgccgacgccaaatcgacgccgtttcagccgtacagtgaggtgttcggaatccagagattcagggaatgcgaactcatccacggacggtgggcgatgctcgctactctcggcgctctctccgtcgaatggcttaccggcgttacatggcaagacgctggcaaggtggagcttgtagatggatcgtcctacttggggcagccattacctttctcgatctcgacattgatatggatcgaggtgttagtgatcggctacatcgagttccagcgcaacgccgagcttgattcggagaagcgtttataccccggaggcaagttctttgacccgctaggtttagcggctgacccggagaagactgctcaacttcagttagctgagatcaagcatgcacgtcttgcgatggtcgccttcttgggattcgcggttcaagcggctgcaacaggtaaaggtccactcaacaattgggctactcacctcagtgatccactccacaccaccatcatcgataccttctcctcatcttaaaatcattatcatgtgagattctatttgtaacttatgtaaaaacagagctatgatgatactgaatcgactttgggcttttgcttgtttggtttatttacatgtttggcccatgacattaaattgggcttctccttatttactatacctactcgtcgtacattttcaaaatgtatttttgtcgcatatacagattggcccaata

SEQ ID NO: 44016 - protein, 290 aa, Arabidopsis thaliana
  peptide (1)..(290): Ceres Seq. ID no. 12489311
  misc_feature (63)..(261): Pfam Name: Chlorophyll A-B binding protein Pfam Description: Chlorophyll A-B binding protein
  misc_feature (1)..(273): Homolog of NCBI NO: 15225630 NR Description: light-harvesting chlorophyll a/b binding protein
  misc_feature (5)..(290): Homolog of NCBI NO: 7443231 NR Description: chlorophyll a/b-binding protein CP29 precursor -
  misc_feature (5)..(290): Homolog of NCBI NO: 445116 NR Description: light-harvesting complex IIa protein;
  misc_feature (5)..(290): Homolog of NCBI NO: 7443230 NR Description: probable chlorophyll a/b-binding protein - rice
  misc_feature (1)..(290): Homolog of NCBI NO: 4689382 NR Description: chlorophyll a/b binding protein CP29 [Vigna
  misc_feature (1)..(290): Homolog of NCBI NO: 15231990 NR Description: putative chlorophyll a/b-binding protein
  misc_feature (1)..(290): Homolog of NCBI NO: 15081739 NR Description: AT5g01530/F7A7_50 [Arabidopsis thaliana]
  misc_feature (1)..(290): Homolog of NCBI NO: 13877547 NR Description: chlorophyll a/b-binding protein CP29 [Arabidopsis
  misc_feature (1)..(290): Homolog of NCBI NO: 20260162 NR Description: chlorophyll a/b-binding protein CP29 [Arabidopsis
  misc_feature (1)..(290): Homolog of NCBI NO: 15241005 NR Description: light-harvesting chlorophyll a/b binding protein
MAATSAAAAAASSIMGTRVAPGIHPGSGRFTAVFGFGKKKAAPKKSAKKTVTTDRPLWYPGAISPDWLDGSLVGDYGFDPFGLGKPAEYLQFDIDSLDQNLAKNLAGDVIGTRTEAADAKSTPFQPYSEVFGIQRFRECELIHGRWAMLATLGALSVEWLTGVTWQDAGKVELVDGSSYLGQPLPFSISTLIWIEVLVIGYIEFQRNAELDSEKRLYPGGKFFDPLGLAADPEKTAQLQLAEIKHARLAMVAFLGFAVQAAATGKGPLNNWATHLSDPLHTTIIDTFSSS

SEQ ID NO: 44017 - protein, 276 aa, Arabidopsis thaliana
  peptide (1)..(276): Ceres Seq. ID no. 12489312
  misc_feature (49)..(247): Pfam Name: Chlorophyll A-B binding protein Pfam Description: Chlorophyll A-B binding protein
  misc_feature (1)..(259): Homolog of NCBI NO: 15225630 NR Description: light-harvesting chlorophyll a/b binding protein
  misc_feature (1)..(276): Homolog of NCBI NO: 7443231 NR Description: chlorophyll a/b-binding protein CP29 precursor -
  misc_feature (1)..(276): Homolog of NCBI NO: 445116 NR Description: light-harvesting complex IIa protein;
  misc_feature (1)..(276): Homolog of NCBI NO: 7443230 NR Description: probable chlorophyll a/b-binding protein - rice
  misc_feature (1)..(276): Homolog of NCBI NO: 4689382 NR Description: chlorophyll a/b binding protein CP29 [Vigna
  misc_feature (1)..(276): Homolog of NCBI NO: 15231990 NR Description: putative chlorophyll a/b-binding protein
  misc_feature (1)..(276): Homolog of NCBI NO: 15081739 NR Description: AT5g01530/F7A7_50 [Arabidopsis thaliana]
  misc_feature (1)..(276): Homolog of NCBI NO: 13877547 NR Description: chlorophyll a/b-binding protein CP29 [Arabidopsis
  misc_feature (1)..(276): Homolog of NCBI NO: 20260162 NR Description: chlorophyll a/b-binding protein CP29 [Arabidopsis
  misc_feature (1)..(276): Homolog of NCBI NO: 15241005 NR Description: light-harvesting chlorophyll a/b binding protein
MGTRVAPGIHPGSGRFTAVFGFGKKKAAPKKSAKKTVTTDRPLWYPGAISPDWLDGSLVGDYGFDPFGLGKPAEYLQFDIDSLDQNLAKNLAGDVIGTRTEAADAKSTPFQPYSEVFGIQRFRECELIHGRWAMLATLGALSVEWLTGVTWQDAGKVELVDGSSYLGQPLPFSISTLIWIEVLVIGYIEFQRNAELDSEKRLYPGGKFFDPLGLAADPEKTAQLQLAEIKHARLAMVAFLGFAVQAAATGKGPLNNWATHLSDPLHTTIIDTFSSS

SEQ ID NO: 44018 - DNA, 648 bp, Arabidopsis thaliana
  misc_feature (1)..(648): Ceres Seq. ID no. 13580561
  misc_feature: MA Experiment ID: 20000234 Result: Down-regulated in Transcription
  misc_feature: MA Experiment 20000234 PARAMETER Experiment Name: At_Siliques_P Parameter: Age (day) Value: 21
  misc_feature: MA Experiment 20000234 PARAMETER Experiment Name: At_Siliques_P Parameter: Organism Value: A. thaliana
  misc_feature: MA Experiment 20000234 PARAMETER Experiment Name: At_Siliques_P Parameter: Plant Line Value: WS
  misc_feature: MA Experiment 20000234 PARAMETER Experiment Name: At_Siliques_P Parameter: Tissue Value: Less Than 5mm Siliques vs. Whole Plant
  misc_feature: MA Experiment ID: 20000265 Result: Down-regulated in Transcription
  misc_feature: MA Experiment 20000265 PARAMETER Experiment Name: At_Open_Flower_P Parameter: Age (day) Value: 21
  misc_feature: MA Experiment 20000265 PARAMETER Experiment Name: At_Open_Flower_P Parameter: Plant Line Value: WS
  misc_feature: MA Experiment 20000265 PARAMETER Experiment Name: At_Open_Flower_P Parameter: Tissue Value: Closed Flower vs. Whole Plant
  misc_feature: MA Experiment ID: 20000286 Result: Down-regulated in Transcription
  misc_feature: MA Experiment 20000286 PARAMETER Experiment Name: At_Open_Flower_P Parameter: Age (day) Value: 21
  misc_feature: MA Experiment 20000286 PARAMETER Experiment Name: At_Open_Flower_P Parameter: Plant Line Value: WS
  misc_feature: MA Experiment 20000286 PARAMETER Experiment Name: At_Open_Flower_P Parameter: Tissue Value: Half Open vs. Whole Plant
  misc_feature: MA Experiment ID: 20000573 Result: Up-regulated in Transcription
  misc_feature: MA Experiment 20000573 PARAMETER Experiment Name: At_100uM_ABA_Mutants__P Parameter: Organism Value: A. thaliana
  misc_feature: MA Experiment 20000573 PARAMETER Experiment Name: At_100uM_ABA_Mutants__P Parameter: Plant Line Value: CS22 vs. Ler wt
  misc_feature: MA Experiment 20000573 PARAMETER Experiment Name: At_100uM_ABA_Mutants__P Parameter: Timepoint (hr) Value: N/A
  misc_feature: MA Experiment 20000573 PARAMETER Experiment Name: At_100uM_ABA_Mutants__P Parameter: Tissue Value: Whole Plant
  misc_feature: MA Experiment 20000573 PARAMETER Experiment Name: At_100uM_ABA_Mutants__P Parameter: Treatment Value: None
  misc_feature: MA Experiment ID: 20000794 Result: Up-regulated in Transcription
  misc_feature: MA Experiment 20000794 PARAMETER Experiment Name: At_Petals_P Parameter: Age (day) Value: 23-25 days
  misc_feature: MA Experiment 20000794 PARAMETER Experiment Name: At_Petals_P Parameter: Plant Line Value: WS
  misc_feature: MA Experiment 20000794 PARAMETER Experiment Name: At_Petals_P Parameter: Tissue Value: Petals vs. Whole plant
  misc_feature: MA Experiment ID: 20001247 Result: Up-regulated in Transcription
  misc_feature: MA Experiment 20001247 PARAMETER Experiment Name: At_Far-red-induction_P Parameter: Age (day) Value: 7
  misc_feature: MA Experiment 20001247 PARAMETER Experiment Name: At_Far-red-induction_P Parameter: Light Value: Far-red vs. White
  misc_feature: MA Experiment 20001247 PARAMETER Experiment Name: At_Far-red-induction_P Parameter: Organism Value: A. thaliana
  misc_feature: MA Experiment 20001247 PARAMETER Experiment Name: At_Far-red-induction_P Parameter: Plant Line Value: Columbia
  misc_feature: MA Experiment 20001247 PARAMETER Experiment Name: At_Far-red-induction_P Parameter: Timepoint (hr) Value: 1
  misc_feature: MA Experiment 20001247 PARAMETER Experiment Name: At_Far-red-induction_P Parameter: Tissue Value: Whole Plant
  misc_feature: MA Experiment ID: 20001248 Result: Up-regulated in Transcription
  misc_feature: MA Experiment 20001248 PARAMETER Experiment Name: At_Far-red-induction_P Parameter: Age (day) Value: 7
  misc_feature: MA Experiment 20001248 PARAMETER Experiment Name: At_Far-red-induction_P Parameter: Light Value: Far-red vs. White
  misc_feature: MA Experiment 20001248 PARAMETER Experiment Name: At_Far-red-induction_P Parameter: Organism Value: A. thaliana
  misc_feature: MA Experiment 20001248 PARAMETER Experiment Name: At_Far-red-induction_P Parameter: Plant Line Value: Columbia
  misc_feature: MA Experiment 20001248 PARAMETER Experiment Name: At_Far-red-induction_P Parameter: Timepoint (hr) Value: 4
  misc_feature: MA Experiment 20001248 PARAMETER Experiment Name: At_Far-red-induction_P Parameter: Tissue Value: Whole Plant
  misc_feature: MA Experiment ID: 20001450 Result: Up-regulated in Transcription
  misc_feature: MA Experiment 20001450 PARAMETER Experiment Name: At_Far-red-induction_P Parameter: Age (day) Value: 7
  misc_feature: MA Experiment 20001450 PARAMETER Experiment Name: At_Far-red-induction_P Parameter: Light Value: Far-red vs. White
  misc_feature: MA Experiment 20001450 PARAMETER Experiment Name: At_Far-red-induction_P Parameter: Organism Value: A. thaliana
  misc_feature: MA Experiment 20001450 PARAMETER Experiment Name: At_Far-red-induction_P Parameter: Plant Line Value: Columbia
  misc_feature: MA Experiment 20001450 PARAMETER Experiment Name: At_Far-red-induction_P Parameter: Timepoint (hr) Value: 8
  misc_feature: MA Experiment 20001450 PARAMETER Experiment Name: At_Far-red-induction_P Parameter: Tissue Value: Whole Plant
  misc_feature: MA Experiment ID: 20001451 Result: Up-regulated in Transcription
  misc_feature: MA Experiment 20001451 PARAMETER Experiment Name: At_Far-red-induction_P Parameter: Age (day) Value: 7
  misc_feature: MA Experiment 20001451 PARAMETER Experiment Name: At_Far-red-induction_P Parameter: Light Value: Far-red vs. White
  misc_feature: MA Experiment 20001451 PARAMETER Experiment Name: At_Far-red-induction_P Parameter: Organism Value: A. thaliana
  misc_feature: MA Experiment 20001451 PARAMETER Experiment Name: At_Far-red-induction_P Parameter: Plant Line Value: Columbia
  misc_feature: MA Experiment 20001451 PARAMETER Experiment Name: At_Far-red-induction_P Parameter: Timepoint (hr) Value: 24
  misc_feature: MA Experiment 20001451 PARAMETER Experiment Name: At_Far-red-induction_P Parameter: Tissue Value: Whole Plant
  misc_feature: MA Experiment ID: 20001555 Result: Down-regulated in Transcription
  misc_feature: MA Experiment 20001555 PARAMETER Experiment Name: At_Drought_Soil_Dry_P Parameter: Age (day) Value: 24
  misc_feature: MA Experiment 20001555 PARAMETER Experiment Name: At_Drought_Soil_Dry_P Parameter: Organism Value: A. thaliana
  misc_feature: MA Experiment 20001555 PARAMETER Experiment Name: At_Drought_Soil_Dry_P Parameter: Plant Line Value: WS
  misc_feature: MA Experiment 20001555 PARAMETER Experiment Name: At_Drought_Soil_Dry_P Parameter: Post Timepoint (hr) Value: None
  misc_feature: MA Experiment 20001555 PARAMETER Experiment Name: At_Drought_Soil_Dry_P Parameter: Post-Treatment Value: None
  misc_feature: MA Experiment 20001555 PARAMETER Experiment Name: At_Drought_Soil_Dry_P Parameter: Timepoint (day) Value: 10
  misc_feature: MA Experiment 20001555 PARAMETER Experiment Name: At_Drought_Soil_Dry_P Parameter: Treatment Value: Drought vs. No Drought
  misc_feature: MA Experiment ID: 20001556 Result: Down-regulated in Transcription
  misc_feature: MA Experiment 20001556 PARAMETER Experiment Name: At_Drought_Soil_Dry_P Parameter: Age (day) Value: 26
  misc_feature: MA Experiment 20001556 PARAMETER Experiment Name: At_Drought_Soil_Dry_P Parameter: Organism Value: A. thaliana
  misc_feature: MA Experiment 20001556 PARAMETER Experiment Name: At_Drought_Soil_Dry_P Parameter: Plant Line Value: WS
  misc_feature: MA Experiment 20001556 PARAMETER Experiment Name: At_Drought_Soil_Dry_P Parameter: Post Timepoint (hr) Value: None
  misc_feature: MA Experiment 20001556 PARAMETER Experiment Name: At_Drought_Soil_Dry_P Parameter: Post-Treatment Value: None
  misc_feature: MA Experiment 20001556 PARAMETER Experiment Name: At_Drought_Soil_Dry_P Parameter: Timepoint (day) Value: 12
  misc_feature: MA Experiment 20001556 PARAMETER Experiment Name: At_Drought_Soil_Dry_P Parameter: Treatment Value: Drought vs. No Drought
  misc_feature: MA Experiment ID: 20001557 Result: Down-regulated in Transcription
  misc_feature: MA Experiment 20001557 PARAMETER Experiment Name: At_Drought_Soil_Dry_P Parameter: Age (day) Value: 27
  misc_feature: MA Experiment 20001557 PARAMETER Experiment Name: At_Drought_Soil_Dry_P Parameter: Organism Value: A. thaliana
  misc_feature: MA Experiment 20001557 PARAMETER Experiment Name: At_Drought_Soil_Dry_P Parameter: Plant Line Value: WS
  misc_feature: MA Experiment 20001557 PARAMETER Experiment Name: At_Drought_Soil_Dry_P Parameter: Post Timepoint (hr) Value: 3
  misc_feature: MA Experiment 20001557 PARAMETER Experiment Name: At_Drought_Soil_Dry_P Parameter: Post-Treatment Value: Re-Water vs. No Drought
  misc_feature: MA Experiment 20001557 PARAMETER Experiment Name: At_Drought_Soil_Dry_P Parameter: Timepoint (day) Value: 13
  misc_feature: MA Experiment 20001557 PARAMETER Experiment Name: At_Drought_Soil_Dry_P Parameter: Treatment Value: Drought vs. No Drought
  misc_feature: MA Experiment ID: 20001559 Result: Down-regulated in Transcription
  misc_feature: MA Experiment 20001559 PARAMETER Experiment Name: At_Drought_Soil_Dry_P Parameter: Age (day) Value: 28
  misc_feature: MA Experiment 20001559 PARAMETER Experiment Name: At_Drought_Soil_Dry_P Parameter: Organism Value: A. thaliana
  misc_feature: MA Experiment 20001559 PARAMETER Experiment Name: At_Drought_Soil_Dry_P Parameter: Plant Line Value: WS
  misc_feature: MA Experiment 20001559 PARAMETER Experiment Name: At_Drought_Soil_Dry_P Parameter: Post Timepoint (hr) Value: 29
  misc_feature: MA Experiment 20001559 PARAMETER Experiment Name: At_Drought_Soil_Dry_P Parameter: Post-Treatment Value: Re-Water vs. No Drought
  misc_feature: MA Experiment 20001559 PARAMETER Experiment Name: At_Drought_Soil_Dry_P Parameter: Timepoint (day) Value: 14
  misc_feature: MA Experiment 20001559 PARAMETER Experiment Name: At_Drought_Soil_Dry_P Parameter: Treatment Value: Drought vs. No Drought
aaagaaaaaggttcctttttttgactttgtatccgtagatcatcttcttcttcttcttccagagttttatccttatccgttccatcaaattctctctctaagcaaagatgaataaaggaagcatctttaagatggacaacgatttcgaaaagagaaaagctgaagctggaaggatcagggagaaataccctgatcgaattcctgtgattgtggaaaaggctgagaaaagtgaagtcccaaatatagacaagaagaagtaccttgtgccatcagacctaacagttggtcaatttgtgtatgtgattcggaagagaatcaaactaagtgcagagaaagctatcttcattttcgtagacaatgttcttcctccaacaggagagctaatgtcaagcgtttacgaggataagaaagacgaagatggcttcctttacatcacttacagtggcgagaacacattcggtgcttcttcaatctaatctctgacctctgagaatccgccacgttttaatgcttcttcccaactttcaatttgtgtgtatagtttgttctcaatatttatcatttctcaaataattgtgattactatcttcttttcacttgttaaaatgtacatagactaatcttataatattatcttcctttggtatt

SEQ ID NO: 44019 - protein, 122 aa, Arabidopsis thaliana
  peptide (1)..(122): Ceres Seq. ID no. 13580562
  misc_feature (15)..(118): Pfam Name: Microtubule associated protein 1A/1B, light chain 3 Pfam Description: Microtubule associated protein 1A/1B, light
  misc_feature (5)..(118): Homolog of NCBI NO: 15220686 NR Description: symbiosis-related protein -related [Arabidopsis
  misc_feature (5)..(118): Homolog of NCBI NO: 21592920 NR Description: putative microtubule-associated protein
  misc_feature (1)..(118): Homolog of NCBI NO: 38344173 NR Description: OSJNBa0053K19.12 [Oryza sativa (japonica
  misc_feature (5)..(118): Homolog of NCBI NO: 40253647 NR Description: putative microtubial binding protein
  misc_feature (1)..(119): Homolog of NCBI NO: 34595981 NR Description: microtubule-associated protein 1 light chain 3
  misc_feature (7)..(120): Homolog of NCBI NO: 15232387 NR Description: (AtAPG8g) autophagy 8g protein [Arabidopsis
  misc_feature (5)..(118): Homolog of NCBI NO: 21615419 NR Description: microtubule associated protein [Cicer arietinum]
  misc_feature (1)..(121): Homolog of NCBI NO: 18414683 NR Description: symbiosis-related like protein [Arabidopsis
  misc_feature (1)..(122): Homolog of NCBI NO: 15225418 NR Description: microtubule-associated protein -related
  misc_feature (1)..(122): Homolog of NCBI NO: 15724332 NR Description: At2g45170/T14P1.2 [Arabidopsis thaliana]
MNKGSIFKMDNDFEKRKAEAGRIREKYPDRIPVIVEKAEKSEVPNIDKKKYLVPSDLTVGQFVYVIRKRIKLSAEKAIFIFVDNVLPPTGELMSSVYEDKKDEDGFLYITYSGENTFGASSI

SEQ ID NO: 44020 - protein, 114 aa, Arabidopsis thaliana
  peptide (1)..(114): Ceres Seq. ID no. 13580563
  misc_feature (7)..(110): Pfam Name: Microtubule associated protein 1A/1B, light chain 3 Pfam Description: Microtubule associated protein 1A/1B, light
  misc_feature (1)..(110): Homolog of NCBI NO: 15220686 NR Description: symbiosis-related protein -related [Arabidopsis
  misc_feature (1)..(110): Homolog of NCBI NO: 21592920 NR Description: putative microtubule-associated protein
  misc_feature (1)..(110): Homolog of NCBI NO: 38344173 NR Description: OSJNBa0053K19.12 [Oryza sativa (japonica
  misc_feature (1)..(110): Homolog of NCBI NO: 40253647 NR Description: putative microtubial binding protein
  misc_feature (1)..(111): Homolog of NCBI NO: 34595981 NR Description: microtubule-associated protein 1 light chain 3
  misc_feature (1)..(112): Homolog of NCBI NO: 15232387 NR Description: (AtAPG8g) autophagy 8g protein [Arabidopsis
  misc_feature (1)..(110): Homolog of NCBI NO: 21615419 NR Description: microtubule associated protein [Cicer arietinum]
  misc_feature (1)..(113): Homolog of NCBI NO: 18414683 NR Description: symbiosis-related like protein [Arabidopsis
  misc_feature (1)..(114): Homolog of NCBI NO: 15225418 NR Description: microtubule-associated protein -related
  misc_feature (1)..(114): Homolog of NCBI NO: 15724332 NR Description: At2g45170/T14P1.2 [Arabidopsis thaliana]
MDNDFEKRKAEAGRIREKYPDRIPVIVEKAEKSEVPNIDKKKYLVPSDLTVGQFVYVIRKRIKLSAEKAIFIFVDNVLPPTGELMSSVYEDKKDEDGFLYITYSGENTFGASSI

SEQ ID NO: 44021 - DNA, 1445 bp, Arabidopsis thaliana; identical to SEQ ID NO: 23722
  misc_feature (1)..(1445): Ceres Seq. ID no. 13509190
  misc_feature: MA Experiment ID: 20000180 Result: Down-regulated in Transcription
  misc_feature: MA Experiment 20000180 PARAMETER Experiment Name: At_Germinating_Seeds_P Parameter: Age (hr) Value: 24 vs. 0
  misc_feature: MA Experiment 20000180 PARAMETER Experiment Name: At_Germinating_Seeds_P Parameter: Tissue Value: Germinating Seeds
  misc_feature: MA Experiment ID: 20000235 Result: Up-regulated in Transcription
  misc_feature: MA Experiment 20000235 PARAMETER Experiment Name: At_Siliques_P Parameter: Age (day) Value: 21
  misc_feature: MA Experiment 20000235 PARAMETER Experiment Name: At_Siliques_P Parameter: Organism Value: A. thaliana
  misc_feature: MA Experiment 20000235 PARAMETER Experiment Name: At_Siliques_P Parameter: Plant Line Value: WS
  misc_feature: MA Experiment 20000235 PARAMETER Experiment Name: At_Siliques_P Parameter: Tissue Value: 5-10mm Siliques vs. Whole Plant
  misc_feature: MA Experiment ID: 20000527 Result: Down-regulated in Transcription
  misc_feature: MA Experiment 20000527 PARAMETER Experiment Name: At_10percent_PEG_P Parameter: Age (day) Value: 20
  misc_feature: MA Experiment 20000527 PARAMETER Experiment Name: At_10percent_PEG_P Parameter: Organism Value: A. thaliana
  misc_feature: MA Experiment 20000527 PARAMETER Experiment Name: At_10percent_PEG_P Parameter: Plant Line Value: WS
  misc_feature: MA Experiment 20000527 PARAMETER Experiment Name: At_10percent_PEG_P Parameter: Timepoint (day) Value: 20
  misc_feature: MA Experiment 20000527 PARAMETER Experiment Name: At_10percent_PEG_P Parameter: Tissue Value: Whole Plant
  misc_feature: MA Experiment 20000527 PARAMETER Experiment Name: At_10percent_PEG_P Parameter: Treatment Value: 10percent PEG vs. No Treatment
  misc_feature: MA Experiment ID: 20000794 Result: Down-regulated in Transcription
  misc_feature: MA Experiment 20000794 PARAMETER Experiment Name: At_Petals_P Parameter: Age (day) Value: 23-25 days
  misc_feature: MA Experiment 20000794 PARAMETER Experiment Name: At_Petals_P Parameter: Plant Line Value: WS
  misc_feature: MA Experiment 20000794 PARAMETER Experiment Name: At_Petals_P Parameter: Tissue Value: Petals vs. Whole plant
  misc_feature: MA Experiment ID: 20001555 Result: Down-regulated in Transcription
  misc_feature: MA Experiment 20001555 PARAMETER Experiment Name: At_Drought_Soil_Dry_P Parameter: Age (day) Value: 24
  misc_feature: MA Experiment 20001555 PARAMETER Experiment Name: At_Drought_Soil_Dry_P Parameter: Organism Value: A. thaliana
  misc_feature: MA Experiment 20001555 PARAMETER Experiment Name: At_Drought_Soil_Dry_P Parameter: Plant Line Value: WS
  misc_feature: MA Experiment 20001555 PARAMETER Experiment Name: At_Drought_Soil_Dry_P Parameter: Post Timepoint (hr) Value: None
  misc_feature: MA Experiment 20001555 PARAMETER Experiment Name: At_Drought_Soil_Dry_P Parameter: Post-Treatment Value: None
  misc_feature: MA Experiment 20001555 PARAMETER Experiment Name: At_Drought_Soil_Dry_P Parameter: Timepoint (day) Value: 10
  misc_feature: MA Experiment 20001555 PARAMETER Experiment Name: At_Drought_Soil_Dry_P Parameter: Treatment Value: Drought vs. No Drought

SEQ ID NO: 44022 - protein, 386 aa, Arabidopsis thaliana; identical to SEQ ID NO: 23723
  peptide (1)..(386): Ceres Seq. ID no. 13509191
  misc_feature (85)..(329): Pfam Name: Fatty acid desaturase Pfam Description: Fatty acid desaturase
  misc_feature (85)..(329): Pfam Name: Fatty acid desaturase Pfam Description: Fatty acid desaturase
  misc_feature (1)..(275): Homolog of NCBI NO: 30684423 NR Description: omega-3 fatty acid desaturase, endoplasmic
  misc_feature (11)..(386): Homolog of NCBI NO: 4091113 NR Description: omega-3 fatty acid desaturase [Vernicia fordii]
  misc_feature (22)..(383): Homolog of NCBI NO: 23345025 NR Description: microsomal omega-3 fatty acid desaturase [Betula
  misc_feature (26)..(385): Homolog of NCBI NO: 3133289 NR Description: omega-3 desaturase [Pelargonium x hortorum]
  misc_feature (1)..(275): Homolog of NCBI NO: 30684423 NR Description: omega-3 fatty acid desaturase, endoplasmic
  misc_feature (22)..(383): Homolog of NCBI NO: 23345025 NR Description: microsomal omega-3 fatty acid desaturase [Betula
  misc_feature (37)..(338): Homolog of NCBI NO: 15811218 NR Description: omega-3 fatty acid desaturase [Brassica rapa
  misc_feature (1)..(386): Homolog of NCBI NO: 1345967 NR Description: Omega-3 fatty acid desaturase, endoplasmic
  misc_feature (1)..(386): Homolog of NCBI NO: 15227683 NR Description: omega-3 fatty acid desaturase, endoplasmic
  misc_feature (1)..(386): Homolog of NCBI NO: 541915 NR Description: omega-3 fatty acid desaturase (EC 1.14.99.-) BN3
  misc_feature (26)..(385): Homolog of NCBI NO: 3133289 NR Description: omega-3 desaturase [Pelargonium x hortorum]
  misc_feature (11)..(386): Homolog of NCBI NO: 4091113 NR Description: omega-3 fatty acid desaturase [Vernicia fordii]
  misc_feature (37)..(338): Homolog of NCBI NO: 15811218 NR Description: omega-3 fatty acid desaturase [Brassica rapa
  misc_feature (1)..(386): Homolog of NCBI NO: 541915 NR Description: omega-3 fatty acid desaturase (EC 1.14.99.-) BN3
  misc_feature (1)..(386): Homolog of NCBI NO: 1345967 NR Description: Omega-3 fatty acid desaturase, endoplasmic
  misc_feature (1)..(386): Homolog of NCBI NO: 15227683 NR Description: omega-3 fatty acid desaturase, endoplasmic

SEQ ID NO: 44023 - protein, 382 aa, Arabidopsis thaliana; identical to SEQ ID NO: 23724
  peptide (1)..(382): Ceres Seq. ID no. 13509192
  misc_feature (81)..(325): Pfam Name: Fatty acid desaturase Pfam Description: Fatty acid desaturase
  misc_feature (81)..(325): Pfam Name: Fatty acid desaturase Pfam Description: Fatty acid desaturase
  misc_feature (1)..(271): Homolog of NCBI NO: 30684423 NR Description: omega-3 fatty acid desaturase, endoplasmic
  misc_feature (7)..(382): Homolog of NCBI NO: 4091113 NR Description: omega-3 fatty acid desaturase [Vernicia fordii]
  misc_feature (18)..(379): Homolog of NCBI NO: 23345025 NR Description: microsomal omega-3 fatty acid desaturase [Betula
  misc_feature (22)..(381): Homolog of NCBI NO: 3133289 NR Description: omega-3 desaturase [Pelargonium x hortorum]
  misc_feature (1)..(271): Homolog of NCBI NO: 30684423 NR Description: omega-3 fatty acid desaturase, endoplasmic
  misc_feature (18)..(379): Homolog of NCBI NO: 23345025 NR Description: microsomal omega-3 fatty acid desaturase [Betula
  misc_feature (33)..(334): Homolog of NCBI NO: 15811218 NR Description: omega-3 fatty acid desaturase [Brassica rapa
  misc_feature (1)..(382): Homolog of NCBI NO: 1345967 NR Description: Omega-3 fatty acid desaturase, endoplasmic
  misc_feature (1)..(382): Homolog of NCBI NO: 15227683 NR Description: omega-3 fatty acid desaturase, endoplasmic
  misc_feature (1)..(382): Homolog of NCBI NO: 541915 NR Description: omega-3 fatty acid desaturase (EC 1.14.99.-) BN3
  misc_feature (22)..(381): Homolog of NCBI NO: 3133289 NR Description: omega-3 desaturase [Pelargonium x hortorum]
  misc_feature (7)..(382): Homolog of NCBI NO: 4091113 NR Description: omega-3 fatty acid desaturase [Vernicia fordii]
  misc_feature (33)..(334): Homolog of NCBI NO: 15811218 NR Description: omega-3 fatty acid desaturase [Brassica rapa
  misc_feature (1)..(382): Homolog of NCBI NO: 541915 NR Description: omega-3 fatty acid desaturase (EC 1.14.99.-) BN3
  misc_feature (1)..(382): Homolog of NCBI NO: 1345967 NR Description: Omega-3 fatty acid desaturase, endoplasmic
  misc_feature (1)..(382): Homolog of NCBI NO: 15227683 NR Description: omega-3 fatty acid desaturase, endoplasmic

SEQ ID NO: 44024 - protein, 331 aa, Arabidopsis thaliana; identical to SEQ ID NO: 23725
  peptide (1)..(331): Ceres Seq. ID no. 13509193
  misc_feature (30)..(274): Pfam Name: Fatty acid desaturase Pfam Description: Fatty acid desaturase
  misc_feature (30)..(274): Pfam Name: Fatty acid desaturase Pfam Description: Fatty acid desaturase
  misc_feature (1)..(220): Homolog of NCBI NO: 30684423 NR Description: omega-3 fatty acid desaturase, endoplasmic
  misc_feature (1)..(331): Homolog of NCBI NO: 4091113 NR Description: omega-3 fatty acid desaturase [Vernicia fordii]
  misc_feature (1)..(328): Homolog of NCBI NO: 23345025 NR Description: microsomal omega-3 fatty acid desaturase [Betula
  misc_feature (1)..(330): Homolog of NCBI NO: 3133289 NR Description: omega-3 desaturase [Pelargonium x hortorum]
  misc_feature (1)..(220): Homolog of NCBI NO: 30684423 NR Description: omega-3 fatty acid desaturase, endoplasmic
  misc_feature (1)..(328): Homolog of NCBI NO: 23345025 NR Description: microsomal omega-3 fatty acid desaturase [Betula
  misc_feature (1)..(283): Homolog of NCBI NO: 15811218 NR Description: omega-3 fatty acid desaturase [Brassica rapa
  misc_feature (1)..(331): Homolog of NCBI NO: 1345967 NR Description: Omega-3 fatty acid desaturase, endoplasmic
  misc_feature (1)..(331): Homolog of NCBI NO: 15227683 NR Description: omega-3 fatty acid desaturase, endoplasmic
  misc_feature (1)..(331): Homolog of NCBI NO: 541915 NR Description: omega-3 fatty acid desaturase (EC 1.14.99.-) BN3
  misc_feature (1)..(330): Homolog of NCBI NO: 3133289 NR Description: omega-3 desaturase [Pelargonium x hortorum]
  misc_feature (1)..(331): Homolog of NCBI NO: 4091113 NR Description: omega-3 fatty acid desaturase [Vernicia fordii]
  misc_feature (1)..(283): Homolog of NCBI NO: 15811218 NR Description: omega-3 fatty acid desaturase [Brassica rapa
  misc_feature (1)..(331): Homolog of NCBI NO: 541915 NR Description: omega-3 fatty acid desaturase (EC 1.14.99.-) BN3
  misc_feature (1)..(331): Homolog of NCBI NO: 1345967 NR Description: Omega-3 fatty acid desaturase, endoplasmic
  misc_feature (1)..(331): Homolog of NCBI NO: 15227683 NR Description: omega-3 fatty acid desaturase, endoplasmic

SEQ ID NO: 44025 - DNA, 1588 bp, Arabidopsis thaliana
  misc_feature (1)..(1588): Ceres Seq. ID no. 12489381
  misc_feature: MA Experiment ID: 20000179 Result: Down-regulated in Transcription
  misc_feature: MA Experiment 20000179 PARAMETER Experiment Name: At_Germinating_Seeds_P Parameter: Age (hr) Value: 6 vs. 0
  misc_feature: MA Experiment 20000179 PARAMETER Experiment Name: At_Germinating_Seeds_P Parameter: Tissue Value: Germinating Seeds
  misc_feature: MA Experiment ID: 20000180 Result: Down-regulated in Transcription
  misc_feature: MA Experiment 20000180 PARAMETER Experiment Name: At_Germinating_Seeds_P Parameter: Age (hr) Value: 24 vs. 0
  misc_feature: MA Experiment 20000180 PARAMETER Experiment Name: At_Germinating_Seeds_P Parameter: Tissue Value: Germinating Seeds
  misc_feature: MA Experiment ID: 20000182 Result: Up-regulated in Transcription
  misc_feature: MA Experiment 20000182 PARAMETER Experiment Name: At_2mM_SA_P Parameter: Age (day) Value: 14
  misc_feature: MA Experiment 20000182 PARAMETER Experiment Name: At_2mM_SA_P Parameter: Organism Value: A. thaliana
  misc_feature: MA Experiment 20000182 PARAMETER Experiment Name: At_2mM_SA_P Parameter: Plant Line Value: WS
  misc_feature: MA Experiment 20000182 PARAMETER Experiment Name: At_2mM_SA_P Parameter: Timepoint (hr) Value: 6
  misc_feature: MA Experiment 20000182 PARAMETER Experiment Name: At_2mM_SA_P Parameter: Tissue Value: Aerial
  misc_feature: MA Experiment 20000182 PARAMETER Experiment Name: At_2mM_SA_P Parameter: Treatment Value: 2mM SA vs. No Treatment
  misc_feature: MA Experiment ID: 20000264 Result: Up-regulated in Transcription
  misc_feature: MA Experiment 20000264 PARAMETER Experiment Name: At_Open_Flower_P Parameter: Age (day) Value: 21
  misc_feature: MA Experiment 20000264 PARAMETER Experiment Name: At_Open_Flower_P Parameter: Plant Line Value: WS
  misc_feature: MA Experiment 20000264 PARAMETER Experiment Name: At_Open_Flower_P Parameter: Tissue Value: Open Flower vs. Whole Plant
  misc_feature: MA Experiment ID: 20000437 Result: Down-regulated in Transcription
  misc_feature: MA Experiment 20000437 PARAMETER Experiment Name: At_Drought_P Parameter: Age (day) Value: 8
  misc_feature: MA Experiment 20000437 PARAMETER Experiment Name: At_Drought_P Parameter: Organism Value: A. thaliana
  misc_feature: MA Experiment 20000437 PARAMETER Experiment Name: At_Drought_P Parameter: Plant Line Value: WS
  misc_feature: MA Experiment 20000437 PARAMETER Experiment Name: At_Drought_P Parameter: Timepoint (hr) Value: 24
  misc_feature: MA Experiment 20000437 PARAMETER Experiment Name: At_Drought_P Parameter: Tissue Value: Whole Plant
  misc_feature: MA Experiment 20000437 PARAMETER Experiment Name: At_Drought_P Parameter: Treatment Value: Drought vs. No Drought
  misc_feature: MA Experiment ID: 20000441 Result: Up-regulated in Transcription
  misc_feature: MA Experiment 20000441 PARAMETER Experiment Name: At_1uM_BR-BRZ__P Parameter: Tissue Value: Shoot Apices
  misc_feature: MA Experiment 20000441 PARAMETER Experiment Name: At_1uM_BR-BRZ__P Parameter: Treatment Value: 1uM BR vs. No Treatment
  misc_feature: MA Experiment ID: 20000443 Result: Up-regulated in Transcription
  misc_feature: MA Experiment 20000443 PARAMETER Experiment Name: At_1uM_BR-BRZ__P Parameter: Tissue Value: Shoot Apices
  misc_feature: MA Experiment 20000443 PARAMETER Experiment Name: At_1uM_BR-BRZ__P Parameter: Treatment Value: 1uM BRZ vs. No Treatment
  misc_feature: MA Experiment ID: 20000527 Result: Down-regulated in Transcription
  misc_feature: MA Experiment 20000527 PARAMETER Experiment Name: At_10percent_PEG_P Parameter: Age (day) Value: 20
  misc_feature: MA Experiment 20000527 PARAMETER Experiment Name: At_10percent_PEG_P Parameter: Organism Value: A. thaliana
  misc_feature: MA Experiment 20000527 PARAMETER Experiment Name: At_10percent_PEG_P Parameter: Plant Line Value: WS
  misc_feature: MA Experiment 20000527 PARAMETER Experiment Name: At_10percent_PEG_P Parameter: Timepoint (day) Value: 20
  misc_feature: MA Experiment 20000527 PARAMETER Experiment Name: At_10percent_PEG_P Parameter: Tissue Value: Whole Plant
  misc_feature: MA Experiment 20000527 PARAMETER Experiment Name: At_10percent_PEG_P Parameter: Treatment Value: 10percent PEG vs. No Treatment
  misc_feature: MA Experiment ID: 20000709 Result: Up-regulated in Transcription
  misc_feature: MA Experiment 20000709 PARAMETER Experiment Name: At_15mM_NH4NO3_L-to-H_P Parameter: Age (hr) Value: 14
  misc_feature: MA Experiment 20000709 PARAMETER Experiment Name: At_15mM_NH4NO3_L-to-H_P Parameter: Organism Value: A. thaliana
  misc_feature: MA Experiment 20000709 PARAMETER Experiment Name: At_15mM_NH4NO3_L-to-H_P Parameter: Plant Line Value: WS
  misc_feature: MA Experiment 20000709 PARAMETER Experiment Name: At_15mM_NH4NO3_L-to-H_P Parameter: Timepoint (hr) Value: 4
  misc_feature: MA Experiment 20000709 PARAMETER Experiment Name: At_15mM_NH4NO3_L-to-H_P Parameter: Tissue Value: Aerial
  misc_feature: MA Experiment 20000709 PARAMETER Experiment Name: At_15mM_NH4NO3_L-to-H_P Parameter: Treatment Value: 15mM NH4NO3 vs. 30mM Mannitol
  misc_feature: MA Experiment ID: 20000794 Result: Up-regulated in Transcription
  misc_feature: MA Experiment 20000794 PARAMETER Experiment Name: At_Petals_P Parameter: Age (day) Value: 23-25 days
  misc_feature: MA Experiment 20000794 PARAMETER Experiment Name: At_Petals_P Parameter: Plant Line Value: WS
  misc_feature: MA Experiment 20000794 PARAMETER Experiment Name: At_Petals_P Parameter: Tissue Value: Petals vs. Whole plant
  misc_feature: MA Experiment ID: 20001556 Result: Down-regulated in Transcription
  misc_feature: MA Experiment 20001556 PARAMETER Experiment Name: At_Drought_Soil_Dry_P Parameter: Age (day) Value: 26
  misc_feature: MA Experiment 20001556 PARAMETER Experiment Name: At_Drought_Soil_Dry_P Parameter: Organism Value: A. thaliana
  misc_feature: MA Experiment 20001556 PARAMETER Experiment Name: At_Drought_Soil_Dry_P Parameter: Plant Line Value: WS
  misc_feature: MA Experiment 20001556 PARAMETER Experiment Name: At_Drought_Soil_Dry_P Parameter: Post Timepoint (hr) Value: None
  misc_feature: MA Experiment 20001556 PARAMETER Experiment Name: At_Drought_Soil_Dry_P Parameter: Post-Treatment Value: None
  misc_feature: MA Experiment 20001556 PARAMETER Experiment Name: At_Drought_Soil_Dry_P Parameter: Timepoint (day) Value: 12
  misc_feature: MA Experiment 20001556 PARAMETER Experiment Name: At_Drought_Soil_Dry_P Parameter: Treatment Value: Drought vs. No Drought
  misc_feature: MA Experiment ID: 20001559 Result: Down-regulated in Transcription
  misc_feature: MA Experiment 20001559 PARAMETER Experiment Name: At_Drought_Soil_Dry_P Parameter: Age (day) Value: 28
  misc_feature: MA Experiment 20001559 PARAMETER Experiment Name: At_Drought_Soil_Dry_P Parameter: Organism Value: A. thaliana
  misc_feature: MA Experiment 20001559 PARAMETER Experiment Name: At_Drought_Soil_Dry_P Parameter: Plant Line Value: WS
  misc_feature: MA Experiment 20001559 PARAMETER Experiment Name: At_Drought_Soil_Dry_P Parameter: Post Timepoint (hr) Value: 29
  misc_feature: MA Experiment 20001559 PARAMETER Experiment Name: At_Drought_Soil_Dry_P Parameter: Post-Treatment Value: Re-Water vs. No Drought
  misc_feature: MA Experiment 20001559 PARAMETER Experiment Name: At_Drought_Soil_Dry_P Parameter: Timepoint (day) Value: 14
  misc_feature: MA Experiment 20001559 PARAMETER Experiment Name: At_Drought_Soil_Dry_P Parameter: Treatment Value: Drought vs. No Drought
acaacaccaaccaataattaaacaaatggccaacaacaattccaactctcccaccggtccacactttctattcgtaacatttccagcccaaggtcacatcaacccatctctcgagctagccaaacgcctcgccggaacaatctctggtgctcgagtcaccttcgccgcctcaatctctgcctacaaccgccgcatgttctctacagaaaacgtccccgaaaccctaatcttcgctacctactccgatggccacgacgacggtttcaaatcctctgcttactccgacaaatctcgtcaagacgccactggaaacttcatgtctgagatgagacgacgtggcaaagagacactaaccgaactaatcgaagataaccggaaacaaaacaggccttttacttgcgtggtttacacgattctcctcacttgggtcgctgagctagcgcgtgagtttcatcttccttctgctcttctttgggtccaaccagtaacagtcttctccattttttaccattacttcaatggctacgaagatgcaatctcagagatggctaataccccctctagttctattaaattaccttctctgccactgcttactgtccgtgatattccttctttcattgtctcttccaatgtctacgcgtttcttctacccgcgtttcgagaacagattgattcactgaaggaagaaataaaccctaagatcctcatcaacactttccaagagcttgagccagaagccatgagctcggttccagataatttcaagattgtccctgtcggtccgttactaacgttgagaacggatttttcgagtcgcggtgaatacatagagtggttggatactaaagcggattcgtctgtgctttatgtttcgttcgggacgcttgccgtgttgagcaagaaacagcttgtggagctttgtaaagcgttgatacaaagtcggagaccattcttgtgggtgattacggataagtcgtacagaaataaagaagatgagcaagagaaggaagaagattgcataagtagtttcagagaagagctcgatgagataggaatggtggtttcatggtgtgatcagtttagggttttgaatcatagatcgataggttgtttcgtgacgcattgcgggtggaactctacgctggagagcttggtttcaggagttccggtggtggcgtttccgcaatggaatgatcagatgatgaacgcgaagcttttagaagattgttggaaaacaggtgtaagagtgatggagaagaaggaagaagaaggagttgtggtggtggatagtgaggagatacggcggtgcattgaggaagttatggaagacaaggcggaggagtttagaggaaatgccacgaggtggaaggatttagcggcggaggctgtgagagaaggaggctcttcctttaatcatctcaaagcttttgtcgatgagcacatgtgattttggtatcagaaattataacaacactccgcttttctgttcttccttgctctgtttcaatgtttacacaatacagtagacagtattttggatgttgattggttagttttgaagatgatgaaatgtaatttattcaag

SEQ ID NO: 44026 - protein, 482 aa, Arabidopsis thaliana
  peptide (1)..(482): Ceres Seq. ID no. 12489382
  misc_feature (8)..(480): Homolog of NCBI NO: 18491183 NR Description: putative glucosyltransferase [Arabidopsis
  misc_feature (20)..(480): Homolog of NCBI NO: 6683052 NR Description: anthocyanin 5-O-glucosyltransferase [Petunia x
  misc_feature (20)..(478): Homolog of NCBI NO: 15220556 NR Description: UDP-glycosyltransferase family; protein id:
  misc_feature (20)..(480): Homolog of NCBI NO: 18390540 NR Description: UDP-glucose transferase(UGT1)
  misc_feature (20)..(480): Homolog of NCBI NO: 14192682 NR Description: cold-induced glucosyl transferase [Solanum
  misc_feature (20)..(480): Homolog of NCBI NO: 20146093 NR Description: glucosyltransferase NTGT2 [Nicotiana tabacum]
  misc_feature (65)..(482): Homolog of NCBI NO: 16604440 NR Description: AT4g15550/dl3815c [Arabidopsis thaliana]
  misc_feature (9)..(482): Homolog of NCBI NO: 7433892 NR Description: hypothetical protein - Arabidopsis thaliana
  misc_feature (9)..(482): Homolog of NCBI NO: 2149127 NR Description: UDP-glucose:indole-3-acetate
  misc_feature (9)..(482): Homolog of NCBI NO: 18414478 NR Description: glucosyltransferase like protein
QHQPIIKQMANNNSNSPTGPHFLFVTFPAQGHINPSLELAKRLAGTISGARVTFAASISAYNRRMFSTENVPETLIFATYSDGHDDGFKSSAYSDKSRQDATGNFMSEMRRRGKETLTELIEDNRKQNRPFTCVVYTILLTWVAELAREFHLPSALLWVQPVTVFSIFYHYFNGYEDAISEMANTPSSSIKLPSLPLLTVRDIPSFIVSSNVYAFLLPAFREQIDSLKEEINPKILINTFQELEPEAMSSVPDNFKIVPVGPLLTLRTDFSSRGEYIEWLDTKADSSVLYVSFGTLAVLSKKQLVELCKALIQSRRPFLWVITDKSYRNKEDEQEKEEDCISSFREELDEIGMVVSWCDQFRVLNHRSIGCFVTHCGWNSTLESLVSGVPVVAFPQWNDQMMNAKLLEDCWKTGVRVMEKKEEEGVVVVDSEEIRRCIEEVMEDKAEEFRGNATRWKDLAAEAVREGGSSFNHLKAFVDEHM

SEQ ID NO: 44027 - protein, 474 aa, Arabidopsis thaliana
  peptide (1)..(474): Ceres Seq. ID no. 12489383
  misc_feature (1)..(472): Homolog of NCBI NO: 18491183 NR Description: putative glucosyltransferase [Arabidopsis
  misc_feature (12)..(472): Homolog of NCBI NO: 6683052 NR Description: anthocyanin 5-O-glucosyltransferase [Petunia x
  misc_feature (12)..(470): Homolog of NCBI NO: 15220556 NR Description: UDP-glycosyltransferase family; protein id:
  misc_feature (12)..(472): Homolog of NCBI NO: 18390540 NR Description: UDP-glucose transferase(UGT1)
  misc_feature (12)..(472): Homolog of NCBI NO: 14192682 NR Description: cold-induced glucosyl transferase [Solanum
  misc_feature (12)..(472): Homolog of NCBI NO: 20146093 NR Description: glucosyltransferase NTGT2 [Nicotiana tabacum]
  misc_feature (57)..(474): Homolog of NCBI NO: 16604440 NR Description: AT4g15550/dl3815c [Arabidopsis thaliana]
  misc_feature (1)..(474): Homolog of NCBI NO: 7433892 NR Description: hypothetical protein - Arabidopsis thaliana
  misc_feature (1)..(474): Homolog of NCBI NO: 2149127 NR Description: UDP-glucose:indole-3-acetate
  misc_feature (1)..(474): Homolog of NCBI NO: 18414478 NR Description: glucosyltransferase like protein
MANNNSNSPTGPHFLFVTFPAQGHINPSLELAKRLAGTISGARVTFAASISAYNRRMFSTENVPETLIFATYSDGHDDGFKSSAYSDKSRQDATGNFMSEMRRRGKETLTELIEDNRKQNRPFTCVVYTILLTWVAELAREFHLPSALLWVQPVTVFSIFYHYFNGYEDAISEMANTPSSSIKLPSLPLLTVRDIPSFIVSSNVYAFLLPAFREQIDSLKEEINPKILINTFQELEPEAMSSVPDNFKIVPVGPLLTLRTDFSSRGEYIEWLDTKADSSVLYVSFGTLAVLSKKQLVELCKALIQSRRPFLWVITDKSYRNKEDEQEKEEDCISSFREELDEIGMVVSWCDQFRVLNHRSIGCFVTHCGWNSTLESLVSGVPVVAFPQWNDQMMNAKLLEDCWKTGVRVMEKKEEEGVVVVDSEEIRRCIEEVMEDKAEEFRGNATRWKDLAAEAVREGGSSFNHLKAFVDEHM

SEQ ID NO: 44028 - protein, 418 aa, Arabidopsis thaliana
  peptide (1)..(418): Ceres Seq. ID no. 12489384
  misc_feature (1)..(416): Homolog of NCBI NO: 18491183 NR Description: putative glucosyltransferase [Arabidopsis
  misc_feature (1)..(416): Homolog of NCBI NO: 6683052 NR Description: anthocyanin 5-O-glucosyltransferase [Petunia x
  misc_feature (1)..(414): Homolog of NCBI NO: 15220556 NR Description: UDP-glycosyltransferase family; protein id:
  misc_feature (1)..(416): Homolog of NCBI NO: 18390540 NR Description: UDP-glucose transferase(UGT1)
  misc_feature (1)..(416): Homolog of NCBI NO: 14192682 NR Description: cold-induced glucosyl transferase [Solanum
  misc_feature (1)..(416): Homolog of NCBI NO: 20146093 NR Description: glucosyltransferase NTGT2 [Nicotiana tabacum]
  misc_feature (1)..(418): Homolog of NCBI NO: 16604440 NR Description: AT4g15550/dl3815c [Arabidopsis thaliana]
  misc_feature (1)..(418): Homolog of NCBI NO: 7433892 NR Description: hypothetical protein - Arabidopsis thaliana
  misc_feature (1)..(418): Homolog of NCBI NO: 2149127 NR Description: UDP-glucose:indole-3-acetate
  misc_feature (1)..(418): Homolog of NCBI NO: 18414478 NR Description: glucosyltransferase like protein
MFSTENVPETLIFATYSDGHDDGFKSSAYSDKSRQDATGNFMSEMRRRGKETLTELIEDNRKQNRPFTCVVYTILLTWVAELAREFHLPSALLWVQPVTVFSIFYHYFNGYEDAISEMANTPSSSIKLPSLPLLTVRDIPSFIVSSNVYAFLLPAFREQIDSLKEEINPKILINTFQELEPEAMSSVPDNFKIVPVGPLLTLRTDFSSRGEYIEWLDTKADSSVLYVSFGTLAVLSKKQLVELCKALIQSRRPFLWVITDKSYRNKEDEQEKEEDCISSFREELDEIGMVVSWCDQFRVLNHRSIGCFVTHCGWNSTLESLVSGVPVVAFPQWNDQMMNAKLLEDCWKTGVRVMEKKEEEGVVVVDSEEIRRCIEEVMEDKAEEFRGNATRWKDLAAEAVREGGSSFNHLKAFVDEHM

SEQ ID NO: 44029 - DNA, 2421 bp, Arabidopsis thaliana
  misc_feature (1)..(2421): Ceres Seq. ID no. 13494625
  misc_feature: MA Experiment ID: 20000179 Result: Down-regulated in Transcription
  misc_feature: MA Experiment 20000179 PARAMETER Experiment Name: At_Germinating_Seeds_P Parameter: Age (hr) Value: 6 vs. 0
  misc_feature: MA Experiment 20000179 PARAMETER Experiment Name: At_Germinating_Seeds_P Parameter: Tissue Value: Germinating Seeds
  misc_feature: MA Experiment ID: 20001451 Result: Down-regulated in Transcription
  misc_feature: MA Experiment 20001451 PARAMETER Experiment Name: At_Far-red-induction_P Parameter: Age (day) Value: 7
  misc_feature: MA Experiment 20001451 PARAMETER Experiment Name: At_Far-red-induction_P Parameter: Light Value: Far-red vs. White
  misc_feature: MA Experiment 20001451 PARAMETER Experiment Name: At_Far-red-induction_P Parameter: Organism Value: A. thaliana
  misc_feature: MA Experiment 20001451 PARAMETER Experiment Name: At_Far-red-induction_P Parameter: Plant Line Value: Columbia
  misc_feature: MA Experiment 20001451 PARAMETER Experiment Name: At_Far-red-induction_P Parameter: Timepoint (hr) Value: 24
  misc_feature: MA Experiment 20001451 PARAMETER Experiment Name: At_Far-red-induction_P Parameter: Tissue Value: Whole Plant
atggctgagtgcagcgtatgtcgttcaaggttggtttctcccagtagcaaagctatttcaagggcttatgacaactacaactacaagattagagtatcctcaaaacaacgagctctcaatgtctttttggtagtcggtgactgcatgctagttggtctacagcccgtcttagtgtacatgtctaaagtggatggaaagttcaactttagtcctattagcgtcaacttcttgacagaaatcgcgaaagttattttcgcgatggtcatgctattattccaggccaggcaccaaaaagttggagagaaacctctactatctctttccacgtttgtccaggcagctcggaacaatatgcttctcgctgttccagcagggttgtatgccattaataactatcttaagttcacaatgcagtttcacacagcaattcacttttctgctgtgccagctatatttcaatcctgctactgtgaagatgctcagcaatctaaaagttctggtgattgctgtactactgaagatgataatgaagcgtcggttttccatcatacagggattagtataaatcagctgcgttctcttcctgaaggagctacaactgtggctgttccaattgctacgggtgcatacatatgtacctttatctttagccttattcagcacgtcatcatgcaggttactgtcccatctttggcatctgtctacaacgagtatgctctaaagagtcagtatgacacaagcatttatctccagctggctgtgttaacactgtggtttgatacatttcttttggctcgtattgttgaacttgctctattctttggtctagtcatctctcttagcaatgttgttgaccatgatcctctcctgggttctgaatgtaaagctttaatttcccttgtgcagaacttatttctttatggttatggtgcgatattcaacttcctcggaatactaggaactgttatatataaaggtcctggcagttttgacatcctacaaggacattctagggctactatgtttctgatactgaacaacgcagcacaagggattctatcctcctttttcttcaaatatgcagatacaatcttgaagaaatattcgtccacagtagccacaatatttactggcatagcatctgcagcactctttggacatatattaacaatgaattttcttctgggaatttctatagttttcatttcaatgcatcagttcttttcacccctttcaaaagcaaaagacgaacaacaaaacggaaacatagagttagttgacgcaaaggatggccatagggctaaagactcattcatcaacatggcagcaggagcaactgaagagtccacaagtgagaaacattacacaatgaacatgacttcgtgttcttcttcatcttcttcttctttcccacgactcttcgccgccaaatcccaaatctataaagctccagttttatccttctccactcctaaacgccgtcgtcctcgtcctcgccggaaccggaaatctaatggctcatcctacgaccacaccgacggcaatcttctttctatctccacttcctctccctccggagccgacgaccaaagtctcagcttaaccctagacgttcaccgtatttcaactctagctaattaccgcttccaattgtttctcgattccagcaaagacgcgttctccgacttgcaaacactaatctcactcgacgataaccggagagtcgttgtctcgtgcaaaaaatcaactatgcaattcgtcggcggtgtggttatactaggattcgtatttggttttgcaattagggttcttgtgaaattaggatcagctttaaagggtaatttccaaagtaatcccaaatttgtagttaggagagataggagtcttggtgggaaggaagtggtcgtctctgttgataacattcgttcatcttcaagagattccaagagcttcatagcttctgatcaagcttctcgaagtaactctacgcctagaaatctccaccttaaagctcagaataatttgccgaaatggtggccgacttcattgactagccagagctttgatgtggtcgacaaagaagactatcagagggaagccaacagaatcgttcgagctccgtgggagtcttcttctgttgagatttgtagtgaagatgcccgagagttcattgctgggctcgctgagaacattggacttgcaaagatagatgctgctagaatggtttctgcagcagttgcagcacgcacacgttcatggtttctacaagcttgggctgagatggaaatggttgcaagagggttggagaaactcatgaagcttgaagagcgacagtctctactgaaaacgtttgttggaatgtgttgcagtgaagatagtcaaagaagcgcagctgaggctctgggtttggtgcactggtaa

SEQ ID NO: 44030 - protein, 806 aa, Arabidopsis thaliana
  peptide (1)..(806): Ceres Seq. ID no. 13494626
  misc_feature (102)..(400): Pfam Name: Nucleotide-sugar transporter Pfam Description: Nucleotide-sugar transporter
  misc_feature (3)..(54): Homolog of NCBI NO: 34907666 NR Description: putative transporter-like protein
  misc_feature (43)..(140): Homolog of NCBI NO: 34907666 NR Description: putative transporter-like protein
  misc_feature (272)..(450): Homolog of NCBI NO: 34907666 NR Description: putative transporter-like protein
  misc_feature (185)..(268): Homolog of NCBI NO: 11358902 NR Description: transporter-like protein - Arabidopsis thaliana
  misc_feature (1)..(138): Homolog of NCBI NO: 11358902 NR Description: transporter-like protein - Arabidopsis thaliana
  misc_feature (223)..(450): Homolog of NCBI NO: 11358902 NR Description: transporter-like protein - Arabidopsis thaliana
  misc_feature (272)..(450): Homolog of NCBI NO: 18411150 NR Description: transporter-related protein [Arabidopsis
  misc_feature (1)..(251): Homolog of NCBI NO: 18411150 NR Description: transporter-related protein [Arabidopsis
  misc_feature (274)..(450): Homolog of NCBI NO: 26450627 NR Description: unknown protein [Arabidopsis thaliana]
  misc_feature (1)..(251): Homolog of NCBI NO: 26450627 NR Description: unknown protein [Arabidopsis thaliana]
MAECSVCRSRLVSPSSKAISRAYDNYNYKIRVSSKQRALNVFLVVGDCMLVGLQPVLVYMSKVDGKFNFSPISVNFLTEIAKVIFAMVMLLFQARHQKVGEKPLLSLSTFVQAARNNMLLAVPAGLYAINNYLKFTMQFHTAIHFSAVPAIFQSCYCEDAQQSKSSGDCCTTEDDNEASVFHHTGISINQLRSLPEGATTVAVPIATGAYICTFIFSLIQHVIMQVTVPSLASVYNEYALKSQYDTSIYLQLAVLTLWFDTFLLARIVELALFFGLVISLSNVVDHDPLLGSECKALISLVQNLFLYGYGAIFNFLGILGTVIYKGPGSFDILQGHSRATMFLILNNAAQGILSSFFFKYADTILKKYSSTVATIFTGIASAALFGHILTMNFLLGISIVFISMHQFFSPLSKAKDEQQNGNIELVDAKDGHRAKDSFINMAAGATEESTSEKHYTMNMTSCSSSSSSSFPRLFAAKSQIYKAPVLSFSTPKRRRPRPRRNRKSNGSSYDHTDGNLLSISTSSPSGADDQSLSLTLDVHRISTLANYRFQLFLDSSKDAFSDLQTLISLDDNRRVVVSCKKSTMQFVGGVVILGFVFGFAIRVLVKLGSALKGNFQSNPKFVVRRDRSLGGKEVVVSVDNIRSSSRDSKSFIASDQASRSNSTPRNLHLKAQNNLPKWWPTSLTSQSFDVVDKEDYQREANRIVRAPWESSSVEICSEDAREFIAGLAENIGLAKIDAARMVSAAVAARTRSWFLQAWAEMEMVARGLEKLMKLEERQSLLKTFVGMCCSEDSQRSAAEALGLVHW

SEQ ID NO: 44031 - protein, 758 aa, Arabidopsis thaliana
  peptide (1)..(758): Ceres Seq. ID no. 13494627
  misc_feature (54)..(352): Pfam Name: Nucleotide-sugar transporter Pfam Description: Nucleotide-sugar transporter
  misc_feature (1)..(296): Homolog of NCBI NO: 38345234 NR Description: OSJNBa0084K20.12 [Oryza sativa (japonica
  misc_feature (1)..(92): Homolog of NCBI NO: 34907666 NR Description: putative transporter-like protein
  misc_feature (224)..(402): Homolog of NCBI NO: 34907666 NR Description: putative transporter-like protein
  misc_feature (137)..(220): Homolog of NCBI NO: 11358902 NR Description: transporter-like protein - Arabidopsis thaliana
  misc_feature (1)..(90): Homolog of NCBI NO: 11358902 NR Description: transporter-like protein - Arabidopsis thaliana
  misc_feature (175)..(402): Homolog of NCBI NO: 11358902 NR Description: transporter-like protein - Arabidopsis thaliana
  misc_feature (224)..(402): Homolog of NCBI NO: 18411150 NR Description: transporter-related protein [Arabidopsis
  misc_feature (1)..(203): Homolog of NCBI NO: 18411150 NR Description: transporter-related protein [Arabidopsis
  misc_feature (226)..(402): Homolog of NCBI NO: 26450627 NR Description: unknown protein [Arabidopsis thaliana]
  misc_feature (1)..(203): Homolog of NCBI NO: 26450627 NR Description: unknown protein [Arabidopsis thaliana]
MLVGLQPVLVYMSKVDGKFNFSPISVNFLTEIAKVIFAMVMLLFQARHQKVGEKPLLSLSTFVQAARNNMLLAVPAGLYAINNYLKFTMQFHTAIHFSAVPAIFQSCYCEDAQQSKSSGDCCTTEDDNEASVFHHTGISINQLRSLPEGATTVAVPIATGAYICTFIFSLIQHVIMQVTVPSLASVYNEYALKSQYDTSIYLQLAVLTLWFDTFLLARIVELALFFGLVISLSNVVDHDPLLGSECKALISLVQNLFLYGYGAIFNFLGILGTVIYKGPGSFDILQGHSRATMFLILNNAAQGILSSFFFKYADTILKKYSSTVATIFTGIASAALFGHILTMNFLLGISIVFISMHQFFSPLSKAKDEQQNGNIELVDAKDGHRAKDSFINMAAGATEESTSEKHYTMNMTSCSSSSSSSFPRLFAAKSQIYKAPVLSFSTPKRRRPRPRRNRKSNGSSYDHTDGNLLSISTSSPSGADDQSLSLTLDVHRISTLANYRFQLFLDSSKDAFSDLQTLISLDDNRRVVVSCKKSTMQFVGGVVILGFVFGFAIRVLVKLGSALKGNFQSNPKFVVRRDRSLGGKEVVVSVDNIRSSSRDSKSFIASDQASRSNSTPRNLHLKAQNNLPKWWPTSLTSQSFDVVDKEDYQREANRIVRAPWESSSVEICSEDAREFIAGLAENIGLAKIDAARMVSAAVAARTRSWFLQAWAEMEMVARGLEKLMKLEERQSLLKTFVGMCCSEDSQRSAAEALGLVHW

SEQ ID NO: 44032 - protein, 747 aa, Arabidopsis thaliana
  peptide (1)..(747): Ceres Seq. ID no. 13494628
  misc_feature (43)..(341): Pfam Name: Nucleotide-sugar transporter Pfam Description: Nucleotide-sugar transporter
  misc_feature (1)..(285): Homolog of NCBI NO: 38345234 NR Description: OSJNBa0084K20.12 [Oryza sativa (japonica
  misc_feature (1)..(81): Homolog of NCBI NO: 34907666 NR Description: putative transporter-like protein
  misc_feature (213)..(391): Homolog of NCBI NO: 34907666 NR Description: putative transporter-like protein
  misc_feature (126)..(209): Homolog of NCBI NO: 11358902 NR Description: transporter-like protein - Arabidopsis thaliana
  misc_feature (1)..(79): Homolog of NCBI NO: 11358902 NR Description: transporter-like protein - Arabidopsis thaliana
  misc_feature (164)..(391): Homolog of NCBI NO: 11358902 NR Description: transporter-like protein - Arabidopsis thaliana
  misc_feature (213)..(391): Homolog of NCBI NO: 18411150 NR Description: transporter-related protein [Arabidopsis
  misc_feature (1)..(192): Homolog of NCBI NO: 18411150 NR Description: transporter-related protein [Arabidopsis
  misc_feature (215)..(391): Homolog of NCBI NO: 26450627 NR Description: unknown protein [Arabidopsis thaliana]
  misc_feature (1)..(192): Homolog of NCBI NO: 26450627 NR Description: unknown protein [Arabidopsis thaliana]
MSKVDGKFNFSPISVNFLTEIAKVIFAMVMLLFQARHQKVGEKPLLSLSTFVQAARNNMLLAVPAGLYAINNYLKFTMQFHTAIHFSAVPAIFQSCYCEDAQQSKSSGDCCTTEDDNEASVFHHTGISINQLRSLPEGATTVAVPIATGAYICTFIFSLIQHVIMQVTVPSLASVYNEYALKSQYDTSIYLQLAVLTLWFDTFLLARIVELALFFGLVISLSNVVDHDPLLGSECKALISLVQNLFLYGYGAIFNFLGILGTVIYKGPGSFDILQGHSRATMFLILNNAAQGILSSFFFKYADTILKKYSSTVATIFTGIASAALFGHILTMNFLLGISIVFISMHQFFSPLSKAKDEQQNGNIELVDAKDGHRAKDSFINMAAGATEESTSEKHYTMNMTSCSSSSSSSFPRLFAAKSQIYKAPVLSFSTPKRRRPRPRRNRKSNGSSYDHTDGNLLSISTSSPSGADDQSLSLTLDVHRISTLANYRFQLFLDSSKDAFSDLQTLISLDDNRRVVVSCKKSTMQFVGGVVILGFVFGFAIRVLVKLGSALKGNFQSNPKFVVRRDRSLGGKEVVVSVDNIRSSSRDSKSFIASDQASRSNSTPRNLHLKAQNNLPKWWPTSLTSQSFDVVDKEDYQREANRIVRAPWESSSVEICSEDAREFIAGLAENIGLAKIDAARMVSAAVAARTRSWFLQAWAEMEMVARGLEKLMKLEERQSLLKTFVGMCCSEDSQRSAAEALGLVHW

SEQ ID NO: 44033 - DNA, 1851 bp, Arabidopsis thaliana
  misc_feature (1)..(1851): Ceres Seq. ID no. 12488238
  misc_feature: MA Experiment ID: 20000171 Result: Up-regulated in Transcription
  misc_feature: MA Experiment 20000171 PARAMETER Experiment Name: At_42deg_Heat_P Parameter: Age (day) Value: 14
  misc_feature: MA Experiment 20000171 PARAMETER Experiment Name: At_42deg_Heat_P Parameter: Organism Value: A. thaliana
  misc_feature: MA Experiment 20000171 PARAMETER Experiment Name: At_42deg_Heat_P Parameter: Plant Line Value: WS
  misc_feature: MA Experiment 20000171 PARAMETER Experiment Name: At_42deg_Heat_P Parameter: Temperature (deg C) Value: 42 vs. 22
  misc_feature: MA Experiment 20000171 PARAMETER Experiment Name: At_42deg_Heat_P Parameter: Timepoint (hr) Value: 1
  misc_feature: MA Experiment 20000171 PARAMETER Experiment Name: At_42deg_Heat_P Parameter: Tissue Value: Aerial
  misc_feature: MA Experiment ID: 20000185 Result: Up-regulated in Transcription
  misc_feature: MA Experiment 20000185 PARAMETER Experiment Name: At_Roots__P Parameter: Age (day) Value: 7 vs. 21
  misc_feature: MA Experiment 20000185 PARAMETER Experiment Name: At_Roots__P Parameter: Organism Value: A. thaliana
  misc_feature: MA Experiment 20000185 PARAMETER Experiment Name: At_Roots__P Parameter: Tissue Value: Roots vs. Whole Plant
  misc_feature: MA Experiment ID: 20000227 Result: Down-regulated in Transcription
  misc_feature: MA Experiment 20000227 PARAMETER Experiment Name: At_Root-Tips-vs-Tops_P Parameter: Tissue Value: Root Tips vs. Root Tops
  misc_feature: MA Experiment ID: 20000264 Result: Up-regulated in Transcription
  misc_feature: MA Experiment 20000264 PARAMETER Experiment Name: At_Open_Flower_P Parameter: Age (day) Value: 21
  misc_feature: MA Experiment 20000264 PARAMETER Experiment Name: At_Open_Flower_P Parameter: Plant Line Value: WS
  misc_feature: MA Experiment 20000264 PARAMETER Experiment Name: At_Open_Flower_P Parameter: Tissue Value: Open Flower vs. Whole Plant
  misc_feature: MA Experiment ID: 20000286 Result: Up-regulated in Transcription
  misc_feature: MA Experiment 20000286 PARAMETER Experiment Name: At_Open_Flower_P Parameter: Age (day) Value: 21
  misc_feature: MA Experiment 20000286 PARAMETER Experiment Name: At_Open_Flower_P Parameter: Plant Line Value: WS
  misc_feature: MA Experiment 20000286 PARAMETER Experiment Name: At_Open_Flower_P Parameter: Tissue Value: Half Open vs. Whole Plant
  misc_feature: MA Experiment ID: 20000437 Result: Up-regulated in Transcription
  misc_feature: MA Experiment 20000437 PARAMETER Experiment Name: At_Drought_P Parameter: Age (day) Value: 8
  misc_feature: MA Experiment 20000437 PARAMETER Experiment Name: At_Drought_P Parameter: Organism Value: A. thaliana
  misc_feature: MA Experiment 20000437 PARAMETER Experiment Name: At_Drought_P Parameter: Plant Line Value: WS
  misc_feature: MA Experiment 20000437 PARAMETER Experiment Name: At_Drought_P Parameter: Timepoint (hr) Value: 24
  misc_feature: MA Experiment 20000437 PARAMETER Experiment Name: At_Drought_P Parameter: Tissue Value: Whole Plant
  misc_feature: MA Experiment 20000437 PARAMETER Experiment Name: At_Drought_P Parameter: Treatment Value: Drought vs. No Drought
  misc_feature: MA Experiment ID: 20000439 Result: Up-regulated in Transcription
  misc_feature: MA Experiment 20000439 PARAMETER Experiment Name: At_Roots__P Parameter: Age (day) Value: 14 vs. 21
  misc_feature: MA Experiment 20000439 PARAMETER Experiment Name: At_Roots__P Parameter: Organism Value: A. thaliana
  misc_feature: MA Experiment 20000439 PARAMETER Experiment Name: At_Roots__P Parameter: Tissue Value: Roots vs. Whole Plant
  misc_feature: MA Experiment ID: 20000456 Result: Down-regulated in Transcription
  misc_feature: MA Experiment 20000456 PARAMETER Experiment Name: At_100uM_BA_P Parameter: Age (day) Value: 14
  misc_feature: MA Experiment 20000456 PARAMETER Experiment Name: At_100uM_BA_P Parameter: Organism Value: A. thaliana
  misc_feature: MA Experiment 20000456 PARAMETER Experiment Name: At_100uM_BA_P Parameter: Plant Line Value: WS
  misc_feature: MA Experiment 20000456 PARAMETER Experiment Name: At_100uM_BA_P Parameter: Timepoint (hr) Value: 6
  misc_feature: MA Experiment 20000456 PARAMETER Experiment Name: At_100uM_BA_P Parameter: Tissue Value: Aerial
  misc_feature: MA Experiment 20000456 PARAMETER Experiment Name: At_100uM_BA_P Parameter: Treatment Value: 100uM BA vs. No Treatment
  misc_feature: MA Experiment ID: 20000495 Result: Up-regulated in Transcription
  misc_feature: MA Experiment 20000495 PARAMETER Experiment Name: At_Guard_Cells_P Parameter: Harvest Date Value: 8/2/2002
  misc_feature: MA Experiment 20000495 PARAMETER Experiment Name: At_Guard_Cells_P Parameter: Organism Value: A. thaliana
  misc_feature: MA Experiment 20000495 PARAMETER Experiment Name: At_Guard_Cells_P Parameter: Tissue Value: Guard Cells vs. Leaves
  misc_feature: MA Experiment ID: 20000794 Result: Up-regulated in Transcription
  misc_feature: MA Experiment 20000794 PARAMETER Experiment Name: At_Petals_P Parameter: Age (day) Value: 23-25 days
  misc_feature: MA Experiment 20000794 PARAMETER Experiment Name: At_Petals_P Parameter: Plant Line Value: WS
  misc_feature: MA Experiment 20000794 PARAMETER Experiment Name: At_Petals_P Parameter: Tissue Value: Petals vs. Whole plant
  misc_feature: MA Experiment ID: 20001247 Result: Down-regulated in Transcription
  misc_feature: MA Experiment 20001247 PARAMETER Experiment Name: At_Far-red-induction_P Parameter: Age (day) Value: 7
  misc_feature: MA Experiment 20001247 PARAMETER Experiment Name: At_Far-red-induction_P Parameter: Light Value: Far-red vs. White
  misc_feature: MA Experiment 20001247 PARAMETER Experiment Name: At_Far-red-induction_P Parameter: Organism Value: A. thaliana
  misc_feature: MA Experiment 20001247 PARAMETER Experiment Name: At_Far-red-induction_P Parameter: Plant Line Value: Columbia
  misc_feature: MA Experiment 20001247 PARAMETER Experiment Name: At_Far-red-induction_P Parameter: Timepoint (hr) Value: 1
  misc_feature: MA Experiment 20001247 PARAMETER Experiment Name: At_Far-red-induction_P Parameter: Tissue Value: Whole Plant
  misc_feature: MA Experiment ID: 20001248 Result: Down-regulated in Transcription
  misc_feature: MA Experiment 20001248 PARAMETER Experiment Name: At_Far-red-induction_P Parameter: Age (day) Value: 7
  misc_feature: MA Experiment 20001248 PARAMETER Experiment Name: At_Far-red-induction_P Parameter: Light Value: Far-red vs. White
  misc_feature: MA Experiment 20001248 PARAMETER Experiment Name: At_Far-red-induction_P Parameter: Organism Value: A. thaliana
  misc_feature: MA Experiment 20001248 PARAMETER Experiment Name: At_Far-red-induction_P Parameter: Plant Line Value: Columbia
  misc_feature: MA Experiment 20001248 PARAMETER Experiment Name: At_Far-red-induction_P Parameter: Timepoint (hr) Value: 4
  misc_feature: MA Experiment 20001248 PARAMETER Experiment Name: At_Far-red-induction_P Parameter: Tissue Value: Whole Plant
  misc_feature: MA Experiment ID: 20001905 Result: Up-regulated in Transcription
  misc_feature: MA Experiment 20001905 PARAMETER Experiment Name: At_Drought_Reproduction_P Parameter: Age (day) Value: 40
  misc_feature: MA Experiment 20001905 PARAMETER Experiment Name: At_Drought_Reproduction_P Parameter: Organism Value: A. thaliana
  misc_feature: MA Experiment 20001905 PARAMETER Experiment Name: At_Drought_Reproduction_P Parameter: Plant Line Value: WS
  misc_feature: MA Experiment 20001905 PARAMETER Experiment Name: At_Drought_Reproduction_P Parameter: Timepoint (day) Value: 10
  misc_feature: MA Experiment 20001905 PARAMETER Experiment Name: At_Drought_Reproduction_P Parameter: Tissue Value: Rosettes
  misc_feature: MA Experiment 20001905 PARAMETER Experiment Name: At_Drought_Reproduction_P Parameter: Treatment Value: Drought vs. No Drought
  misc_feature: MA Experiment ID: 20001911 Result: Up-regulated in Transcription
  misc_feature: MA Experiment 20001911 PARAMETER Experiment Name: At_Drought_Reproduction_P Parameter: Age (day) Value: 40
  misc_feature: MA Experiment 20001911 PARAMETER Experiment Name: At_Drought_Reproduction_P Parameter: Organism Value: A. thaliana
  misc_feature: MA Experiment 20001911 PARAMETER Experiment Name: At_Drought_Reproduction_P Parameter: Plant Line Value: WS
  misc_feature: MA Experiment 20001911 PARAMETER Experiment Name: At_Drought_Reproduction_P Parameter: Timepoint (day) Value: 10
  misc_feature: MA Experiment 20001911 PARAMETER Experiment Name: At_Drought_Reproduction_P Parameter: Tissue Value: Flowers
  misc_feature: MA Experiment 20001911 PARAMETER Experiment Name: At_Drought_Reproduction_P Parameter: Treatment Value: Drought vs. No Drought
aagaagcttcagtaacatctcttaatgatgtctgaagatggctacaacacagattttccaagaaaccctctatacattttctttagtgatttcagatcagttctgaaatttgatgagctcggtttagagatagcgcgaattgctttacccgcagcacttgctttaacagctgatcctattgcatctctagttgacacagccttcataggccaaattggtcctgtagagcttgctgcagttggagtttctattgctttattcaaccaagtttcaagaattgctattttcccacttgttagcatcacaacttcctttgtagcagaagaagatgcttgtagttctcagcaagacacagtccgagatcataaagaatgtattgaaattggtatcaacaatccaactgaggaaactatagaattgattcctgaaaaacataaagattctttatcagatgaatttaaaaccagtagcagtatctttagtattagtaaacctccagccaagaaaagaaacataccatcagcttcatctgctttaatcattggaggcgttctcggcctttttcaagccgtgtttcttatatccgcagccaaacctctcttgagtttcatgggagtaaaacacgattctccaatgatgagaccttctcagagatatctatctttaagatcacttggtgcaccagctgttctactctcacttgcggcacaaggcgttttccgcggatttaaagacacgacaactccgttattcgctactgtgattggagatgtaacaaacataatactcgacccgattttcatatttgttttccgcctaggcgtaacaggagcagccactgctcatgttatatcccaataccttatgtgtggaatactcttgtggaaactgatgggtcaagttgatatcttcaacatgagtaccaaacatcttcagttctgtagattcatgaaaaatggctttcttttgctgatgagagtaattgcagtaacattctgtgtaactctctccgcgtcactagctgcacgagaaggatcaacttccatggcagctttccaagtttgcttgcaggtttggttagctacttcacttcttgcagacgggcaatactagcgagcgcgtttgccaaaaaagactacaaaagagcagcagctaccgcctctcgtgtactgcagttgggattggttctcggttttgtacttgcggttatacttggagcaggattgcattttggagcaagagtgtttacaaaagacgataaagttttacacctaattagcataggacttccgtttgtggcagggacacaaccaattaatgccttagcgtttgtgttcgatggagttaactttggagcatccgatttcggttacgccgcagcttcattagtaatggtggctatagttagcatcttgtgtttgctcttcctctcatcgactcatggttttattggactttggtttggtctcaccatttacatgagtcttagagcagccgttggattctggcggattgggacaggaacaggaccttggtcttttcttaggagctgaagaaggaattttagagggaagagcatgttttaactgttcttaaacctttatttctaatgaggttgtgtaactaaataaaaataccaagagtacaagtctggagattcaaataattctatgcgatttttactgctactcttgtaaatattcaagttgtatcctgtaattagaggtggttagtccaatttttggaggttttatttcagatattgtagttaaatatagaaaatcgatagaacatatagaaactgatttttgtttggttgactatagtgttgaacttcagattaattttttc

SEQ ID NO: 44034 - protein, 362 aa, Arabidopsis thaliana
  peptide (1)..(362): Ceres Seq. ID no. 12488239
  misc_feature (161)..(362): Homolog of NCBI NO: 7487160 NR Description: hypothetical protein At2g38330 [imported] -
  misc_feature (31)..(109): Homolog of NCBI NO: 30687474 NR Description: MATE efflux protein family [Arabidopsis thaliana]
  misc_feature (161)..(362): Homolog of NCBI NO: 30687474 NR Description: MATE efflux protein family [Arabidopsis thaliana]
  misc_feature (13)..(107): Homolog of NCBI NO: 19386721 NR Description: P0678F11.10 [Oryza sativa (japonica
  misc_feature (142)..(360): Homolog of NCBI NO: 19386721 NR Description: P0678F11.10 [Oryza sativa (japonica
  misc_feature (14)..(360): Homolog of NCBI NO: 20270057 NR Description: Putative membrane protein [Oryza sativa (japonica
  misc_feature (15)..(360): Homolog of NCBI NO: 15231918 NR Description: MATE efflux family protein, putative
  misc_feature (14)..(360): Homolog of NCBI NO: 37532300 NR Description: putative membrane protein
  misc_feature (1)..(362): Homolog of NCBI NO: 18403476 NR Description: expressed protein
  misc_feature (2)..(360): Homolog of NCBI NO: 25405456 NR Description: hypothetical protein F11M15.20 [imported] -
MMSEDGYNTDFPRNPLYIFFSDFRSVLKFDELGLEIARIALPAALALTADPIASLVDTAFIGQIGPVELAAVGVSIALFNQVSRIAIFPLVSITTSFVAEEDACSSQQDTVRDHKECIEIGINNPTEETIELIPEKHKDSLSDEFKTSSSIFSISKPPAKKRNIPSASSALIIGGVLGLFQAVFLISAAKPLLSFMGVKHDSPMMRPSQRYLSLRSLGAPAVLLSLAAQGVFRGFKDTTTPLFATVIGDVTNIILDPIFIFVFRLGVTGAATAHVISQYLMCGILLWKLMGQVDIFNMSTKHLQFCRFMKNGFLLLMRVIAVTFCVTLSASLAAREGSTSMAAFQVCLQVWLATSLLADGQY

SEQ ID NO: 44035 - protein, 361 aa, Arabidopsis thaliana
  peptide (1)..(361): Ceres Seq. ID no. 12488240
  misc_feature (160)..(361): Homolog of NCBI NO: 7487160 NR Description: hypothetical protein At2g38330 [imported] -
  misc_feature (30)..(108): Homolog of NCBI NO: 30687474 NR Description: MATE efflux protein family [Arabidopsis thaliana]
  misc_feature (160)..(361): Homolog of NCBI NO: 30687474 NR Description: MATE efflux protein family [Arabidopsis thaliana]
  misc_feature (12)..(106): Homolog of NCBI NO: 19386721 NR Description: P0678F11.10 [Oryza sativa (japonica
  misc_feature (141)..(359): Homolog of NCBI NO: 19386721 NR Description: P0678F11.10 [Oryza sativa (japonica
  misc_feature (13)..(359): Homolog of NCBI NO: 20270057 NR Description: Putative membrane protein [Oryza sativa (japonica
  misc_feature (14)..(359): Homolog of NCBI NO: 15231918 NR Description: MATE efflux family protein, putative
  misc_feature (13)..(359): Homolog of NCBI NO: 37532300 NR Description: putative membrane protein
  misc_feature (1)..(361): Homolog of NCBI NO: 18403476 NR Description: expressed protein
  misc_feature (1)..(359): Homolog of NCBI NO: 25405456 NR Description: hypothetical protein F11M15.20 [imported] -
MSEDGYNTDFPRNPLYIFFSDFRSVLKFDELGLEIARIALPAALALTADPIASLVDTAFIGQIGPVELAAVGVSIALFNQVSRIAIFPLVSITTSFVAEEDACSSQQDTVRDHKECIEIGINNPTEETIELIPEKHKDSLSDEFKTSSSIFSISKPPAKKRNIPSASSALIIGGVLGLFQAVFLISAAKPLLSFMGVKHDSPMMRPSQRYLSLRSLGAPAVLLSLAAQGVFRGFKDTTTPLFATVIGDVTNIILDPIFIFVFRLGVTGAATAHVISQYLMCGILLWKLMGQVDIFNMSTKHLQFCRFMKNGFLLLMRVIAVTFCVTLSASLAAREGSTSMAAFQVCLQVWLATSLLADGQY

SEQ ID NO: 44036 - DNA, 1035 bp, Arabidopsis thaliana; identical to SEQ ID NO: 22638
  misc_feature (1)..(1035): Ceres Seq. ID no. 13509220
  misc_feature: MA Experiment ID: 108434 Result: Down-regulated in Transcription
  misc_feature: MA Experiment 108434 PARAMETER Experiment Name: At_Root_Tips_cDNA_P Parameter: Tissue Value: Root Tips
  misc_feature: MA Experiment ID: 108461 Result: Up-regulated in Transcription
  misc_feature: MA Experiment 108461 PARAMETER Experiment Name: At_Germinating_Seeds_cDNA_P Parameter: Age (day) Value: 1 vs. 0
  misc_feature: MA Experiment 108461 PARAMETER Experiment Name: At_Germinating_Seeds_cDNA_P Parameter: Tissue Value: Germinating Seeds
  misc_feature: MA Experiment ID: 108462 Result: Up-regulated in Transcription
  misc_feature: MA Experiment 108462 PARAMETER Experiment Name: At_Germinating_Seeds_cDNA_P Parameter: Age (day) Value: 2 vs. 0
  misc_feature: MA Experiment 108462 PARAMETER Experiment Name: At_Germinating_Seeds_cDNA_P Parameter: Tissue Value: Germinating Seeds
  misc_feature: MA Experiment ID: 108464 Result: Up-regulated in Transcription
  misc_feature: MA Experiment 108464 PARAMETER Experiment Name: At_Germinating_Seeds_cDNA_P Parameter: Age (day) Value: 4 vs. 0
  misc_feature: MA Experiment 108464 PARAMETER Experiment Name: At_Germinating_Seeds_cDNA_P Parameter: Tissue Value: Germinating Seeds
  misc_feature: MA Experiment ID: 108488 Result: Up-regulated in Transcription
  misc_feature: MA Experiment ID: 108489 Result: Down-regulated in Transcription
  misc_feature: MA Experiment ID: 108595 Result: Down-regulated in Transcription
  misc_feature: MA Experiment 108595 PARAMETER Experiment Name: At_Ler-pi_Ovule_cDNA_P Parameter: Plant Line Value: null
  misc_feature: MA Experiment ID: 20000314 Result: Down-regulated in Transcription
  misc_feature: MA Experiment 20000314 PARAMETER Experiment Name: At_14day_Shoots-Roots_Sub_P Parameter: Age (day) Value: 14
  misc_feature: MA Experiment 20000314 PARAMETER Experiment Name: At_14day_Shoots-Roots_Sub_P Parameter: Organism Value: A. thaliana
  misc_feature: MA Experiment 20000314 PARAMETER Experiment Name: At_14day_Shoots-Roots_Sub_P Parameter: Plant Line Value: WS
  misc_feature: MA Experiment 20000314 PARAMETER Experiment Name: At_14day_Shoots-Roots_Sub_P Parameter: Tissue Value: Roots vs. Whole Plant
  misc_feature: MA Experiment ID: 20000315 Result: Up-regulated in Transcription
  misc_feature: MA Experiment 20000315 PARAMETER Experiment Name: At_14day_Shoots-Roots_Sub_P Parameter: Age (day) Value: 14
  misc_feature: MA Experiment 20000315 PARAMETER Experiment Name: At_14day_Shoots-Roots_Sub_P Parameter: Organism Value: A. thaliana
  misc_feature: MA Experiment 20000315 PARAMETER Experiment Name: At_14day_Shoots-Roots_Sub_P Parameter: Plant Line Value: WS
  misc_feature: MA Experiment 20000315 PARAMETER Experiment Name: At_14day_Shoots-Roots_Sub_P Parameter: Tissue Value: Shoots vs. Whole Plant
  misc_feature: MA Experiment ID: 20000328 Result: Up-regulated in Transcription
  misc_feature: MA Experiment 20000328 PARAMETER Experiment Name: At_42deg_Heat_Sub_P Parameter: Age (day) Value: 14
  misc_feature: MA Experiment 20000328 PARAMETER Experiment Name: At_42deg_Heat_Sub_P Parameter: Organism Value: A. thaliana
  misc_feature: MA Experiment 20000328 PARAMETER Experiment Name: At_42deg_Heat_Sub_P Parameter: Plant Line Value: WS
  misc_feature: MA Experiment 20000328 PARAMETER Experiment Name: At_42deg_Heat_Sub_P Parameter: Temperature (deg C) Value: 42 vs. 22
  misc_feature: MA Experiment 20000328 PARAMETER Experiment Name: At_42deg_Heat_Sub_P Parameter: Timepoint (hr) Value: 6
  misc_feature: MA Experiment 20000328 PARAMETER Experiment Name: At_42deg_Heat_Sub_P Parameter: Tissue Value: Aerial
  misc_feature: MA Experiment ID: 20001807 Result: Up-regulated in Transcription
  misc_feature: MA Experiment 20001807 PARAMETER Experiment Name: At_50mM_NH4NO3_L-to-H_Sub_P Parameter: Timepoint (hr) Value: 6
  misc_feature: MA Experiment 20001807 PARAMETER Experiment Name: At_50mM_NH4NO3_L-to-H_Sub_P Parameter: Tissue Value: Leaf
  misc_feature: MA Experiment 20001807 PARAMETER Experiment Name: At_50mM_NH4NO3_L-to-H_Sub_P Parameter: Treatment Value: 50mM NH4NO3 vs 100mM Mannitol

SEQ ID NO: 44037 - protein, 267 aa, Arabidopsis thaliana; identical to SEQ ID NO: 22639
  peptide (1)..(267): Ceres Seq. ID no. 13509221
  misc_feature (65)..(234): Pfam Name: Chlorophyll A-B binding protein Pfam Description: Chlorophyll A-B binding protein
  misc_feature (65)..(234): Pfam Name: Chlorophyll A-B binding protein Pfam Description: Chlorophyll A-B binding protein
  misc_feature (65)..(234): Pfam Name: Chlorophyll A-B binding protein Pfam Description: Chlorophyll A-B binding protein
  misc_feature (1)..(267): Homolog of NCBI NO: 115819 NR Description: Chlorophyll A-B binding protein 1B, chloroplast
  misc_feature (19)..(267): Homolog of NCBI NO: 12324161 NR Description: chlorophyll A-B-binding protein 2 precursor, 5'
  misc_feature (1)..(267): Homolog of NCBI NO: 21592428 NR Description: putative photosystem II type I chlorophyll a b
  misc_feature (1)..(267): Homolog of NCBI NO: 18266039 NR Description: chlorophyll a/b binding protein [Brassica
  misc_feature (1)..(267): Homolog of NCBI NO: 18403549 NR Description: photosystem II type I chlorophyll a /b binding
  misc_feature (1)..(267): Homolog of NCBI NO: 115819 NR Description: Chlorophyll A-B binding protein 1B, chloroplast
  misc_feature (1)..(267): Homolog of NCBI NO: 21592428 NR Description: putative photosystem II type I chlorophyll a b
  misc_feature (1)..(267): Homolog of NCBI NO: 18403549 NR Description: photosystem II type I chlorophyll a /b binding
  misc_feature (1)..(267): Homolog of NCBI NO: 18266039 NR Description: chlorophyll a/b binding protein [Brassica
  misc_feature (1)..(267): Homolog of NCBI NO: 21592428 NR Description: putative photosystem II type I chlorophyll a b
  misc_feature (19)..(267): Homolog of NCBI NO: 12324161 NR Description: chlorophyll A-B-binding protein 2 precursor, 5'
  misc_feature (1)..(267): Homolog of NCBI NO: 115819 NR Description: Chlorophyll A-B binding protein 1B, chloroplast
  misc_feature (1)..(267): Homolog of NCBI NO: 15220615 NR Description: light-harvesting chlorophyll a/b binding protein
  misc_feature (1)..(267): Homolog of NCBI NO: 18397286 NR Description: photosystem II type I chlorophyll a /b binding
  misc_feature (1)..(267): Homolog of NCBI NO: 17473828 NR Description: chlorophyll a/b-binding protein [Arabidopsis
  misc_feature (1)..(267): Homolog of NCBI NO: 18403546 NR Description: photosystem II type I chlorophyll a /b binding
  misc_feature (1)..(267): Homolog of NCBI NO: 115778 NR Description: Chlorophyll A-B binding protein 1, chloroplast
  misc_feature (1)..(267): Homolog of NCBI NO: 15220615 NR Description: light-harvesting chlorophyll a/b binding protein
  misc_feature (1)..(267): Homolog of NCBI NO: 18397286 NR Description: photosystem II type I chlorophyll a /b binding
  misc_feature (1)..(267): Homolog of NCBI NO: 17473828 NR Description: chlorophyll a/b-binding protein [Arabidopsis
  misc_feature (1)..(267): Homolog of NCBI NO: 18403546 NR Description: photosystem II type I chlorophyll a /b binding
  misc_feature (1)..(267): Homolog of NCBI NO: 115778 NR Description: Chlorophyll A-B binding protein 1, chloroplast
  misc_feature (1)..(267): Homolog of NCBI NO: 18403549 NR Description: photosystem II type I chlorophyll a /b binding
  misc_feature (1)..(267): Homolog of NCBI NO: 18266039 NR Description: chlorophyll a/b binding protein [Brassica
  misc_feature (19)..(267): Homolog of NCBI NO: 12324161 NR Description: chlorophyll A-B-binding protein 2 precursor, 5'
  misc_feature (1)..(267): Homolog of NCBI NO: 115778 NR Description: Chlorophyll A-B binding protein 1, chloroplast
  misc_feature (1)..(267): Homolog of NCBI NO: 18403546 NR Description: photosystem II type I chlorophyll a /b binding
  misc_feature (1)..(267): Homolog of NCBI NO: 17473828 NR Description: chlorophyll a/b-binding protein [Arabidopsis
  misc_feature (1)..(267): Homolog of NCBI NO: 18397286 NR Description: photosystem II type I chlorophyll a /b binding
  misc_feature (1)..(267): Homolog of NCBI NO: 15220615 NR Description: light-harvesting chlorophyll a/b binding protein

SEQ ID NO: 44038 - protein, 262 aa, Arabidopsis thaliana; identical to SEQ ID NO: 22640
  peptide (1)..(262): Ceres Seq. ID no. 13509222
  misc_feature (60)..(229): Pfam Name: Chlorophyll A-B binding protein Pfam Description: Chlorophyll A-B binding protein
  misc_feature (60)..(229): Pfam Name: Chlorophyll A-B binding protein Pfam Description: Chlorophyll A-B binding protein
  misc_feature (60)..(229): Pfam Name: Chlorophyll A-B binding protein Pfam Description: Chlorophyll A-B binding protein
  misc_feature (1)..(262): Homolog of NCBI NO: 115819 NR Description: Chlorophyll A-B binding protein 1B, chloroplast
  misc_feature (14)..(262): Homolog of NCBI NO: 12324161 NR Description: chlorophyll A-B-binding protein 2 precursor, 5'
  misc_feature (1)..(262): Homolog of NCBI NO: 21592428 NR Description: putative photosystem II type I chlorophyll a b
  misc_feature (1)..(262): Homolog of NCBI NO: 18266039 NR Description: chlorophyll a/b binding protein [Brassica
  misc_feature (1)..(262): Homolog of NCBI NO: 18403549 NR Description: photosystem II type I chlorophyll a /b binding
  misc_feature (1)..(262): Homolog of NCBI NO: 115819 NR Description: Chlorophyll A-B binding protein 1B, chloroplast
  misc_feature (1)..(262): Homolog of NCBI NO: 21592428 NR Description: putative photosystem II type I chlorophyll a b
  misc_feature (1)..(262): Homolog of NCBI NO: 18403549 NR Description: photosystem II type I chlorophyll a /b binding
  misc_feature (1)..(262): Homolog of NCBI NO: 18266039 NR Description: chlorophyll a/b binding protein [Brassica
  misc_feature (1)..(262): Homolog of NCBI NO: 21592428 NR Description: putative photosystem II type I chlorophyll a b
  misc_feature (14)..(262): Homolog of NCBI NO: 12324161 NR Description: chlorophyll A-B-binding protein 2 precursor, 5'
  misc_feature (1)..(262): Homolog of NCBI NO: 115819 NR Description: Chlorophyll A-B binding protein 1B, chloroplast
  misc_feature (1)..(262): Homolog of NCBI NO: 15220615 NR Description: light-harvesting chlorophyll a/b binding protein
  misc_feature (1)..(262): Homolog of NCBI NO: 18397286 NR Description: photosystem II type I chlorophyll a /b binding
  misc_feature (1)..(262): Homolog of NCBI NO: 17473828 NR Description: chlorophyll a/b-binding protein [Arabidopsis
  misc_feature (1)..(262): Homolog of NCBI NO: 18403546 NR Description: photosystem II type I chlorophyll a /b binding
  misc_feature (1)..(262): Homolog of NCBI NO: 115778 NR Description: Chlorophyll A-B binding protein 1, chloroplast
  misc_feature (1)..(262): Homolog of NCBI NO: 15220615 NR Description: light-harvesting chlorophyll a/b binding protein
  misc_feature (1)..(262): Homolog of NCBI NO: 18397286 NR Description: photosystem II type I chlorophyll a /b binding
  misc_feature (1)..(262): Homolog of NCBI NO: 17473828 NR Description: chlorophyll a/b-binding protein [Arabidopsis
  misc_feature (1)..(262): Homolog of NCBI NO: 18403546 NR Description: photosystem II type I chlorophyll a /b binding
  misc_feature (1)..(262): Homolog of NCBI NO: 115778 NR Description: Chlorophyll A-B binding protein 1, chloroplast
  misc_feature (1)..(262): Homolog of NCBI NO: 18403549 NR Description: photosystem II type I chlorophyll a /b binding
  misc_feature (1)..(262): Homolog of NCBI NO: 18266039 NR Description: chlorophyll a/b binding protein [Brassica
  misc_feature (14)..(262): Homolog of NCBI NO: 12324161 NR Description: chlorophyll A-B-binding protein 2 precursor, 5'
  misc_feature (1)..(262): Homolog of NCBI NO: 115778 NR Description: Chlorophyll A-B binding protein 1, chloroplast
  misc_feature (1)..(262): Homolog of NCBI NO: 18403546 NR Description: photosystem II type I chlorophyll a /b binding
  misc_feature (1)..(262): Homolog of NCBI NO: 17473828 NR Description: chlorophyll a/b-binding protein [Arabidopsis
  misc_feature (1)..(262): Homolog of NCBI NO: 18397286 NR Description: photosystem II type I chlorophyll a /b binding
  misc_feature (1)..(262): Homolog of NCBI NO: 15220615 NR Description: light-harvesting chlorophyll a/b binding protein

SEQ ID NO: 44039 - protein, 233 aa, Arabidopsis thaliana; identical to SEQ ID NO: 21214
  peptide (1)..(233): Ceres Seq. ID no. 13509223
  misc_feature (31)..(200): Pfam Name: Chlorophyll A-B binding protein Pfam Description: Chlorophyll A-B binding protein
  misc_feature (31)..(200): Pfam Name: Chlorophyll A-B binding protein Pfam Description: Chlorophyll A-B binding protein
  misc_feature (31)..(200): Pfam Name: Chlorophyll A-B binding protein Pfam Description: Chlorophyll A-B binding protein
  misc_feature (1)..(233): Homolog of NCBI NO: 115819 NR Description: Chlorophyll A-B binding protein 1B, chloroplast
  misc_feature (1)..(233): Homolog of NCBI NO: 12324161 NR Description: chlorophyll A-B-binding protein 2 precursor, 5'
  misc_feature (1)..(233): Homolog of NCBI NO: 21592428 NR Description: putative photosystem II type I chlorophyll a b
  misc_feature (1)..(233): Homolog of NCBI NO: 18266039 NR Description: chlorophyll a/b binding protein [Brassica
  misc_feature (1)..(233): Homolog of NCBI NO: 18403549 NR Description: photosystem II type I chlorophyll a /b binding
  misc_feature (1)..(233): Homolog of NCBI NO: 115819 NR Description: Chlorophyll A-B binding protein 1B, chloroplast
  misc_feature (1)..(233): Homolog of NCBI NO: 21592428 NR Description: putative photosystem II type I chlorophyll a b
  misc_feature (1)..(233): Homolog of NCBI NO: 18403549 NR Description: photosystem II type I chlorophyll a /b binding
  misc_feature (1)..(233): Homolog of NCBI NO: 18266039 NR Description: chlorophyll a/b binding protein [Brassica
  misc_feature (1)..(233): Homolog of NCBI NO: 21592428 NR Description: putative photosystem II type I chlorophyll a b
  misc_feature (1)..(233): Homolog of NCBI NO: 12324161 NR Description: chlorophyll A-B-binding protein 2 precursor, 5'
  misc_feature (1)..(233): Homolog of NCBI NO: 115819 NR Description: Chlorophyll A-B binding protein 1B, chloroplast
  misc_feature (1)..(233): Homolog of NCBI NO: 15220615 NR Description: light-harvesting chlorophyll a/b binding protein
  misc_feature (1)..(233): Homolog of NCBI NO: 18397286 NR Description: photosystem II type I chlorophyll a /b binding
  misc_feature (1)..(233): Homolog of NCBI NO: 17473828 NR Description: chlorophyll a/b-binding protein [Arabidopsis
  misc_feature (1)..(233): Homolog of NCBI NO: 18403546 NR Description: photosystem II type I chlorophyll a /b binding
  misc_feature (1)..(233): Homolog of NCBI NO: 115778 NR Description: Chlorophyll A-B binding protein 1, chloroplast
  misc_feature (1)..(233): Homolog of NCBI NO: 15220615 NR Description: light-harvesting chlorophyll a/b binding protein
  misc_feature (1)..(233): Homolog of NCBI NO: 18397286 NR Description: photosystem II type I chlorophyll a /b binding
  misc_feature (1)..(233): Homolog of NCBI NO: 17473828 NR Description: chlorophyll a/b-binding protein [Arabidopsis
  misc_feature (1)..(233): Homolog of NCBI NO: 18403546 NR Description: photosystem II type I chlorophyll a /b binding
  misc_feature (1)..(233): Homolog of NCBI NO: 115778 NR Description: Chlorophyll A-B binding protein 1, chloroplast
  misc_feature (1)..(233): Homolog of NCBI NO: 18403549 NR Description: photosystem II type I chlorophyll a /b binding
  misc_feature (1)..(233): Homolog of NCBI NO: 18266039 NR Description: chlorophyll a/b binding protein [Brassica
  misc_feature (1)..(233): Homolog of NCBI NO: 12324161 NR Description: chlorophyll A-B-binding protein 2 precursor, 5'
  misc_feature (1)..(233): Homolog of NCBI NO: 115778 NR Description: Chlorophyll A-B binding protein 1, chloroplast
  misc_feature (1)..(233): Homolog of NCBI NO: 18403546 NR Description: photosystem II type I chlorophyll a /b binding
  misc_feature (1)..(233): Homolog of NCBI NO: 17473828 NR Description: chlorophyll a/b-binding protein [Arabidopsis
  misc_feature (1)..(233): Homolog of NCBI NO: 18397286 NR Description: photosystem II type I chlorophyll a /b binding
  misc_feature (1)..(233): Homolog of NCBI NO: 15220615 NR Description: light-harvesting chlorophyll a/b binding protein

SEQ ID NO: 44040 - DNA, 649 bp, Arabidopsis thaliana
  misc_feature (1)..(649): Ceres Seq. ID no. 13509774
  misc_feature: MA Experiment ID: 20000185 Result: Up-regulated in Transcription
  misc_feature: MA Experiment 20000185 PARAMETER Experiment Name: At_Roots__P Parameter: Age (day) Value: 7 vs. 21
  misc_feature: MA Experiment 20000185 PARAMETER Experiment Name: At_Roots__P Parameter: Organism Value: A. thaliana
  misc_feature: MA Experiment 20000185 PARAMETER Experiment Name: At_Roots__P Parameter: Tissue Value: Roots vs. Whole Plant
  misc_feature: MA Experiment ID: 20000227 Result: Down-regulated in Transcription
  misc_feature: MA Experiment 20000227 PARAMETER Experiment Name: At_Root-Tips-vs-Tops_P Parameter: Tissue Value: Root Tips vs. Root Tops
  misc_feature: MA Experiment ID: 20000436 Result: Down-regulated in Transcription
  misc_feature: MA Experiment 20000436 PARAMETER Experiment Name: At_Drought_P Parameter: Age (day) Value: 7
  misc_feature: MA Experiment 20000436 PARAMETER Experiment Name: At_Drought_P Parameter: Organism Value: A. thaliana
  misc_feature: MA Experiment 20000436 PARAMETER Experiment Name: At_Drought_P Parameter: Plant Line Value: WS
  misc_feature: MA Experiment 20000436 PARAMETER Experiment Name: At_Drought_P Parameter: Timepoint (hr) Value: 12
  misc_feature: MA Experiment 20000436 PARAMETER Experiment Name: At_Drought_P Parameter: Tissue Value: Whole Plant
  misc_feature: MA Experiment 20000436 PARAMETER Experiment Name: At_Drought_P Parameter: Treatment Value: Drought vs. No Drought
  misc_feature: MA Experiment ID: 20000437 Result: Down-regulated in Transcription
  misc_feature: MA Experiment 20000437 PARAMETER Experiment Name: At_Drought_P Parameter: Age (day) Value: 8
  misc_feature: MA Experiment 20000437 PARAMETER Experiment Name: At_Drought_P Parameter: Organism Value: A. thaliana
  misc_feature: MA Experiment 20000437 PARAMETER Experiment Name: At_Drought_P Parameter: Plant Line Value: WS
  misc_feature: MA Experiment 20000437 PARAMETER Experiment Name: At_Drought_P Parameter: Timepoint (hr) Value: 24
  misc_feature: MA Experiment 20000437 PARAMETER Experiment Name: At_Drought_P Parameter: Tissue Value: Whole Plant
  misc_feature: MA Experiment 20000437 PARAMETER Experiment Name: At_Drought_P Parameter: Treatment Value: Drought vs. No Drought
  misc_feature: MA Experiment ID: 20000439 Result: Up-regulated in Transcription
  misc_feature: MA Experiment 20000439 PARAMETER Experiment Name: At_Roots__P Parameter: Age (day) Value: 14 vs. 21
  misc_feature: MA Experiment 20000439 PARAMETER Experiment Name: At_Roots__P Parameter: Organism Value: A. thaliana
  misc_feature: MA Experiment 20000439 PARAMETER Experiment Name: At_Roots__P Parameter: Tissue Value: Roots vs. Whole Plant
  misc_feature: MA Experiment ID: 20000460 Result: Down-regulated in Transcription
  misc_feature: MA Experiment 20000460 PARAMETER Experiment Name: At_10percent_PEG_P Parameter: Age (day) Value: 12
  misc_feature: MA Experiment 20000460 PARAMETER Experiment Name: At_10percent_PEG_P Parameter: Organism Value: A. thaliana
  misc_feature: MA Experiment 20000460 PARAMETER Experiment Name: At_10percent_PEG_P Parameter: Plant Line Value: WS
  misc_feature: MA Experiment 20000460 PARAMETER Experiment Name: At_10percent_PEG_P Parameter: Timepoint (day) Value: 12
  misc_feature: MA Experiment 20000460 PARAMETER Experiment Name: At_10percent_PEG_P Parameter: Tissue Value: Whole Plant
  misc_feature: MA Experiment 20000460 PARAMETER Experiment Name: At_10percent_PEG_P Parameter: Treatment Value: 10percent PEG vs. No Treatment
  misc_feature: MA Experiment ID: 20001451 Result: Down-regulated in Transcription
  misc_feature: MA Experiment 20001451 PARAMETER Experiment Name: At_Far-red-induction_P Parameter: Age (day) Value: 7
  misc_feature: MA Experiment 20001451 PARAMETER Experiment Name: At_Far-red-induction_P Parameter: Light Value: Far-red vs. White
  misc_feature: MA Experiment 20001451 PARAMETER Experiment Name: At_Far-red-induction_P Parameter: Organism Value: A. thaliana
  misc_feature: MA Experiment 20001451 PARAMETER Experiment Name: At_Far-red-induction_P Parameter: Plant Line Value: Columbia
  misc_feature: MA Experiment 20001451 PARAMETER Experiment Name: At_Far-red-induction_P Parameter: Timepoint (hr) Value: 24
  misc_feature: MA Experiment 20001451 PARAMETER Experiment Name: At_Far-red-induction_P Parameter: Tissue Value: Whole Plant
accaatctcagagcaaattatatacactactacttcttgatcttttgtactatacaaacatatggctccaagaacctctcttgcactcttcgtttctctcaacctcctcttcttcacttgcacctctgcaaccacagggacttgtcctatacagatcagtacttgtgccaatgtgctcaatctagtggacctaacattgggaaacccacctgtaaagccatgttgctcgctcatccaaggcttggctgaccttgaggctgcggcctgcctctgcactgcgctcaaagctagcattcttggaattgtcaatattaaccttcctatcaatctcagcgtactcctcaatgtttgtagtaggaatgctccaaagggtttccagtgcgcgtaagttgaatacctatgacatacctataaaacaaacgaatcatactgatacttgaacatgttttcttatctacttgttgttgttctaaggtttttttttttcttggattgttaaaaatgaacgtacgttctgatgcaataatggaaatggagttgtgtgtataattggcaagtttatatctactccttcgcttcgttgttccttcgtctcttctttgtaattgtgtatttcaaatttgcttaataaaaatatgggtgaaagacc

SEQ ID NO: 44041 - protein, 108 aa, Arabidopsis thaliana
  peptide (1)..(108): Ceres Seq. ID no. 13509775
  misc_feature (28)..(107): Pfam Name: Protease inhibitor/seed storage/LTP family Pfam Description: Protease inhibitor/seed storage/LTP family
  misc_feature (22)..(107): Homolog of NCBI NO: 15221201 NR Description: protease inhibitor/seed storage/lipid transfer
  misc_feature (6)..(29): Homolog of NCBI NO: 7484770 NR Description: extensin like protein - black poplar
  misc_feature (22)..(108): Homolog of NCBI NO: 7484770 NR Description: extensin like protein - black poplar
  misc_feature (5)..(28): Homolog of NCBI NO: 15235390 NR Description: protease inhibitor/seed storage/lipid transfer
  misc_feature (21)..(108): Homolog of NCBI NO: 15235390 NR Description: protease inhibitor/seed storage/lipid transfer
  misc_feature (4)..(108): Homolog of NCBI NO: 11357189 NR Description: auxin-induced protein AIR1
  misc_feature (1)..(108): Homolog of NCBI NO: 15235406 NR Description: protease inhibitor/seed storage/lipid transfer
  misc_feature (1)..(108): Homolog of NCBI NO: 21554111 NR Description: putative cell wall-plasma membrane disconnecting
  misc_feature (1)..(108): Homolog of NCBI NO: 30682157 NR Description: protease inhibitor/seed storage/lipid transfer
MAPRTSLALFVSLNLLFFTCTSATTGTCPIQISTCANVLNLVDLTLGNPPVKPCCSLIQGLADLEAAACLCTALKASILGIVNINLPINLSVLLNVCSRNAPKGFQCA

SEQ ID NO: 44042 - protein, 82 aa, Arabidopsis thaliana
  peptide (1)..(82): Ceres Seq. ID no. 13509776
TNLRANYIHYYFLIFCTIQTYGSKNLSCTLRFSQPPLLHLHLCNHRDLSYTDQYLCQCAQSSGPNIGKPTCKAMLLAHPRLG

SEQ ID NO: 44043 - protein, 60 aa, Arabidopsis thaliana
  peptide (1)..(60): Ceres Seq. ID no. 13509777
QSQSKLYTLLLLDLLYYTNIWLQEPLLHSSFLSTSSSSLAPLQPQGLVLYRSVLVPMCSI

SEQ ID NO: 44044 - DNA, 2165 bp, Arabidopsis thaliana
  misc_feature (1)..(2165): Ceres Seq. ID no. 12600007
  misc_feature: MA Experiment ID: 20000179 Result: Up-regulated in Transcription
  misc_feature: MA Experiment 20000179 PARAMETER Experiment Name: At_Germinating_Seeds_P Parameter: Age (hr) Value: 6 vs. 0
  misc_feature: MA Experiment 20000179 PARAMETER Experiment Name: At_Germinating_Seeds_P Parameter: Tissue Value: Germinating Seeds
  misc_feature: MA Experiment ID: 20000182 Result: Down-regulated in Transcription
  misc_feature: MA Experiment 20000182 PARAMETER Experiment Name: At_2mM_SA_P Parameter: Age (day) Value: 14
  misc_feature: MA Experiment 20000182 PARAMETER Experiment Name: At_2mM_SA_P Parameter: Organism Value: A. thaliana
  misc_feature: MA Experiment 20000182 PARAMETER Experiment Name: At_2mM_SA_P Parameter: Plant Line Value: WS
  misc_feature: MA Experiment 20000182 PARAMETER Experiment Name: At_2mM_SA_P Parameter: Timepoint (hr) Value: 6
  misc_feature: MA Experiment 20000182 PARAMETER Experiment Name: At_2mM_SA_P Parameter: Tissue Value: Aerial
  misc_feature: MA Experiment 20000182 PARAMETER Experiment Name: At_2mM_SA_P Parameter: Treatment Value: 2mM SA vs. No Treatment
  misc_feature: MA Experiment ID: 20000184 Result: Down-regulated in Transcription
  misc_feature: MA Experiment 20000184 PARAMETER Experiment Name: At_Shoots__P Parameter: Age (day) Value: 7
  misc_feature: MA Experiment 20000184 PARAMETER Experiment Name: At_Shoots__P Parameter: Tissue Value: Shoots vs. Whole Plant
  misc_feature: MA Experiment ID: 20000234 Result: Up-regulated in Transcription
  misc_feature: MA Experiment 20000234 PARAMETER Experiment Name: At_Siliques_P Parameter: Age (day) Value: 21
  misc_feature: MA Experiment 20000234 PARAMETER Experiment Name: At_Siliques_P Parameter: Organism Value: A. thaliana
  misc_feature: MA Experiment 20000234 PARAMETER Experiment Name: At_Siliques_P Parameter: Plant Line Value: WS
  misc_feature: MA Experiment 20000234 PARAMETER Experiment Name: At_Siliques_P Parameter: Tissue Value: Less Than 5mm Siliques vs. Whole Plant
  misc_feature: MA Experiment ID: 20000235 Result: Up-regulated in Transcription
  misc_feature: MA Experiment 20000235 PARAMETER Experiment Name: At_Siliques_P Parameter: Age (day) Value: 21
  misc_feature: MA Experiment 20000235 PARAMETER Experiment Name: At_Siliques_P Parameter: Organism Value: A. thaliana
  misc_feature: MA Experiment 20000235 PARAMETER Experiment Name: At_Siliques_P Parameter: Plant Line Value: WS
  misc_feature: MA Experiment 20000235 PARAMETER Experiment Name: At_Siliques_P Parameter: Tissue Value: 5-10mm Siliques vs. Whole Plant
  misc_feature: MA Experiment ID: 20000438 Result: Down-regulated in Transcription
  misc_feature: MA Experiment 20000438 PARAMETER Experiment Name: At_Shoots__P Parameter: Age (day) Value: 14
  misc_feature: MA Experiment 20000438 PARAMETER Experiment Name: At_Shoots__P Parameter: Tissue Value: Shoots vs. Whole Plant
  misc_feature: MA Experiment ID: 20000495 Result: Up-regulated in Transcription
  misc_feature: MA Experiment 20000495 PARAMETER Experiment Name: At_Guard_Cells_P Parameter: Harvest Date Value: 8/2/2002
  misc_feature: MA Experiment 20000495 PARAMETER Experiment Name: At_Guard_Cells_P Parameter: Organism Value: A. thaliana
  misc_feature: MA Experiment 20000495 PARAMETER Experiment Name: At_Guard_Cells_P Parameter: Tissue Value: Guard Cells vs. Leaves
  misc_feature: MA Experiment ID: 20001247 Result: Down-regulated in Transcription
  misc_feature: MA Experiment 20001247 PARAMETER Experiment Name: At_Far-red-induction_P Parameter: Age (day) Value: 7
  misc_feature: MA Experiment 20001247 PARAMETER Experiment Name: At_Far-red-induction_P Parameter: Light Value: Far-red vs. White
  misc_feature: MA Experiment 20001247 PARAMETER Experiment Name: At_Far-red-induction_P Parameter: Organism Value: A. thaliana
  misc_feature: MA Experiment 20001247 PARAMETER Experiment Name: At_Far-red-induction_P Parameter: Plant Line Value: Columbia
  misc_feature: MA Experiment 20001247 PARAMETER Experiment Name: At_Far-red-induction_P Parameter: Timepoint (hr) Value: 1
  misc_feature: MA Experiment 20001247 PARAMETER Experiment Name: At_Far-red-induction_P Parameter: Tissue Value: Whole Plant
  misc_feature: MA Experiment ID: 20001248 Result: Up-regulated in Transcription
  misc_feature: MA Experiment 20001248 PARAMETER Experiment Name: At_Far-red-induction_P Parameter: Age (day) Value: 7
  misc_feature: MA Experiment 20001248 PARAMETER Experiment Name: At_Far-red-induction_P Parameter: Light Value: Far-red vs. White
  misc_feature: MA Experiment 20001248 PARAMETER Experiment Name: At_Far-red-induction_P Parameter: Organism Value: A. thaliana
  misc_feature: MA Experiment 20001248 PARAMETER Experiment Name: At_Far-red-induction_P Parameter: Plant Line Value: Columbia
  misc_feature: MA Experiment 20001248 PARAMETER Experiment Name: At_Far-red-induction_P Parameter: Timepoint (hr) Value: 4
  misc_feature: MA Experiment 20001248 PARAMETER Experiment Name: At_Far-red-induction_P Parameter: Tissue Value: Whole Plant
  misc_feature: MA Experiment ID: 20001451 Result: Down-regulated in Transcription
  misc_feature: MA Experiment 20001451 PARAMETER Experiment Name: At_Far-red-induction_P Parameter: Age (day) Value: 7
  misc_feature: MA Experiment 20001451 PARAMETER Experiment Name: At_Far-red-induction_P Parameter: Light Value: Far-red vs. White
  misc_feature: MA Experiment 20001451 PARAMETER Experiment Name: At_Far-red-induction_P Parameter: Organism Value: A. thaliana
  misc_feature: MA Experiment 20001451 PARAMETER Experiment Name: At_Far-red-induction_P Parameter: Plant Line Value: Columbia
  misc_feature: MA Experiment 20001451 PARAMETER Experiment Name: At_Far-red-induction_P Parameter: Timepoint (hr) Value: 24
  misc_feature: MA Experiment 20001451 PARAMETER Experiment Name: At_Far-red-induction_P Parameter: Tissue Value: Whole Plant
  misc_feature: MA Experiment ID: 20001557 Result: Up-regulated in Transcription
  misc_feature: MA Experiment 20001557 PARAMETER Experiment Name: At_Drought_Soil_Dry_P Parameter: Age (day) Value: 27
  misc_feature: MA Experiment 20001557 PARAMETER Experiment Name: At_Drought_Soil_Dry_P Parameter: Organism Value: A. thaliana
  misc_feature: MA Experiment 20001557 PARAMETER Experiment Name: At_Drought_Soil_Dry_P Parameter: Plant Line Value: WS
  misc_feature: MA Experiment 20001557 PARAMETER Experiment Name: At_Drought_Soil_Dry_P Parameter: Post Timepoint (hr) Value: 3
  misc_feature: MA Experiment 20001557 PARAMETER Experiment Name: At_Drought_Soil_Dry_P Parameter: Post-Treatment Value: Re-Water vs. No Drought
  misc_feature: MA Experiment 20001557 PARAMETER Experiment Name: At_Drought_Soil_Dry_P Parameter: Timepoint (day) Value: 13
  misc_feature: MA Experiment 20001557 PARAMETER Experiment Name: At_Drought_Soil_Dry_P Parameter: Treatment Value: Drought vs. No Drought
  misc_feature: MA Experiment ID: 20001560 Result: Up-regulated in Transcription
  misc_feature: MA Experiment 20001560 PARAMETER Experiment Name: At_Drought_Soil_Dry_P Parameter: Age (day) Value: 28
  misc_feature: MA Experiment 20001560 PARAMETER Experiment Name: At_Drought_Soil_Dry_P Parameter: Organism Value: A. thaliana
  misc_feature: MA Experiment 20001560 PARAMETER Experiment Name: At_Drought_Soil_Dry_P Parameter: Plant Line Value: WS
  misc_feature: MA Experiment 20001560 PARAMETER Experiment Name: At_Drought_Soil_Dry_P Parameter: Post Timepoint (hr) Value: None
  misc_feature: MA Experiment 20001560 PARAMETER Experiment Name: At_Drought_Soil_Dry_P Parameter: Post-Treatment Value: None
  misc_feature: MA Experiment 20001560 PARAMETER Experiment Name: At_Drought_Soil_Dry_P Parameter: Timepoint (day) Value: 14
  misc_feature: MA Experiment 20001560 PARAMETER Experiment Name: At_Drought_Soil_Dry_P Parameter: Treatment Value: Drought vs. No Drought
  misc_feature: MA Experiment ID: 20001906 Result: Down-regulated in Transcription
  misc_feature: MA Experiment 20001906 PARAMETER Experiment Name: At_Drought_Reproduction_P Parameter: Age (day) Value: 35
  misc_feature: MA Experiment 20001906 PARAMETER Experiment Name: At_Drought_Reproduction_P Parameter: Organism Value: A. thaliana
  misc_feature: MA Experiment 20001906 PARAMETER Experiment Name: At_Drought_Reproduction_P Parameter: Plant Line Value: WS
  misc_feature: MA Experiment 20001906 PARAMETER Experiment Name: At_Drought_Reproduction_P Parameter: Timepoint (day) Value: 5
  misc_feature: MA Experiment 20001906 PARAMETER Experiment Name: At_Drought_Reproduction_P Parameter: Tissue Value: Siliques
  misc_feature: MA Experiment 20001906 PARAMETER Experiment Name: At_Drought_Reproduction_P Parameter: Treatment Value: Drought vs. No Drought
  misc_feature: MA Experiment ID: 20001911 Result: Down-regulated in Transcription
  misc_feature: MA Experiment 20001911 PARAMETER Experiment Name: At_Drought_Reproduction_P Parameter: Age (day) Value: 40
  misc_feature: MA Experiment 20001911 PARAMETER Experiment Name: At_Drought_Reproduction_P Parameter: Organism Value: A. thaliana
  misc_feature: MA Experiment 20001911 PARAMETER Experiment Name: At_Drought_Reproduction_P Parameter: Plant Line Value: WS
  misc_feature: MA Experiment 20001911 PARAMETER Experiment Name: At_Drought_Reproduction_P Parameter: Timepoint (day) Value: 10
  misc_feature: MA Experiment 20001911 PARAMETER Experiment Name: At_Drought_Reproduction_P Parameter: Tissue Value: Flowers
  misc_feature: MA Experiment 20001911 PARAMETER Experiment Name: At_Drought_Reproduction_P Parameter: Treatment Value: Drought vs. No Drought
aaagtgtttattttcagatctcatcgatccatttcttctaaatcttaattcttgtgtgtattgtattgatcaaagatccaaactttcattgctgatccagccgttttagtcttcagtgaggtttggttttggtgttatagaattatgaagagcgggaagcaatcttcgcaacctgaaaagggtacttccaggatcttgtcactgactgtcctgtttatcgcattttgcggtttctccttctacctcggtggtatattttgctctgagagagacaagattgtagccaaggatgtcacaaggacgactacaaaggctgtagcttcccctaaagaacctacagctactcctattcaaatcaaatccgtttctttcccggagtgcgggtcagagttccaagattacaccccgtgcaccgatccaaagaggtggaagaagtatggtgtccatcgcttaagtttcttggagcgtcattgtcctccggtatatgaaaagaatgagtgtttgattccaccaccagacgggtataaaccgcctataagatggcccaagagccgagaacagtgttggtacaggaacgtgccttatgattggatcaataagcaaaagtctaaccagcattggcttaagaaagaaggagataagttccatttccctggtggtggtaccatgttccctcgtggagttagtcactatgttgatttgatgcaagatctgattcctgaaatgaaagacggaacagtcaggaccgccattgatactggctgtggggttgcgagctggggaggcgatcttttggaccgtgggatactatcactctctcttgctccaagagataaccatgaagctcaggttcaatttgctcttgaacgtggaattcctgcgattctcgggatcatctctacgcaacgtctcccttttccttcaaatgcatttgatatggctcattgttcaagatgtcttattccctggacagaatttggtggaatctatttacttgagattcaccgtatagttcgacctggaggtttttgggttctttctggtccacctgtgaactataatagacgatggcgtggatggaacacaaccatggaagatcagaaatctgactacaacaagcttcagtcacttctaacctccatgtgtttcaaaaagtacgctcaaaaagatgacatagccgtgtggcagaaactctcagacaaatcttgctatgacaaaatcgctaagaacatggaagcttaccctcccaaatgtgacgacagtatagaacctgattctgcttggtacactccactccgtccttgcgtggttgccccgacacctaaagtcaagaagtctggtctcggatcaatcccaaaatggcccgagaggttacatgtcgcgcccgagagaatcggtgatgttcacggagggagtgcgaacagtttgaaacacgatgatggtaaatggaagaacagagttaagcattacaagaaagttttaccagctcttgggacagacaagataagaaatgttatggatatgaacactgtttatggaggtttctctgcggccctcattgaggatcccatttgggtcatgaacgttgtatcatcgtacagcgcaaattcgcttcctgttgtctttgatcgcggtctcatcgggacttaccacgactggtgcgaagctttctcaacgtatccaagaacatatgatcttcttcacctcgacagtctttttaccttggagagtcacaggtgtgagatgaagtacattttgctagagatggacaggatcttgcggccgagtggatatgttataatccgagaatcgagttatttcatggacgcaatcacaacgttagcgaaagggataaggtggagttgccggagagaggagactgagtatgcagtcaaaagtgagaagattctggtttgccagaaaaagctatggttttcgtcaaaccaaacctcttgatgagaccacctgtatcatagtgtttatcatctcctgtgatgcacactacagagagaaggatctagtcctttgagtccaagatatagctctataaacaatctcctttttttgttctctttaatttcttgggtatttcacggtatagattgatattatatattttttaattatatttttaatatatagatatattagtatgtggtttaaac

SEQ ID NO: 44045 - protein, 603 aa, Arabidopsis thaliana
  peptide (1)..(603): Ceres Seq. ID no. 12600008
  misc_feature (85)..(593): Pfam Name: Putative methyltransferase Pfam Description: Putative methyltransferase
  misc_feature (76)..(603): Homolog of NCBI NO: 6752888 NR Description: unknown [Malus x domestica]
  misc_feature (76)..(279): Homolog of NCBI NO: 9665165 NR Description: Unknown Protein [Arabidopsis thaliana]
  misc_feature (256)..(596): Homolog of NCBI NO: 9665165 NR Description: Unknown Protein [Arabidopsis thaliana]
  misc_feature (76)..(596): Homolog of NCBI NO: 18398763 NR Description: unknown protein; protein id: At1g33170.1
  misc_feature (64)..(596): Homolog of NCBI NO: 15236921 NR Description: hypothetical protein; protein id: At4g00750.1
  misc_feature (68)..(596): Homolog of NCBI NO: 15225560 NR Description: hypothetical protein; protein id: At2g45750.1
  misc_feature (76)..(596): Homolog of NCBI NO: 24413975 NR Description: hypothetical protein~similar to Oryza sativa
  misc_feature (76)..(596): Homolog of NCBI NO: 15235080 NR Description: putative protein; protein id: At4g10440.1
  misc_feature (93)..(550): Homolog of NCBI NO: 7487142 NR Description: hypothetical protein T18B16.90 - Arabidopsis
  misc_feature (11)..(603): Homolog of NCBI NO: 18415244 NR Description: putative protein
MKSGKQSSQPEKGTSRILSLTVLFIAFCGFSFYLGGIFCSERDKIVAKDVTRTTTKAVASPKEPTATPIQIKSVSFPECGSEFQDYTPCTDPKRWKKYGVHRLSFLERHCPPVYEKNECLIPPPDGYKPPIRWPKSREQCWYRNVPYDWINKQKSNQHWLKKEGDKFHFPGGGTMFPRGVSHYVDLMQDLIPEMKDGTVRTAIDTGCGVASWGGDLLDRGILSLSLAPRDNHEAQVQFALERGIPAILGIISTQRLPFPSNAFDMAHCSRCLIPWTEFGGIYLLEIHRIVRPGGFWVLSGPPVNYNRRWRGWNTTMEDQKSDYNKLQSLLTSMCFKKYAQKDDIAVWQKLSDKSCYDKIAKNMEAYPPKCDDSIEPDSAWYTPLRPCVVAPTPKVKKSGLGSIPKWPERLHVAPERIGDVHGGSANSLKHDDGKWKNRVKHYKKVLPALGTDKIRNVMDMNTVYGGFSAALIEDPIWVMNVVSSYSANSLPVVFDRGLIGTYHDWCEAFSTYPRTYDLLHLDSLFTLESHRCEMKYILLEMDRILRPSGYVIIRESSYFMDAITTLAKGIRWSCRREETEYAVKSEKILVCQKKLWFSSNQTS

SEQ ID NO: 44046 - protein, 429 aa, Arabidopsis thaliana
  peptide (1)..(429): Ceres Seq. ID no. 12600009
  misc_feature (1)..(419): Pfam Name: Putative methyltransferase Pfam Description: Putative methyltransferase
  misc_feature (1)..(429): Homolog of NCBI NO: 6752888 NR Description: unknown [Malus x domestica]
  misc_feature (1)..(105): Homolog of NCBI NO: 9665165 NR Description: Unknown Protein [Arabidopsis thaliana]
  misc_feature (82)..(422): Homolog of NCBI NO: 9665165 NR Description: Unknown Protein [Arabidopsis thaliana]
  misc_feature (1)..(422): Homolog of NCBI NO: 18398763 NR Description: unknown protein; protein id: At1g33170.1
  misc_feature (1)..(422): Homolog of NCBI NO: 15236921 NR Description: hypothetical protein; protein id: At4g00750.1
  misc_feature (1)..(422): Homolog of NCBI NO: 15225560 NR Description: hypothetical protein; protein id: At2g45750.1
  misc_feature (1)..(422): Homolog of NCBI NO: 24413975 NR Description: hypothetical protein~similar to Oryza sativa
  misc_feature (1)..(422): Homolog of NCBI NO: 15235080 NR Description: putative protein; protein id: At4g10440.1
  misc_feature (1)..(376): Homolog of NCBI NO: 7487142 NR Description: hypothetical protein T18B16.90 - Arabidopsis
  misc_feature (1)..(429): Homolog of NCBI NO: 18415244 NR Description: putative protein
MFPRGVSHYVDLMQDLIPEMKDGTVRTAIDTGCGVASWGGDLLDRGILSLSLAPRDNHEAQVQFALERGIPAILGIISTQRLPFPSNAFDMAHCSRCLIPWTEFGGIYLLEIHRIVRPGGFWVLSGPPVNYNRRWRGWNTTMEDQKSDYNKLQSLLTSMCFKKYAQKDDIAVWQKLSDKSCYDKIAKNMEAYPPKCDDSIEPDSAWYTPLRPCVVAPTPKVKKSGLGSIPKWPERLHVAPERIGDVHGGSANSLKHDDGKWKNRVKHYKKVLPALGTDKIRNVMDMNTVYGGFSAALIEDPIWVMNVVSSYSANSLPVVFDRGLIGTYHDWCEAFSTYPRTYDLLHLDSLFTLESHRCEMKYILLEMDRILRPSGYVIIRESSYFMDAITTLAKGIRWSCRREETEYAVKSEKILVCQKKLWFSSNQTS

SEQ ID NO: 44047 - protein, 417 aa, Arabidopsis thaliana
  peptide (1)..(417): Ceres Seq. ID no. 12600010
  misc_feature (1)..(407): Pfam Name: Putative methyltransferase Pfam Description: Putative methyltransferase
  misc_feature (1)..(417): Homolog of NCBI NO: 6752888 NR Description: unknown [Malus x domestica]
  misc_feature (1)..(93): Homolog of NCBI NO: 9665165 NR Description: Unknown Protein [Arabidopsis thaliana]
  misc_feature (70)..(410): Homolog of NCBI NO: 9665165 NR Description: Unknown Protein [Arabidopsis thaliana]
  misc_feature (1)..(410): Homolog of NCBI NO: 18398763 NR Description: unknown protein; protein id: At1g33170.1
  misc_feature (1)..(410): Homolog of NCBI NO: 15236921 NR Description: hypothetical protein; protein id: At4g00750.1
  misc_feature (1)..(410): Homolog of NCBI NO: 15225560 NR Description: hypothetical protein; protein id: At2g45750.1
  misc_feature (1)..(410): Homolog of NCBI NO: 24413975 NR Description: hypothetical protein~similar to Oryza sativa
  misc_feature (1)..(410): Homolog of NCBI NO: 15235080 NR Description: putative protein; protein id: At4g10440.1
  misc_feature (1)..(364): Homolog of NCBI NO: 7487142 NR Description: hypothetical protein T18B16.90 - Arabidopsis
  misc_feature (1)..(417): Homolog of NCBI NO: 18415244 NR Description: putative protein
MQDLIPEMKDGTVRTAIDTGCGVASWGGDLLDRGILSLSLAPRDNHEAQVQFALERGIPAILGIISTQRLPFPSNAFDMAHCSRCLIPWTEFGGIYLLEIHRIVRPGGFWVLSGPPVNYNRRWRGWNTTMEDQKSDYNKLQSLLTSMCFKKYAQKDDIAVWQKLSDKSCYDKIAKNMEAYPPKCDDSIEPDSAWYTPLRPCVVAPTPKVKKSGLGSIPKWPERLHVAPERIGDVHGGSANSLKHDDGKWKNRVKHYKKVLPALGTDKIRNVMDMNTVYGGFSAALIEDPIWVMNVVSSYSANSLPVVFDRGLIGTYHDWCEAFSTYPRTYDLLHLDSLFTLESHRCEMKYILLEMDRILRPSGYVIIRESSYFMDAITTLAKGIRWSCRREETEYAVKSEKILVCQKKLWFSSNQTS

SEQ ID NO: 44048 - DNA, 1652 bp, Arabidopsis thaliana
  misc_feature (1)..(1652): Ceres Seq. ID no. 13647117
  misc_feature: MA Experiment ID: 108434 Result: Up-regulated in Transcription
  misc_feature: MA Experiment 108434 PARAMETER Experiment Name: At_Root_Tips_cDNA_P Parameter: Tissue Value: Root Tips
  misc_feature: MA Experiment ID: 108463 Result: Down-regulated in Transcription
  misc_feature: MA Experiment 108463 PARAMETER Experiment Name: At_Germinating_Seeds_cDNA_P Parameter: Age (day) Value: 3 vs. 0
  misc_feature: MA Experiment 108463 PARAMETER Experiment Name: At_Germinating_Seeds_cDNA_P Parameter: Tissue Value: Germinating Seeds
  misc_feature: MA Experiment ID: 108572 Result: Down-regulated in Transcription
  misc_feature: MA Experiment 108572 PARAMETER Experiment Name: At_Drought_cDNA_P Parameter: Timepoint (hr) Value: 1
  misc_feature: MA Experiment 108572 PARAMETER Experiment Name: At_Drought_cDNA_P Parameter: Tissue Value: Aerial
  misc_feature: MA Experiment 108572 PARAMETER Experiment Name: At_Drought_cDNA_P Parameter: Treatment Value: Drought vs. No Drought
  misc_feature: MA Experiment ID: 108573 Result: Up-regulated in Transcription
  misc_feature: MA Experiment 108573 PARAMETER Experiment Name: At_Drought_cDNA_P Parameter: Timepoint (hr) Value: 6
  misc_feature: MA Experiment 108573 PARAMETER Experiment Name: At_Drought_cDNA_P Parameter: Tissue Value: Aerial
  misc_feature: MA Experiment 108573 PARAMETER Experiment Name: At_Drought_cDNA_P Parameter: Treatment Value: Drought vs. No Drought
  misc_feature: MA Experiment ID: 108594 Result: Down-regulated in Transcription
  misc_feature: MA Experiment 108594 PARAMETER Experiment Name: At_Ler-rhl_Root_cDNA_P Parameter: Plant Line Value: null
  misc_feature: MA Experiment ID: 108595 Result: Down-regulated in Transcription
  misc_feature: MA Experiment 108595 PARAMETER Experiment Name: At_Ler-pi_Ovule_cDNA_P Parameter: Plant Line Value: null
  misc_feature: MA Experiment ID: 108607 Result: Down-regulated in Transcription
  misc_feature: MA Experiment 108607 PARAMETER Experiment Name: At_100uM_ABA_cDNA_P Parameter: Timepoint (hr) Value: 4
  misc_feature: MA Experiment 108607 PARAMETER Experiment Name: At_100uM_ABA_cDNA_P Parameter: Tissue Value: Aerial
  misc_feature: MA Experiment 108607 PARAMETER Experiment Name: At_100uM_ABA_cDNA_P Parameter: Treatment Value: 100uM ABA vs. No Treatment
  misc_feature: MA Experiment ID: 108668 Result: Down-regulated in Transcription
  misc_feature: MA Experiment 108668 PARAMETER Experiment Name: At_2mM_SA_cDNA_P Parameter: Plant Line Value: WS
  misc_feature: MA Experiment 108668 PARAMETER Experiment Name: At_2mM_SA_cDNA_P Parameter: Timepoint (hr) Value: 6
  misc_feature: MA Experiment 108668 PARAMETER Experiment Name: At_2mM_SA_cDNA_P Parameter: Treatment Value: 2mM SA vs. No Treatment
  misc_feature: MA Experiment ID: 20000087 Result: Down-regulated in Transcription
  misc_feature: MA Experiment 20000087 PARAMETER Experiment Name: At_100uM_ABA_Mutants_cDNA_P Parameter: Plant Line Value: WS
  misc_feature: MA Experiment 20000087 PARAMETER Experiment Name: At_100uM_ABA_Mutants_cDNA_P Parameter: Timepoint (hr) Value: 6
  misc_feature: MA Experiment 20000087 PARAMETER Experiment Name: At_100uM_ABA_Mutants_cDNA_P Parameter: Tissue Value: Aerial
  misc_feature: MA Experiment 20000087 PARAMETER Experiment Name: At_100uM_ABA_Mutants_cDNA_P Parameter: Treatment Value: 100uM ABA vs. No Treatment
  misc_feature: MA Experiment ID: 20000182 Result: Down-regulated in Transcription
  misc_feature: MA Experiment 20000182 PARAMETER Experiment Name: At_2mM_SA_P Parameter: Age (day) Value: 14
  misc_feature: MA Experiment 20000182 PARAMETER Experiment Name: At_2mM_SA_P Parameter: Organism Value: A. thaliana
  misc_feature: MA Experiment 20000182 PARAMETER Experiment Name: At_2mM_SA_P Parameter: Plant Line Value: WS
  misc_feature: MA Experiment 20000182 PARAMETER Experiment Name: At_2mM_SA_P Parameter: Timepoint (hr) Value: 6
  misc_feature: MA Experiment 20000182 PARAMETER Experiment Name: At_2mM_SA_P Parameter: Tissue Value: Aerial
  misc_feature: MA Experiment 20000182 PARAMETER Experiment Name: At_2mM_SA_P Parameter: Treatment Value: 2mM SA vs. No Treatment
  misc_feature: MA Experiment ID: 20000224 Result: Down-regulated in Transcription
  misc_feature: MA Experiment ID: 20000437 Result: Down-regulated in Transcription
  misc_feature: MA Experiment 20000437 PARAMETER Experiment Name: At_Drought_P Parameter: Age (day) Value: 8
  misc_feature: MA Experiment 20000437 PARAMETER Experiment Name: At_Drought_P Parameter: Organism Value: A. thaliana
  misc_feature: MA Experiment 20000437 PARAMETER Experiment Name: At_Drought_P Parameter: Plant Line Value: WS
  misc_feature: MA Experiment 20000437 PARAMETER Experiment Name: At_Drought_P Parameter: Timepoint (hr) Value: 24
  misc_feature: MA Experiment 20000437 PARAMETER Experiment Name: At_Drought_P Parameter: Tissue Value: Whole Plant
  misc_feature: MA Experiment 20000437 PARAMETER Experiment Name: At_Drought_P Parameter: Treatment Value: Drought vs. No Drought
  misc_feature: MA Experiment ID: 20001248 Result: Up-regulated in Transcription
  misc_feature: MA Experiment 20001248 PARAMETER Experiment Name: At_Far-red-induction_P Parameter: Age (day) Value: 7
  misc_feature: MA Experiment 20001248 PARAMETER Experiment Name: At_Far-red-induction_P Parameter: Light Value: Far-red vs. White
  misc_feature: MA Experiment 20001248 PARAMETER Experiment Name: At_Far-red-induction_P Parameter: Organism Value: A. thaliana
  misc_feature: MA Experiment 20001248 PARAMETER Experiment Name: At_Far-red-induction_P Parameter: Plant Line Value: Columbia
  misc_feature: MA Experiment 20001248 PARAMETER Experiment Name: At_Far-red-induction_P Parameter: Timepoint (hr) Value: 4
  misc_feature: MA Experiment 20001248 PARAMETER Experiment Name: At_Far-red-induction_P Parameter: Tissue Value: Whole Plant
  misc_feature: MA Experiment ID: 20001554 Result: Down-regulated in Transcription
  misc_feature: MA Experiment 20001554 PARAMETER Experiment Name: At_Drought_Soil_Dry_P Parameter: Age (day) Value: 21
  misc_feature: MA Experiment 20001554 PARAMETER Experiment Name: At_Drought_Soil_Dry_P Parameter: Organism Value: A. thaliana
  misc_feature: MA Experiment 20001554 PARAMETER Experiment Name: At_Drought_Soil_Dry_P Parameter: Plant Line Value: WS
  misc_feature: MA Experiment 20001554 PARAMETER Experiment Name: At_Drought_Soil_Dry_P Parameter: Post Timepoint (hr) Value: None
  misc_feature: MA Experiment 20001554 PARAMETER Experiment Name: At_Drought_Soil_Dry_P Parameter: Post-Treatment Value: None
  misc_feature: MA Experiment 20001554 PARAMETER Experiment Name: At_Drought_Soil_Dry_P Parameter: Timepoint (day) Value: 7
  misc_feature: MA Experiment 20001554 PARAMETER Experiment Name: At_Drought_Soil_Dry_P Parameter: Treatment Value: Drought vs. No Drought
  misc_feature: MA Experiment ID: 20001555 Result: Down-regulated in Transcription
  misc_feature: MA Experiment 20001555 PARAMETER Experiment Name: At_Drought_Soil_Dry_P Parameter: Age (day) Value: 24
  misc_feature: MA Experiment 20001555 PARAMETER Experiment Name: At_Drought_Soil_Dry_P Parameter: Organism Value: A. thaliana
  misc_feature: MA Experiment 20001555 PARAMETER Experiment Name: At_Drought_Soil_Dry_P Parameter: Plant Line Value: WS
  misc_feature: MA Experiment 20001555 PARAMETER Experiment Name: At_Drought_Soil_Dry_P Parameter: Post Timepoint (hr) Value: None
  misc_feature: MA Experiment 20001555 PARAMETER Experiment Name: At_Drought_Soil_Dry_P Parameter: Post-Treatment Value: None
  misc_feature: MA Experiment 20001555 PARAMETER Experiment Name: At_Drought_Soil_Dry_P Parameter: Timepoint (day) Value: 10
  misc_feature: MA Experiment 20001555 PARAMETER Experiment Name: At_Drought_Soil_Dry_P Parameter: Treatment Value: Drought vs. No Drought
  misc_feature: MA Experiment ID: 20001556 Result: Down-regulated in Transcription
  misc_feature: MA Experiment 20001556 PARAMETER Experiment Name: At_Drought_Soil_Dry_P Parameter: Age (day) Value: 26
  misc_feature: MA Experiment 20001556 PARAMETER Experiment Name: At_Drought_Soil_Dry_P Parameter: Organism Value: A. thaliana
  misc_feature: MA Experiment 20001556 PARAMETER Experiment Name: At_Drought_Soil_Dry_P Parameter: Plant Line Value: WS
  misc_feature: MA Experiment 20001556 PARAMETER Experiment Name: At_Drought_Soil_Dry_P Parameter: Post Timepoint (hr) Value: None
  misc_feature: MA Experiment 20001556 PARAMETER Experiment Name: At_Drought_Soil_Dry_P Parameter: Post-Treatment Value: None
  misc_feature: MA Experiment 20001556 PARAMETER Experiment Name: At_Drought_Soil_Dry_P Parameter: Timepoint (day) Value: 12
  misc_feature: MA Experiment 20001556 PARAMETER Experiment Name: At_Drought_Soil_Dry_P Parameter: Treatment Value: Drought vs. No Drought
  misc_feature: MA Experiment ID: 20001557 Result: Up-regulated in Transcription
  misc_feature: MA Experiment 20001557 PARAMETER Experiment Name: At_Drought_Soil_Dry_P Parameter: Age (day) Value: 27
  misc_feature: MA Experiment 20001557 PARAMETER Experiment Name: At_Drought_Soil_Dry_P Parameter: Organism Value: A. thaliana
  misc_feature: MA Experiment 20001557 PARAMETER Experiment Name: At_Drought_Soil_Dry_P Parameter: Plant Line Value: WS
  misc_feature: MA Experiment 20001557 PARAMETER Experiment Name: At_Drought_Soil_Dry_P Parameter: Post Timepoint (hr) Value: 3
  misc_feature: MA Experiment 20001557 PARAMETER Experiment Name: At_Drought_Soil_Dry_P Parameter: Post-Treatment Value: Re-Water vs. No Drought
  misc_feature: MA Experiment 20001557 PARAMETER Experiment Name: At_Drought_Soil_Dry_P Parameter: Timepoint (day) Value: 13
  misc_feature: MA Experiment 20001557 PARAMETER Experiment Name: At_Drought_Soil_Dry_P Parameter: Treatment Value: Drought vs. No Drought
  misc_feature: MA Experiment ID: 20001558 Result: Up-regulated in Transcription
  misc_feature: MA Experiment 20001558 PARAMETER Experiment Name: At_Drought_Soil_Dry_P Parameter: Age (day) Value: 27
  misc_feature: MA Experiment 20001558 PARAMETER Experiment Name: At_Drought_Soil_Dry_P Parameter: Organism Value: A. thaliana
  misc_feature: MA Experiment 20001558 PARAMETER Experiment Name: At_Drought_Soil_Dry_P Parameter: Plant Line Value: WS
  misc_feature: MA Experiment 20001558 PARAMETER Experiment Name: At_Drought_Soil_Dry_P Parameter: Post Timepoint (hr) Value: 6
  misc_feature: MA Experiment 20001558 PARAMETER Experiment Name: At_Drought_Soil_Dry_P Parameter: Post-Treatment Value: Re-Water vs. No Drought
  misc_feature: MA Experiment 20001558 PARAMETER Experiment Name: At_Drought_Soil_Dry_P Parameter: Timepoint (day) Value: 13
  misc_feature: MA Experiment 20001558 PARAMETER Experiment Name: At_Drought_Soil_Dry_P Parameter: Treatment Value: Drought vs. No Drought
  misc_feature: MA Experiment ID: 20001559 Result: Down-regulated in Transcription
  misc_feature: MA Experiment 20001559 PARAMETER Experiment Name: At_Drought_Soil_Dry_P Parameter: Age (day) Value: 28
  misc_feature: MA Experiment 20001559 PARAMETER Experiment Name: At_Drought_Soil_Dry_P Parameter: Organism Value: A. thaliana
  misc_feature: MA Experiment 20001559 PARAMETER Experiment Name: At_Drought_Soil_Dry_P Parameter: Plant Line Value: WS
  misc_feature: MA Experiment 20001559 PARAMETER Experiment Name: At_Drought_Soil_Dry_P Parameter: Post Timepoint (hr) Value: 29
  misc_feature: MA Experiment 20001559 PARAMETER Experiment Name: At_Drought_Soil_Dry_P Parameter: Post-Treatment Value: Re-Water vs. No Drought
  misc_feature: MA Experiment 20001559 PARAMETER Experiment Name: At_Drought_Soil_Dry_P Parameter: Timepoint (day) Value: 14
  misc_feature: MA Experiment 20001559 PARAMETER Experiment Name: At_Drought_Soil_Dry_P Parameter: Treatment Value: Drought vs. No Drought
  misc_feature: MA Experiment ID: 20001904 Result: Down-regulated in Transcription
  misc_feature: MA Experiment 20001904 PARAMETER Experiment Name: At_Drought_Reproduction_P Parameter: Age (day) Value: 37
  misc_feature: MA Experiment 20001904 PARAMETER Experiment Name: At_Drought_Reproduction_P Parameter: Organism Value: A. thaliana
  misc_feature: MA Experiment 20001904 PARAMETER Experiment Name: At_Drought_Reproduction_P Parameter: Plant Line Value: WS
  misc_feature: MA Experiment 20001904 PARAMETER Experiment Name: At_Drought_Reproduction_P Parameter: Timepoint (day) Value: 7
  misc_feature: MA Experiment 20001904 PARAMETER Experiment Name: At_Drought_Reproduction_P Parameter: Tissue Value: Rosettes
  misc_feature: MA Experiment 20001904 PARAMETER Experiment Name: At_Drought_Reproduction_P Parameter: Treatment Value: Drought vs. No Drought
  misc_feature: MA Experiment ID: 20001905 Result: Down-regulated in Transcription
  misc_feature: MA Experiment 20001905 PARAMETER Experiment Name: At_Drought_Reproduction_P Parameter: Age (day) Value: 40
  misc_feature: MA Experiment 20001905 PARAMETER Experiment Name: At_Drought_Reproduction_P Parameter: Organism Value: A. thaliana
  misc_feature: MA Experiment 20001905 PARAMETER Experiment Name: At_Drought_Reproduction_P Parameter: Plant Line Value: WS
  misc_feature: MA Experiment 20001905 PARAMETER Experiment Name: At_Drought_Reproduction_P Parameter: Timepoint (day) Value: 10
  misc_feature: MA Experiment 20001905 PARAMETER Experiment Name: At_Drought_Reproduction_P Parameter: Tissue Value: Rosettes
  misc_feature: MA Experiment 20001905 PARAMETER Experiment Name: At_Drought_Reproduction_P Parameter: Treatment Value: Drought vs. No Drought
  misc_feature: MA Experiment ID: 20001911 Result: Down-regulated in Transcription
  misc_feature: MA Experiment 20001911 PARAMETER Experiment Name: At_Drought_Reproduction_P Parameter: Age (day) Value: 40
  misc_feature: MA Experiment 20001911 PARAMETER Experiment Name: At_Drought_Reproduction_P Parameter: Organism Value: A. thaliana
  misc_feature: MA Experiment 20001911 PARAMETER Experiment Name: At_Drought_Reproduction_P Parameter: Plant Line Value: WS
  misc_feature: MA Experiment 20001911 PARAMETER Experiment Name: At_Drought_Reproduction_P Parameter: Timepoint (day) Value: 10
  misc_feature: MA Experiment 20001911 PARAMETER Experiment Name: At_Drought_Reproduction_P Parameter: Tissue Value: Flowers
  misc_feature: MA Experiment 20001911 PARAMETER Experiment Name: At_Drought_Reproduction_P Parameter: Treatment Value: Drought vs. No Drought
aggaaaaaaagaagatctcgctcaccgctctcatttcctcaattctccgtccgtcgaagaagcgaatcgctcgaaattagggtttctactgagagaagatgcgagaaatcataagcattcacatcggacaagctgggatccaggtcggaaattcgtgttgggagctttactgtctcgaacatggaatccagccggacggaatgatgccgagtgatactacagttggtgttgcacacgatgcgttcaatactttctttagcgagactggtgctgggaagcatgtccctagggctgtcttcgttgatctcgagcctaccgttatcgacgaagttcgtactggtacttaccgtcaacttttccatccagagcagctcatttctgggaaagaagatgctgctaacaacttcgctagaggacattacactgttgggaaggaaattgtggatctatgtcttgaccgtgtgaggaaacttgccgacaactgtactggcttacaagggtttttggtgttcaatgctgttggtggtggaactggttctggattgggttctctgttgctagagcgtttgtctgtagattatggaaagaagtctaagcttggttttaccatatacccttctcctcaggtttctactgctgttgtagaaccttacaacagtgttctctcaacgcattcccttcttgaacatacggatgtagctgtcctcttggataacgaagccatctatgacatttgccgcagatccctagatatcgagaggccaacctacacaaacttgaacaggttgatatcacagatcatttcatccttgacaacatctttgaggtttgatggtgccatcaacgtggatatcactgagttccagaccaatcttgtcccatatccccgtatccatttcatgctgtcatcttatgcaccagtcatctcagccgccaaggcttaccacgagcagctatcagtccctgagatcaccaatgccgtttttgagccagctagcatgatggcaaagtgtgacccgagacacggaaagtacatggcctgttgtttgatgtaccgaggagatgttgttcccaaagatgttaatgctgctgttggcaccatcaagacaaagaggactgttcagtttgttgactggtgcccaactgggttcaaatgtggaatcaactaccaacctccaacagttgttccaggtggtgacctcgctaaggttcagagagctgtatgtatgatcagtaacaacacagcagttgcagaggtgttctcacggatcgaccacaagtttgatctcatgtatgcgaagagggcatttgtccactggtacgttggtgaaggaatggaggaaggtgaattctctgaggcacgtgaagacttggccgcactggagaaagattacgaagaagttggtgctgaaggtggagacgatgaagaagatgaaggtgaagactattgacaccttttctcaaaaaaactgcaaccaaaaaaagttttttcgtttatctgttttcacttttgattctgttgattgtttaaatcctgtaaaatattcgttcggtcttcgtgttttatctcggttggatacattttcattggtagagcgaccattgcgagttcccgagttcattatcaagcttttgtgtaccaaactttgata

SEQ ID NO: 44049 - protein, 450 aa, Arabidopsis thaliana; identical to SEQ ID NO: 38746
  peptide (1)..(450): Ceres Seq. ID no. 13647118
  misc_feature (49)..(246): Pfam Name: Tubulin/FtsZ family, GTPase domain Pfam Description: Tubulin/FtsZ family, GTPase domain
  misc_feature (1)..(449): Homolog of NCBI NO: 7271241 NR Description: alpha-tubulin [Miscanthus sinensis]
  misc_feature (1)..(450): Homolog of NCBI NO: 15233627 NR Description: tubulin alpha-6 chain (TUA6) [Arabidopsis
  misc_feature (1)..(450): Homolog of NCBI NO: 15220329 NR Description: tubulin alpha-2/alpha-4 chain (TUA4) [Arabidopsis
  misc_feature (1)..(445): Homolog of NCBI NO: 25396545 NR Description: alpha tubulin [Physcomitrella patens]
  misc_feature (1)..(450): Homolog of NCBI NO: 401161 NR Description: Tubulin alpha-5 chain (Alpha-5 tubulin)
  misc_feature (1)..(450): Homolog of NCBI NO: 8928419 NR Description: Tubulin alpha-1 chain
  misc_feature (1)..(450): Homolog of NCBI NO: 464846 NR Description: Tubulin alpha-6 chain (Alpha-6 tubulin)
  misc_feature (1)..(450): Homolog of NCBI NO: 6094431 NR Description: Tubulin alpha-3 chain (Alpha-3 tubulin)
  misc_feature (1)..(450): Homolog of NCBI NO: 135399 NR Description: Tubulin alpha-1 chain
  misc_feature (1)..(450): Homolog of NCBI NO: 15241168 NR Description: tubulin alpha-3/alpha-5 chain (TUA3) [Arabidopsis

SEQ ID NO: 44050 - protein, 416 aa, Arabidopsis thaliana; identical to SEQ ID NO: 38747
  peptide (1)..(416): Ceres Seq. ID no. 13647119
  misc_feature (15)..(212): Pfam Name: Tubulin/FtsZ family, GTPase domain Pfam Description: Tubulin/FtsZ family, GTPase domain
  misc_feature (1)..(415): Homolog of NCBI NO: 7271241 NR Description: alpha-tubulin [Miscanthus sinensis]
  misc_feature (1)..(416): Homolog of NCBI NO: 15233627 NR Description: tubulin alpha-6 chain (TUA6) [Arabidopsis
  misc_feature (1)..(416): Homolog of NCBI NO: 15220329 NR Description: tubulin alpha-2/alpha-4 chain (TUA4) [Arabidopsis
  misc_feature (1)..(411): Homolog of NCBI NO: 25396545 NR Description: alpha tubulin [Physcomitrella patens]
  misc_feature (1)..(416): Homolog of NCBI NO: 401161 NR Description: Tubulin alpha-5 chain (Alpha-5 tubulin)
  misc_feature (1)..(416): Homolog of NCBI NO: 8928419 NR Description: Tubulin alpha-1 chain
  misc_feature (1)..(416): Homolog of NCBI NO: 464846 NR Description: Tubulin alpha-6 chain (Alpha-6 tubulin)
  misc_feature (1)..(416): Homolog of NCBI NO: 6094431 NR Description: Tubulin alpha-3 chain (Alpha-3 tubulin)
  misc_feature (1)..(416): Homolog of NCBI NO: 135399 NR Description: Tubulin alpha-1 chain
  misc_feature (1)..(416): Homolog of NCBI NO: 15241168 NR Description: tubulin alpha-3/alpha-5 chain (TUA3) [Arabidopsis

SEQ ID NO: 44051 - protein, 415 aa, Arabidopsis thaliana; identical to SEQ ID NO: 38748
  peptide (1)..(415): Ceres Seq. ID no. 13647120
  misc_feature (14)..(211): Pfam Name: Tubulin/FtsZ family, GTPase domain Pfam Description: Tubulin/FtsZ family, GTPase domain
  misc_feature (1)..(414): Homolog of NCBI NO: 7271241 NR Description: alpha-tubulin [Miscanthus sinensis]
  misc_feature (1)..(415): Homolog of NCBI NO: 15233627 NR Description: tubulin alpha-6 chain (TUA6) [Arabidopsis
  misc_feature (1)..(415): Homolog of NCBI NO: 15220329 NR Description: tubulin alpha-2/alpha-4 chain (TUA4) [Arabidopsis
  misc_feature (1)..(410): Homolog of NCBI NO: 25396545 NR Description: alpha tubulin [Physcomitrella patens]
  misc_feature (1)..(415): Homolog of NCBI NO: 401161 NR Description: Tubulin alpha-5 chain (Alpha-5 tubulin)
  misc_feature (1)..(415): Homolog of NCBI NO: 8928419 NR Description: Tubulin alpha-1 chain
  misc_feature (1)..(415): Homolog of NCBI NO: 464846 NR Description: Tubulin alpha-6 chain (Alpha-6 tubulin)
  misc_feature (1)..(415): Homolog of NCBI NO: 6094431 NR Description: Tubulin alpha-3 chain (Alpha-3 tubulin)
  misc_feature (1)..(415): Homolog of NCBI NO: 135399 NR Description: Tubulin alpha-1 chain
  misc_feature (1)..(415): Homolog of NCBI NO: 15241168 NR Description: tubulin alpha-3/alpha-5 chain (TUA3) [Arabidopsis

SEQ ID NO: 44052 - DNA, 1867 bp, Arabidopsis thaliana
  misc_feature (1)..(1867): Ceres Seq. ID no. 13509300
  misc_feature: MA Experiment ID: 20000169 Result: Up-regulated in Transcription
  misc_feature: MA Experiment 20000169 PARAMETER Experiment Name: At_100uM_ABA_P Parameter: Age (day) Value: 14
  misc_feature: MA Experiment 20000169 PARAMETER Experiment Name: At_100uM_ABA_P Parameter: Organism Value: A. thaliana
  misc_feature: MA Experiment 20000169 PARAMETER Experiment Name: At_100uM_ABA_P Parameter: Plant Line Value: WS
  misc_feature: MA Experiment 20000169 PARAMETER Experiment Name: At_100uM_ABA_P Parameter: Timepoint (hr) Value: 6
  misc_feature: MA Experiment 20000169 PARAMETER Experiment Name: At_100uM_ABA_P Parameter: Tissue Value: Aerial
  misc_feature: MA Experiment 20000169 PARAMETER Experiment Name: At_100uM_ABA_P Parameter: Treatment Value: 100uM ABA vs. No Treatment
  misc_feature: MA Experiment ID: 20000171 Result: Down-regulated in Transcription
  misc_feature: MA Experiment 20000171 PARAMETER Experiment Name: At_42deg_Heat_P Parameter: Age (day) Value: 14
  misc_feature: MA Experiment 20000171 PARAMETER Experiment Name: At_42deg_Heat_P Parameter: Organism Value: A. thaliana
  misc_feature: MA Experiment 20000171 PARAMETER Experiment Name: At_42deg_Heat_P Parameter: Plant Line Value: WS
  misc_feature: MA Experiment 20000171 PARAMETER Experiment Name: At_42deg_Heat_P Parameter: Temperature (deg C) Value: 42 vs. 22
  misc_feature: MA Experiment 20000171 PARAMETER Experiment Name: At_42deg_Heat_P Parameter: Timepoint (hr) Value: 1
  misc_feature: MA Experiment 20000171 PARAMETER Experiment Name: At_42deg_Heat_P Parameter: Tissue Value: Aerial
  misc_feature: MA Experiment ID: 20000173 Result: Down-regulated in Transcription
  misc_feature: MA Experiment 20000173 PARAMETER Experiment Name: At_42deg_Heat_P Parameter: Age (day) Value: 14
  misc_feature: MA Experiment 20000173 PARAMETER Experiment Name: At_42deg_Heat_P Parameter: Organism Value: A. thaliana
  misc_feature: MA Experiment 20000173 PARAMETER Experiment Name: At_42deg_Heat_P Parameter: Plant Line Value: WS
  misc_feature: MA Experiment 20000173 PARAMETER Experiment Name: At_42deg_Heat_P Parameter: Temperature (deg C) Value: 42 vs. 22
  misc_feature: MA Experiment 20000173 PARAMETER Experiment Name: At_42deg_Heat_P Parameter: Timepoint (hr) Value: 6
  misc_feature: MA Experiment 20000173 PARAMETER Experiment Name: At_42deg_Heat_P Parameter: Tissue Value: Aerial
  misc_feature: MA Experiment ID: 20000179 Result: Up-regulated in Transcription
  misc_feature: MA Experiment 20000179 PARAMETER Experiment Name: At_Germinating_Seeds_P Parameter: Age (hr) Value: 6 vs. 0
  misc_feature: MA Experiment 20000179 PARAMETER Experiment Name: At_Germinating_Seeds_P Parameter: Tissue Value: Germinating Seeds
  misc_feature: MA Experiment ID: 20000180 Result: Up-regulated in Transcription
  misc_feature: MA Experiment 20000180 PARAMETER Experiment Name: At_Germinating_Seeds_P Parameter: Age (hr) Value: 24 vs. 0
  misc_feature: MA Experiment 20000180 PARAMETER Experiment Name: At_Germinating_Seeds_P Parameter: Tissue Value: Germinating Seeds
  misc_feature: MA Experiment ID: 20000182 Result: Down-regulated in Transcription
  misc_feature: MA Experiment 20000182 PARAMETER Experiment Name: At_2mM_SA_P Parameter: Age (day) Value: 14
  misc_feature: MA Experiment 20000182 PARAMETER Experiment Name: At_2mM_SA_P Parameter: Organism Value: A. thaliana
  misc_feature: MA Experiment 20000182 PARAMETER Experiment Name: At_2mM_SA_P Parameter: Plant Line Value: WS
  misc_feature: MA Experiment 20000182 PARAMETER Experiment Name: At_2mM_SA_P Parameter: Timepoint (hr) Value: 6
  misc_feature: MA Experiment 20000182 PARAMETER Experiment Name: At_2mM_SA_P Parameter: Tissue Value: Aerial
  misc_feature: MA Experiment 20000182 PARAMETER Experiment Name: At_2mM_SA_P Parameter: Treatment Value: 2mM SA vs. No Treatment
  misc_feature: MA Experiment ID: 20000184 Result: Up-regulated in Transcription
  misc_feature: MA Experiment 20000184 PARAMETER Experiment Name: At_Shoots__P Parameter: Age (day) Value: 7
  misc_feature: MA Experiment 20000184 PARAMETER Experiment Name: At_Shoots__P Parameter: Tissue Value: Shoots vs. Whole Plant
  misc_feature: MA Experiment ID: 20000185 Result: Down-regulated in Transcription
  misc_feature: MA Experiment 20000185 PARAMETER Experiment Name: At_Roots__P Parameter: Age (day) Value: 7 vs. 21
  misc_feature: MA Experiment 20000185 PARAMETER Experiment Name: At_Roots__P Parameter: Organism Value: A. thaliana
  misc_feature: MA Experiment 20000185 PARAMETER Experiment Name: At_Roots__P Parameter: Tissue Value: Roots vs. Whole Plant
  misc_feature: MA Experiment ID: 20000234 Result: Up-regulated in Transcription
  misc_feature: MA Experiment 20000234 PARAMETER Experiment Name: At_Siliques_P Parameter: Age (day) Value: 21
  misc_feature: MA Experiment 20000234 PARAMETER Experiment Name: At_Siliques_P Parameter: Organism Value: A. thaliana
  misc_feature: MA Experiment 20000234 PARAMETER Experiment Name: At_Siliques_P Parameter: Plant Line Value: WS
  misc_feature: MA Experiment 20000234 PARAMETER Experiment Name: At_Siliques_P Parameter: Tissue Value: Less Than 5mm Siliques vs. Whole Plant
  misc_feature: MA Experiment ID: 20000437 Result: Up-regulated in Transcription
  misc_feature: MA Experiment 20000437 PARAMETER Experiment Name: At_Drought_P Parameter: Age (day) Value: 8
  misc_feature: MA Experiment 20000437 PARAMETER Experiment Name: At_Drought_P Parameter: Organism Value: A. thaliana
  misc_feature: MA Experiment 20000437 PARAMETER Experiment Name: At_Drought_P Parameter: Plant Line Value: WS
  misc_feature: MA Experiment 20000437 PARAMETER Experiment Name: At_Drought_P Parameter: Timepoint (hr) Value: 24
  misc_feature: MA Experiment 20000437 PARAMETER Experiment Name: At_Drought_P Parameter: Tissue Value: Whole Plant
  misc_feature: MA Experiment 20000437 PARAMETER Experiment Name: At_Drought_P Parameter: Treatment Value: Drought vs. No Drought
  misc_feature: MA Experiment ID: 20000438 Result: Up-regulated in Transcription
  misc_feature: MA Experiment 20000438 PARAMETER Experiment Name: At_Shoots__P Parameter: Age (day) Value: 14
  misc_feature: MA Experiment 20000438 PARAMETER Experiment Name: At_Shoots__P Parameter: Tissue Value: Shoots vs. Whole Plant
  misc_feature: MA Experiment ID: 20000573 Result: Down-regulated in Transcription
  misc_feature: MA Experiment 20000573 PARAMETER Experiment Name: At_100uM_ABA_Mutants__P Parameter: Organism Value: A. thaliana
  misc_feature: MA Experiment 20000573 PARAMETER Experiment Name: At_100uM_ABA_Mutants__P Parameter: Plant Line Value: CS22 vs. Ler wt
  misc_feature: MA Experiment 20000573 PARAMETER Experiment Name: At_100uM_ABA_Mutants__P Parameter: Timepoint (hr) Value: N/A
  misc_feature: MA Experiment 20000573 PARAMETER Experiment Name: At_100uM_ABA_Mutants__P Parameter: Tissue Value: Whole Plant
  misc_feature: MA Experiment 20000573 PARAMETER Experiment Name: At_100uM_ABA_Mutants__P Parameter: Treatment Value: None
  misc_feature: MA Experiment ID: 20000574 Result: Down-regulated in Transcription
  misc_feature: MA Experiment 20000574 PARAMETER Experiment Name: At_100uM_ABA_Mutants__P Parameter: Organism Value: A. thaliana
  misc_feature: MA Experiment 20000574 PARAMETER Experiment Name: At_100uM_ABA_Mutants__P Parameter: Plant Line Value: CS23 vs. Ler wt
  misc_feature: MA Experiment 20000574 PARAMETER Experiment Name: At_100uM_ABA_Mutants__P Parameter: Timepoint (hr) Value: N/A
  misc_feature: MA Experiment 20000574 PARAMETER Experiment Name: At_100uM_ABA_Mutants__P Parameter: Tissue Value: Whole Plant
  misc_feature: MA Experiment 20000574 PARAMETER Experiment Name: At_100uM_ABA_Mutants__P Parameter: Treatment Value: None
  misc_feature: MA Experiment ID: 20001554 Result: Up-regulated in Transcription
  misc_feature: MA Experiment 20001554 PARAMETER Experiment Name: At_Drought_Soil_Dry_P Parameter: Age (day) Value: 21
  misc_feature: MA Experiment 20001554 PARAMETER Experiment Name: At_Drought_Soil_Dry_P Parameter: Organism Value: A. thaliana
  misc_feature: MA Experiment 20001554 PARAMETER Experiment Name: At_Drought_Soil_Dry_P Parameter: Plant Line Value: WS
  misc_feature: MA Experiment 20001554 PARAMETER Experiment Name: At_Drought_Soil_Dry_P Parameter: Post Timepoint (hr) Value: None
  misc_feature: MA Experiment 20001554 PARAMETER Experiment Name: At_Drought_Soil_Dry_P Parameter: Post-Treatment Value: None
  misc_feature: MA Experiment 20001554 PARAMETER Experiment Name: At_Drought_Soil_Dry_P Parameter: Timepoint (day) Value: 7
  misc_feature: MA Experiment 20001554 PARAMETER Experiment Name: At_Drought_Soil_Dry_P Parameter: Treatment Value: Drought vs. No Drought
  misc_feature: MA Experiment ID: 20001555 Result: Up-regulated in Transcription
  misc_feature: MA Experiment 20001555 PARAMETER Experiment Name: At_Drought_Soil_Dry_P Parameter: Age (day) Value: 24
  misc_feature: MA Experiment 20001555 PARAMETER Experiment Name: At_Drought_Soil_Dry_P Parameter: Organism Value: A. thaliana
  misc_feature: MA Experiment 20001555 PARAMETER Experiment Name: At_Drought_Soil_Dry_P Parameter: Plant Line Value: WS
  misc_feature: MA Experiment 20001555 PARAMETER Experiment Name: At_Drought_Soil_Dry_P Parameter: Post Timepoint (hr) Value: None
  misc_feature: MA Experiment 20001555 PARAMETER Experiment Name: At_Drought_Soil_Dry_P Parameter: Post-Treatment Value: None
  misc_feature: MA Experiment 20001555 PARAMETER Experiment Name: At_Drought_Soil_Dry_P Parameter: Timepoint (day) Value: 10
  misc_feature: MA Experiment 20001555 PARAMETER Experiment Name: At_Drought_Soil_Dry_P Parameter: Treatment Value: Drought vs. No Drought
  misc_feature: MA Experiment ID: 20001558 Result: Up-regulated in Transcription
  misc_feature: MA Experiment 20001558 PARAMETER Experiment Name: At_Drought_Soil_Dry_P Parameter: Age (day) Value: 27
  misc_feature: MA Experiment 20001558 PARAMETER Experiment Name: At_Drought_Soil_Dry_P Parameter: Organism Value: A. thaliana
  misc_feature: MA Experiment 20001558 PARAMETER Experiment Name: At_Drought_Soil_Dry_P Parameter: Plant Line Value: WS
  misc_feature: MA Experiment 20001558 PARAMETER Experiment Name: At_Drought_Soil_Dry_P Parameter: Post Timepoint (hr) Value: 6
  misc_feature: MA Experiment 20001558 PARAMETER Experiment Name: At_Drought_Soil_Dry_P Parameter: Post-Treatment Value: Re-Water vs. No Drought
  misc_feature: MA Experiment 20001558 PARAMETER Experiment Name: At_Drought_Soil_Dry_P Parameter: Timepoint (day) Value: 13
  misc_feature: MA Experiment 20001558 PARAMETER Experiment Name: At_Drought_Soil_Dry_P Parameter: Treatment Value: Drought vs. No Drought
  misc_feature: MA Experiment ID: 20001559 Result: Up-regulated in Transcription
  misc_feature: MA Experiment 20001559 PARAMETER Experiment Name: At_Drought_Soil_Dry_P Parameter: Age (day) Value: 28
  misc_feature: MA Experiment 20001559 PARAMETER Experiment Name: At_Drought_Soil_Dry_P Parameter: Organism Value: A. thaliana
  misc_feature: MA Experiment 20001559 PARAMETER Experiment Name: At_Drought_Soil_Dry_P Parameter: Plant Line Value: WS
  misc_feature: MA Experiment 20001559 PARAMETER Experiment Name: At_Drought_Soil_Dry_P Parameter: Post Timepoint (hr) Value: 29
  misc_feature: MA Experiment 20001559 PARAMETER Experiment Name: At_Drought_Soil_Dry_P Parameter: Post-Treatment Value: Re-Water vs. No Drought
  misc_feature: MA Experiment 20001559 PARAMETER Experiment Name: At_Drought_Soil_Dry_P Parameter: Timepoint (day) Value: 14
  misc_feature: MA Experiment 20001559 PARAMETER Experiment Name: At_Drought_Soil_Dry_P Parameter: Treatment Value: Drought vs. No Drought
  misc_feature: MA Experiment ID: 20001560 Result: Up-regulated in Transcription
  misc_feature: MA Experiment 20001560 PARAMETER Experiment Name: At_Drought_Soil_Dry_P Parameter: Age (day) Value: 28
  misc_feature: MA Experiment 20001560 PARAMETER Experiment Name: At_Drought_Soil_Dry_P Parameter: Organism Value: A. thaliana
  misc_feature: MA Experiment 20001560 PARAMETER Experiment Name: At_Drought_Soil_Dry_P Parameter: Plant Line Value: WS
  misc_feature: MA Experiment 20001560 PARAMETER Experiment Name: At_Drought_Soil_Dry_P Parameter: Post Timepoint (hr) Value: None
  misc_feature: MA Experiment 20001560 PARAMETER Experiment Name: At_Drought_Soil_Dry_P Parameter: Post-Treatment Value: None
  misc_feature: MA Experiment 20001560 PARAMETER Experiment Name: At_Drought_Soil_Dry_P Parameter: Timepoint (day) Value: 14
  misc_feature: MA Experiment 20001560 PARAMETER Experiment Name: At_Drought_Soil_Dry_P Parameter: Treatment Value: Drought vs. No Drought
  misc_feature: MA Experiment ID: 20001904 Result: Up-regulated in Transcription
  misc_feature: MA Experiment 20001904 PARAMETER Experiment Name: At_Drought_Reproduction_P Parameter: Age (day) Value: 37
  misc_feature: MA Experiment 20001904 PARAMETER Experiment Name: At_Drought_Reproduction_P Parameter: Organism Value: A. thaliana
  misc_feature: MA Experiment 20001904 PARAMETER Experiment Name: At_Drought_Reproduction_P Parameter: Plant Line Value: WS
  misc_feature: MA Experiment 20001904 PARAMETER Experiment Name: At_Drought_Reproduction_P Parameter: Timepoint (day) Value: 7
  misc_feature: MA Experiment 20001904 PARAMETER Experiment Name: At_Drought_Reproduction_P Parameter: Tissue Value: Rosettes
  misc_feature: MA Experiment 20001904 PARAMETER Experiment Name: At_Drought_Reproduction_P Parameter: Treatment Value: Drought vs. No Drought
  misc_feature: MA Experiment ID: 20001905 Result: Up-regulated in Transcription
  misc_feature: MA Experiment 20001905 PARAMETER Experiment Name: At_Drought_Reproduction_P Parameter: Age (day) Value: 40
  misc_feature: MA Experiment 20001905 PARAMETER Experiment Name: At_Drought_Reproduction_P Parameter: Organism Value: A. thaliana
  misc_feature: MA Experiment 20001905 PARAMETER Experiment Name: At_Drought_Reproduction_P Parameter: Plant Line Value: WS
  misc_feature: MA Experiment 20001905 PARAMETER Experiment Name: At_Drought_Reproduction_P Parameter: Timepoint (day) Value: 10
  misc_feature: MA Experiment 20001905 PARAMETER Experiment Name: At_Drought_Reproduction_P Parameter: Tissue Value: Rosettes
  misc_feature: MA Experiment 20001905 PARAMETER Experiment Name: At_Drought_Reproduction_P Parameter: Treatment Value: Drought vs. No Drought
acaatttgataacacaattcacttaattctcactcactctctttccttctctactctctgtttctttcttccatggagctcttctcactctcttctcttctcctactctccactctcttcgttttctacatcttcaagtttgttttcaaaagaagaaaccagagaaactgctacatgcttcactacgagtgctacaagggcatggaagagagaaaactcgacaccgagacttgtgctaaggtcgttcaacgaaacaagaacttgggtcttgaagagtacaggtttctccttcgtactatggctagttccgggataggagaggaaacgtacggcccaagaaatgtgcttgaaggtagagaagactctcctactctccttgacgctcactccgaaatggacgagatcatgttcgacactctcgacaagcttttccacaagacaaaaggctcaatctctccttcagacattgatattctcgttgtcaacgtctcactcttcgctccatctccttccctaacctcacgagtcatcaacagatacaagatgagagaagacatcaaatcctacaatctctcgggactagggtgtagcgcgagcgttatatcgatagatatcgtgcaaaggatgttcgaaactcgtgaaaacgctctcgcactcgtggttagcaccgagacaatgggtcctcactggtactgcggtaaagataggtcaatgatgctctcaaactgtctcttccgtgccggaggaagctctgttctgttaaccaacgcagctaggttcaagaaccaggctttgatgaagctcgtgacagtggtccgggctcatgttggctcagacgacgaggcctactcgtgctgcatacaaatggaggacagagatggtcatccaggctttctcttaaccaaatacctaaaaaaagccgcagctcgagccctaaccaagaacctccaagttctcctccctagagtcttgcctgtcaaggaactgatccgctatgcaatagttcgcgcgcttaaacgaagaacctccgcgaaaagagagcccgcgagctcagggataggtctaaacctaaaaacagggttgcaacatttctgtattcacccgggaggaagagcgattatcgaaggagttgggaaaagcttagggctcacggaattcgacatcgagccagcgagaatggcgcttcataggttcgggaacacatcttctggtggtttatggtatgttcttggctacatggaagctaagaacagactaaagaaaggtgagaagatactaatgatgagtatgggagctggattcgagtctaataattgtgtttgggaggttctaaaggatcttgatgataagaatgtttgggaagattcagttgatcgatatccggaattgtcgagaatccctaatccattcgttgagaagtatgattggatcaacgacgataccatgagcttcgttcgtgttgattgatcacaagtaagcagaaaataacaagatcgattctttttaatatatttgtcaatcaattattatatgaaatgtttctttatcaggcaatatttcgaactttggattatttggaatgtttagacggctatagtcgacgattgatttttattttttaaaatttgaaataaataattaaagcatgtttaattggcgttgttttgtattttattttattttttacaatttgattgtagaattgactagtaaacgaccaattggtgtgtagaggttgatattttagaacagtaacaaaagagtgtgtattcaagttggtgcatttattttgtcagaattacattattgtggcatacccatttatgagtaagactcaacaataaatttcatgtgtgttcgcagatcg

SEQ ID NO: 44053 - protein, 464 aa, Arabidopsis thaliana
  peptide (1)..(464): Ceres Seq. ID no. 13509301
  misc_feature (287)..(421): Pfam Name: Chalcone and stilbene synthases, C-terminal domain Pfam Description: Chalcone and stilbene synthases, C-terminal
  misc_feature (4)..(437): Homolog of NCBI NO: 11066477 NR Description: fatty acid elongase 1-like protein [Limnanthes
  misc_feature (1)..(437): Homolog of NCBI NO: 22329274 NR Description: fatty acid elongase 3-ketoacyl-CoA synthase 1
  misc_feature (1)..(437): Homolog of NCBI NO: 4091810 NR Description: fatty acid elongase 3-ketoacyl-CoA synthase 1
  misc_feature (1)..(456): Homolog of NCBI NO: 40882682 NR Description: putative fatty acid elongase
  misc_feature (1)..(455): Homolog of NCBI NO: 40882703 NR Description: putative fatty acid elongase
  misc_feature (1)..(455): Homolog of NCBI NO: 37535300 NR Description: putative fatty acid elongase 3-ketoacyl-CoA
  misc_feature (1)..(456): Homolog of NCBI NO: 15222994 NR Description: beta-ketoacyl-CoA synthase family [Arabidopsis
  misc_feature (1)..(456): Homolog of NCBI NO: 21536949 NR Description: putative fatty acid elongase [Arabidopsis
  misc_feature (1)..(456): Homolog of NCBI NO: 15226916 NR Description: beta-ketoacyl-CoA synthase family [Arabidopsis
  misc_feature (1)..(464): Homolog of NCBI NO: 15238194 NR Description: beta-ketoacyl-CoA synthase family [Arabidopsis
MELFSLSSLLLLSTLFVFYIFKFVFKRRNQRNCYMLHYECYKGMEERKLDTETCAKVVQRNKNLGLEEYRFLLRTMASSGIGEETYGPRNVLEGREDSPTLLDAHSEMDEIMFDTLDKLFHKTKGSISPSDIDILVVNVSLFAPSPSLTSRVINRYKMREDIKSYNLSGLGCSASVISIDIVQRMFETRENALALVVSTETMGPHWYCGKDRSMMLSNCLFRAGGSSVLLTNAARFKNQALMKLVTVVRAHVGSDDEAYSCCIQMEDRDGHPGFLLTKYLKKAAARALTKNLQVLLPRVLPVKELIRYAIVRALKRRTSAKREPASSGIGLNLKTGLQHFCIHPGGRAIIEGVGKSLGLTEFDIEPARMALHRFGNTSSGGLWYVLGYMEAKNRLKKGEKILMMSMGAGFESNNCVWEVLKDLDDKNVWEDSVDRYPELSRIPNPFVEKYDWINDDTMSFVRVD

SEQ ID NO: 44054 - protein, 430 aa, Arabidopsis thaliana
  peptide (1)..(430): Ceres Seq. ID no. 13509302
  misc_feature (253)..(387): Pfam Name: Chalcone and stilbene synthases, C-terminal domain Pfam Description: Chalcone and stilbene synthases, C-terminal
  misc_feature (1)..(403): Homolog of NCBI NO: 11066477 NR Description: fatty acid elongase 1-like protein [Limnanthes
  misc_feature (1)..(403): Homolog of NCBI NO: 22329274 NR Description: fatty acid elongase 3-ketoacyl-CoA synthase 1
  misc_feature (1)..(403): Homolog of NCBI NO: 4091810 NR Description: fatty acid elongase 3-ketoacyl-CoA synthase 1
  misc_feature (1)..(422): Homolog of NCBI NO: 40882682 NR Description: putative fatty acid elongase
  misc_feature (1)..(421): Homolog of NCBI NO: 40882703 NR Description: putative fatty acid elongase
  misc_feature (1)..(421): Homolog of NCBI NO: 37535300 NR Description: putative fatty acid elongase 3-ketoacyl-CoA
  misc_feature (1)..(422): Homolog of NCBI NO: 15222994 NR Description: beta-ketoacyl-CoA synthase family [Arabidopsis
  misc_feature (1)..(422): Homolog of NCBI NO: 21536949 NR Description: putative fatty acid elongase [Arabidopsis
  misc_feature (1)..(422): Homolog of NCBI NO: 15226916 NR Description: beta-ketoacyl-CoA synthase family [Arabidopsis
  misc_feature (1)..(430): Homolog of NCBI NO: 15238194 NR Description: beta-ketoacyl-CoA synthase family [Arabidopsis
MLHYECYKGMEERKLDTETCAKVVQRNKNLGLEEYRFLLRTMASSGIGEETYGPRNVLEGREDSPTLLDAHSEMDEIMFDTLDKLFHKTKGSISPSDIDILVVNVSLFAPSPSLTSRVINRYKMREDIKSYNLSGLGCSASVISIDIVQRMFETRENALALVVSTETMGPHWYCGKDRSMMLSNCLFRAGGSSVLLTNAARFKNQALMKLVTVVRAHVGSDDEAYSCCIQMEDRDGHPGFLLTKYLKKAAARALTKNLQVLLPRVLPVKELIRYAIVRALKRRTSAKREPASSGIGLNLKTGLQHFCIHPGGRAIIEGVGKSLGLTEFDIEPARMALHRFGNTSSGGLWYVLGYMEAKNRLKKGEKILMMSMGAGFESNNCVWEVLKDLDDKNVWEDSVDRYPELSRIPNPFVEKYDWINDDTMSFVRVD

SEQ ID NO: 44055 - protein, 421 aa, Arabidopsis thaliana
  peptide (1)..(421): Ceres Seq. ID no. 13509303
  misc_feature (244)..(378): Pfam Name: Chalcone and stilbene synthases, C-terminal domain Pfam Description: Chalcone and stilbene synthases, C-terminal
  misc_feature (1)..(394): Homolog of NCBI NO: 11066477 NR Description: fatty acid elongase 1-like protein [Limnanthes
  misc_feature (1)..(394): Homolog of NCBI NO: 22329274 NR Description: fatty acid elongase 3-ketoacyl-CoA synthase 1
  misc_feature (1)..(394): Homolog of NCBI NO: 4091810 NR Description: fatty acid elongase 3-ketoacyl-CoA synthase 1
  misc_feature (1)..(413): Homolog of NCBI NO: 40882682 NR Description: putative fatty acid elongase
  misc_feature (1)..(412): Homolog of NCBI NO: 40882703 NR Description: putative fatty acid elongase
  misc_feature (1)..(412): Homolog of NCBI NO: 37535300 NR Description: putative fatty acid elongase 3-ketoacyl-CoA
  misc_feature (1)..(413): Homolog of NCBI NO: 15222994 NR Description: beta-ketoacyl-CoA synthase family [Arabidopsis
  misc_feature (1)..(413): Homolog of NCBI NO: 21536949 NR Description: putative fatty acid elongase [Arabidopsis
  misc_feature (1)..(413): Homolog of NCBI NO: 15226916 NR Description: beta-ketoacyl-CoA synthase family [Arabidopsis
  misc_feature (1)..(421): Homolog of NCBI NO: 15238194 NR Description: beta-ketoacyl-CoA synthase family [Arabidopsis
MEERKLDTETCAKVVQRNKNLGLEEYRFLLRTMASSGIGEETYGPRNVLEGREDSPTLLDAHSEMDEIMFDTLDKLFHKTKGSISPSDIDILVVNVSLFAPSPSLTSRVINRYKMREDIKSYNLSGLGCSASVISIDIVQRMFETRENALALVVSTETMGPHWYCGKDRSMMLSNCLFRAGGSSVLLTNAARFKNQALMKLVTVVRAHVGSDDEAYSCCIQMEDRDGHPGFLLTKYLKKAAARALTKNLQVLLPRVLPVKELIRYAIVRALKRRTSAKREPASSGIGLNLKTGLQHFCIHPGGRAIIEGVGKSLGLTEFDIEPARMALHRFGNTSSGGLWYVLGYMEAKNRLKKGEKILMMSMGAGFESNNCVWEVLKDLDDKNVWEDSVDRYPELSRIPNPFVEKYDWINDDTMSFVRVD

SEQ ID NO: 44056 - DNA, 1293 bp, Arabidopsis thaliana; identical to SEQ ID NO: 34838
  misc_feature (1)..(1293): Ceres Seq. ID no. 12333690
  misc_feature: MA Experiment ID: 108461 Result: Down-regulated in Transcription
  misc_feature: MA Experiment 108461 PARAMETER Experiment Name: At_Germinating_Seeds_cDNA_P Parameter: Age (day) Value: 1 vs. 0
  misc_feature: MA Experiment 108461 PARAMETER Experiment Name: At_Germinating_Seeds_cDNA_P Parameter: Tissue Value: Germinating Seeds
  misc_feature: MA Experiment ID: 108561 Result: Down-regulated in Transcription
  misc_feature: MA Experiment 108561 PARAMETER Experiment Name: At_100uM_ABA_cDNA_P Parameter: Timepoint (hr) Value: 6
  misc_feature: MA Experiment 108561 PARAMETER Experiment Name: At_100uM_ABA_cDNA_P Parameter: Tissue Value: Aerial
  misc_feature: MA Experiment 108561 PARAMETER Experiment Name: At_100uM_ABA_cDNA_P Parameter: Treatment Value: 100uM ABA vs. No Treatment
  misc_feature: MA Experiment ID: 108577 Result: Down-regulated in Transcription
  misc_feature: MA Experiment 108577 PARAMETER Experiment Name: At_42deg_Heat_cDNA_P Parameter: Temperature (deg C) Value: 42 vs. 22
  misc_feature: MA Experiment 108577 PARAMETER Experiment Name: At_42deg_Heat_cDNA_P Parameter: Timepoint (hr) Value: 6
  misc_feature: MA Experiment 108577 PARAMETER Experiment Name: At_42deg_Heat_cDNA_P Parameter: Tissue Value: Aerial
  misc_feature: MA Experiment ID: 108595 Result: Down-regulated in Transcription
  misc_feature: MA Experiment 108595 PARAMETER Experiment Name: At_Ler-pi_Ovule_cDNA_P Parameter: Plant Line Value: null
  misc_feature: MA Experiment ID: 20000069 Result: Down-regulated in Transcription
  misc_feature: MA Experiment 20000069 PARAMETER Experiment Name: At_100uM_ABA_Mutants_cDNA_P Parameter: Plant Line Value: CS23
  misc_feature: MA Experiment 20000069 PARAMETER Experiment Name: At_100uM_ABA_Mutants_cDNA_P Parameter: Timepoint (hr) Value: 6
  misc_feature: MA Experiment 20000069 PARAMETER Experiment Name: At_100uM_ABA_Mutants_cDNA_P Parameter: Tissue Value: Aerial
  misc_feature: MA Experiment 20000069 PARAMETER Experiment Name: At_100uM_ABA_Mutants_cDNA_P Parameter: Treatment Value: 100uM ABA vs. No Treatment
  misc_feature: MA Experiment ID: 20000070 Result: Down-regulated in Transcription
  misc_feature: MA Experiment 20000070 PARAMETER Experiment Name: At_100uM_ABA_Mutants_cDNA_P Parameter: Plant Line Value: CS24
  misc_feature: MA Experiment 20000070 PARAMETER Experiment Name: At_100uM_ABA_Mutants_cDNA_P Parameter: Timepoint (hr) Value: 6
  misc_feature: MA Experiment 20000070 PARAMETER Experiment Name: At_100uM_ABA_Mutants_cDNA_P Parameter: Tissue Value: Aerial
  misc_feature: MA Experiment 20000070 PARAMETER Experiment Name: At_100uM_ABA_Mutants_cDNA_P Parameter: Treatment Value: 100uM ABA vs. No Treatment
  misc_feature: MA Experiment ID: 20000071 Result: Down-regulated in Transcription
  misc_feature: MA Experiment 20000071 PARAMETER Experiment Name: At_100uM_ABA_Mutants_cDNA_P Parameter: Plant Line Value: CS8104
  misc_feature: MA Experiment 20000071 PARAMETER Experiment Name: At_100uM_ABA_Mutants_cDNA_P Parameter: Timepoint (hr) Value: 6
  misc_feature: MA Experiment 20000071 PARAMETER Experiment Name: At_100uM_ABA_Mutants_cDNA_P Parameter: Tissue Value: Aerial
  misc_feature: MA Experiment 20000071 PARAMETER Experiment Name: At_100uM_ABA_Mutants_cDNA_P Parameter: Treatment Value: 100uM ABA vs. No Treatment
  misc_feature: MA Experiment ID: 20000072 Result: Down-regulated in Transcription
  misc_feature: MA Experiment 20000072 PARAMETER Experiment Name: At_100uM_ABA_Mutants_cDNA_P Parameter: Plant Line Value: CS8105
  misc_feature: MA Experiment 20000072 PARAMETER Experiment Name: At_100uM_ABA_Mutants_cDNA_P Parameter: Timepoint (hr) Value: 6
  misc_feature: MA Experiment 20000072 PARAMETER Experiment Name: At_100uM_ABA_Mutants_cDNA_P Parameter: Tissue Value: Aerial
  misc_feature: MA Experiment 20000072 PARAMETER Experiment Name: At_100uM_ABA_Mutants_cDNA_P Parameter: Treatment Value: 100uM ABA vs. No Treatment
  misc_feature: MA Experiment ID: 20000086 Result: Down-regulated in Transcription
  misc_feature: MA Experiment 20000086 PARAMETER Experiment Name: At_100uM_ABA_Mutants_cDNA_P Parameter: Plant Line Value: CS22
  misc_feature: MA Experiment 20000086 PARAMETER Experiment Name: At_100uM_ABA_Mutants_cDNA_P Parameter: Timepoint (hr) Value: 6
  misc_feature: MA Experiment 20000086 PARAMETER Experiment Name: At_100uM_ABA_Mutants_cDNA_P Parameter: Tissue Value: Aerial
  misc_feature: MA Experiment 20000086 PARAMETER Experiment Name: At_100uM_ABA_Mutants_cDNA_P Parameter: Treatment Value: 100uM ABA vs. No Treatment
  misc_feature: MA Experiment ID: 20000087 Result: Down-regulated in Transcription
  misc_feature: MA Experiment 20000087 PARAMETER Experiment Name: At_100uM_ABA_Mutants_cDNA_P Parameter: Plant Line Value: WS
  misc_feature: MA Experiment 20000087 PARAMETER Experiment Name: At_100uM_ABA_Mutants_cDNA_P Parameter: Timepoint (hr) Value: 6
  misc_feature: MA Experiment 20000087 PARAMETER Experiment Name: At_100uM_ABA_Mutants_cDNA_P Parameter: Tissue Value: Aerial
  misc_feature: MA Experiment 20000087 PARAMETER Experiment Name: At_100uM_ABA_Mutants_cDNA_P Parameter: Treatment Value: 100uM ABA vs. No Treatment
  misc_feature: MA Experiment ID: 20000088 Result: Down-regulated in Transcription
  misc_feature: MA Experiment 20000088 PARAMETER Experiment Name: At_100uM_ABA_Mutants_cDNA_P Parameter: Plant Line Value: Landsberg
  misc_feature: MA Experiment 20000088 PARAMETER Experiment Name: At_100uM_ABA_Mutants_cDNA_P Parameter: Timepoint (hr) Value: 6
  misc_feature: MA Experiment 20000088 PARAMETER Experiment Name: At_100uM_ABA_Mutants_cDNA_P Parameter: Tissue Value: Aerial
  misc_feature: MA Experiment 20000088 PARAMETER Experiment Name: At_100uM_ABA_Mutants_cDNA_P Parameter: Treatment Value: 100uM ABA vs. No Treatment
  misc_feature: MA Experiment ID: 20000112 Result: Down-regulated in Transcription
  misc_feature: MA Experiment 20000112 PARAMETER Experiment Name: At_42deg_Heat_cDNA_P Parameter: Temperature (deg C) Value: 42 vs. 22
  misc_feature: MA Experiment 20000112 PARAMETER Experiment Name: At_42deg_Heat_cDNA_P Parameter: Timepoint (hr) Value: 2
  misc_feature: MA Experiment 20000112 PARAMETER Experiment Name: At_42deg_Heat_cDNA_P Parameter: Tissue Value: Aerial
  misc_feature: MA Experiment ID: 20000113 Result: Down-regulated in Transcription
  misc_feature: MA Experiment 20000113 PARAMETER Experiment Name: At_42deg_Heat_cDNA_P Parameter: Temperature (deg C) Value: 42 vs. 22
  misc_feature: MA Experiment 20000113 PARAMETER Experiment Name: At_42deg_Heat_cDNA_P Parameter: Timepoint (hr) Value: 8
  misc_feature: MA Experiment 20000113 PARAMETER Experiment Name: At_42deg_Heat_cDNA_P Parameter: Tissue Value: Aerial
  misc_feature: MA Experiment ID: 20000117 Result: Down-regulated in Transcription
  misc_feature: MA Experiment 20000117 PARAMETER Experiment Name: At_100uM_ABA_Mutants_cDNA_P Parameter: Plant Line Value: Columbia
  misc_feature: MA Experiment 20000117 PARAMETER Experiment Name: At_100uM_ABA_Mutants_cDNA_P Parameter: Timepoint (hr) Value: 6
  misc_feature: MA Experiment 20000117 PARAMETER Experiment Name: At_100uM_ABA_Mutants_cDNA_P Parameter: Tissue Value: Aerial
  misc_feature: MA Experiment 20000117 PARAMETER Experiment Name: At_100uM_ABA_Mutants_cDNA_P Parameter: Treatment Value: 100uM ABA vs. No Treatment
  misc_feature: MA Experiment ID: 20000166 Result: Down-regulated in Transcription
  misc_feature: MA Experiment 20000166 PARAMETER Experiment Name: At_100uM_ABA_P Parameter: Age (day) Value: 14
  misc_feature: MA Experiment 20000166 PARAMETER Experiment Name: At_100uM_ABA_P Parameter: Organism Value: A. thaliana
  misc_feature: MA Experiment 20000166 PARAMETER Experiment Name: At_100uM_ABA_P Parameter: Plant Line Value: WS
  misc_feature: MA Experiment 20000166 PARAMETER Experiment Name: At_100uM_ABA_P Parameter: Timepoint (hr) Value: 1
  misc_feature: MA Experiment 20000166 PARAMETER Experiment Name: At_100uM_ABA_P Parameter: Tissue Value: Aerial
  misc_feature: MA Experiment 20000166 PARAMETER Experiment Name: At_100uM_ABA_P Parameter: Treatment Value: 100uM ABA vs. No Treatment
  misc_feature: MA Experiment ID: 20000234 Result: Up-regulated in Transcription
  misc_feature: MA Experiment 20000234 PARAMETER Experiment Name: At_Siliques_P Parameter: Age (day) Value: 21
  misc_feature: MA Experiment 20000234 PARAMETER Experiment Name: At_Siliques_P Parameter: Organism Value: A. thaliana
  misc_feature: MA Experiment 20000234 PARAMETER Experiment Name: At_Siliques_P Parameter: Plant Line Value: WS
  misc_feature: MA Experiment 20000234 PARAMETER Experiment Name: At_Siliques_P Parameter: Tissue Value: Less Than 5mm Siliques vs. Whole Plant
  misc_feature: MA Experiment ID: 20000264 Result: Up-regulated in Transcription
  misc_feature: MA Experiment 20000264 PARAMETER Experiment Name: At_Open_Flower_P Parameter: Age (day) Value: 21
  misc_feature: MA Experiment 20000264 PARAMETER Experiment Name: At_Open_Flower_P Parameter: Plant Line Value: WS
  misc_feature: MA Experiment 20000264 PARAMETER Experiment Name: At_Open_Flower_P Parameter: Tissue Value: Open Flower vs. Whole Plant
  misc_feature: MA Experiment ID: 20000286 Result: Up-regulated in Transcription
  misc_feature: MA Experiment 20000286 PARAMETER Experiment Name: At_Open_Flower_P Parameter: Age (day) Value: 21
  misc_feature: MA Experiment 20000286 PARAMETER Experiment Name: At_Open_Flower_P Parameter: Plant Line Value: WS
  misc_feature: MA Experiment 20000286 PARAMETER Experiment Name: At_Open_Flower_P Parameter: Tissue Value: Half Open vs. Whole Plant
  misc_feature: MA Experiment ID: 20000439 Result: Down-regulated in Transcription
  misc_feature: MA Experiment 20000439 PARAMETER Experiment Name: At_Roots__P Parameter: Age (day) Value: 14 vs. 21
  misc_feature: MA Experiment 20000439 PARAMETER Experiment Name: At_Roots__P Parameter: Organism Value: A. thaliana
  misc_feature: MA Experiment 20000439 PARAMETER Experiment Name: At_Roots__P Parameter: Tissue Value: Roots vs. Whole Plant
  misc_feature: MA Experiment ID: 20000445 Result: Down-regulated in Transcription
  misc_feature: MA Experiment 20000445 PARAMETER Experiment Name: At_100uM_NAA__P Parameter: Age (day) Value: 14
  misc_feature: MA Experiment 20000445 PARAMETER Experiment Name: At_100uM_NAA__P Parameter: Organism Value: A. thaliana
  misc_feature: MA Experiment 20000445 PARAMETER Experiment Name: At_100uM_NAA__P Parameter: Plant Line Value: WS
  misc_feature: MA Experiment 20000445 PARAMETER Experiment Name: At_100uM_NAA__P Parameter: Timepoint (hr) Value: 6
  misc_feature: MA Experiment 20000445 PARAMETER Experiment Name: At_100uM_NAA__P Parameter: Tissue Value: Aerial
  misc_feature: MA Experiment 20000445 PARAMETER Experiment Name: At_100uM_NAA__P Parameter: Treatment Value: 100uM NAA vs. No Treatment
  misc_feature: MA Experiment ID: 20000452 Result: Up-regulated in Transcription
  misc_feature: MA Experiment 20000452 PARAMETER Experiment Name: At_CS6879_Shoots-Roots_P Parameter: Age (day) Value: 14
  misc_feature: MA Experiment 20000452 PARAMETER Experiment Name: At_CS6879_Shoots-Roots_P Parameter: Organism Value: A. thaliana
  misc_feature: MA Experiment 20000452 PARAMETER Experiment Name: At_CS6879_Shoots-Roots_P Parameter: Plant Line Value: CS6879 vs. WS
  misc_feature: MA Experiment 20000452 PARAMETER Experiment Name: At_CS6879_Shoots-Roots_P Parameter: Tissue Value: Shoots
  misc_feature: MA Experiment ID: 20000495 Result: Up-regulated in Transcription
  misc_feature: MA Experiment 20000495 PARAMETER Experiment Name: At_Guard_Cells_P Parameter: Harvest Date Value: 8/2/2002
  misc_feature: MA Experiment 20000495 PARAMETER Experiment Name: At_Guard_Cells_P Parameter: Organism Value: A. thaliana
  misc_feature: MA Experiment 20000495 PARAMETER Experiment Name: At_Guard_Cells_P Parameter: Tissue Value: Guard Cells vs. Leaves
  misc_feature: MA Experiment ID: 20000573 Result: Down-regulated in Transcription
  misc_feature: MA Experiment 20000573 PARAMETER Experiment Name: At_100uM_ABA_Mutants__P Parameter: Organism Value: A. thaliana
  misc_feature: MA Experiment 20000573 PARAMETER Experiment Name: At_100uM_ABA_Mutants__P Parameter: Plant Line Value: CS22 vs. Ler wt
  misc_feature: MA Experiment 20000573 PARAMETER Experiment Name: At_100uM_ABA_Mutants__P Parameter: Timepoint (hr) Value: N/A
  misc_feature: MA Experiment 20000573 PARAMETER Experiment Name: At_100uM_ABA_Mutants__P Parameter: Tissue Value: Whole Plant
  misc_feature: MA Experiment 20000573 PARAMETER Experiment Name: At_100uM_ABA_Mutants__P Parameter: Treatment Value: None
  misc_feature: MA Experiment ID: 20000574 Result: Down-regulated in Transcription
  misc_feature: MA Experiment 20000574 PARAMETER Experiment Name: At_100uM_ABA_Mutants__P Parameter: Organism Value: A. thaliana
  misc_feature: MA Experiment 20000574 PARAMETER Experiment Name: At_100uM_ABA_Mutants__P Parameter: Plant Line Value: CS23 vs. Ler wt
  misc_feature: MA Experiment 20000574 PARAMETER Experiment Name: At_100uM_ABA_Mutants__P Parameter: Timepoint (hr) Value: N/A
  misc_feature: MA Experiment 20000574 PARAMETER Experiment Name: At_100uM_ABA_Mutants__P Parameter: Tissue Value: Whole Plant
  misc_feature: MA Experiment 20000574 PARAMETER Experiment Name: At_100uM_ABA_Mutants__P Parameter: Treatment Value: None
  misc_feature: MA Experiment ID: 20000794 Result: Up-regulated in Transcription
  misc_feature: MA Experiment 20000794 PARAMETER Experiment Name: At_Petals_P Parameter: Age (day) Value: 23-25 days
  misc_feature: MA Experiment 20000794 PARAMETER Experiment Name: At_Petals_P Parameter: Plant Line Value: WS
  misc_feature: MA Experiment 20000794 PARAMETER Experiment Name: At_Petals_P Parameter: Tissue Value: Petals vs. Whole plant
  misc_feature: MA Experiment ID: 20001248 Result: Down-regulated in Transcription
  misc_feature: MA Experiment 20001248 PARAMETER Experiment Name: At_Far-red-induction_P Parameter: Age (day) Value: 7
  misc_feature: MA Experiment 20001248 PARAMETER Experiment Name: At_Far-red-induction_P Parameter: Light Value: Far-red vs. White
  misc_feature: MA Experiment 20001248 PARAMETER Experiment Name: At_Far-red-induction_P Parameter: Organism Value: A. thaliana
  misc_feature: MA Experiment 20001248 PARAMETER Experiment Name: At_Far-red-induction_P Parameter: Plant Line Value: Columbia
  misc_feature: MA Experiment 20001248 PARAMETER Experiment Name: At_Far-red-induction_P Parameter: Timepoint (hr) Value: 4
  misc_feature: MA Experiment 20001248 PARAMETER Experiment Name: At_Far-red-induction_P Parameter: Tissue Value: Whole Plant
  misc_feature: MA Experiment ID: 20001450 Result: Down-regulated in Transcription
  misc_feature: MA Experiment 20001450 PARAMETER Experiment Name: At_Far-red-induction_P Parameter: Age (day) Value: 7
  misc_feature: MA Experiment 20001450 PARAMETER Experiment Name: At_Far-red-induction_P Parameter: Light Value: Far-red vs. White
  misc_feature: MA Experiment 20001450 PARAMETER Experiment Name: At_Far-red-induction_P Parameter: Organism Value: A. thaliana
  misc_feature: MA Experiment 20001450 PARAMETER Experiment Name: At_Far-red-induction_P Parameter: Plant Line Value: Columbia
  misc_feature: MA Experiment 20001450 PARAMETER Experiment Name: At_Far-red-induction_P Parameter: Timepoint (hr) Value: 8
  misc_feature: MA Experiment 20001450 PARAMETER Experiment Name: At_Far-red-induction_P Parameter: Tissue Value: Whole Plant
  misc_feature: MA Experiment ID: 20001557 Result: Up-regulated in Transcription
  misc_feature: MA Experiment 20001557 PARAMETER Experiment Name: At_Drought_Soil_Dry_P Parameter: Age (day) Value: 27
  misc_feature: MA Experiment 20001557 PARAMETER Experiment Name: At_Drought_Soil_Dry_P Parameter: Organism Value: A. thaliana
  misc_feature: MA Experiment 20001557 PARAMETER Experiment Name: At_Drought_Soil_Dry_P Parameter: Plant Line Value: WS
  misc_feature: MA Experiment 20001557 PARAMETER Experiment Name: At_Drought_Soil_Dry_P Parameter: Post Timepoint (hr) Value: 3
  misc_feature: MA Experiment 20001557 PARAMETER Experiment Name: At_Drought_Soil_Dry_P Parameter: Post-Treatment Value: Re-Water vs. No Drought
  misc_feature: MA Experiment 20001557 PARAMETER Experiment Name: At_Drought_Soil_Dry_P Parameter: Timepoint (day) Value: 13
  misc_feature: MA Experiment 20001557 PARAMETER Experiment Name: At_Drought_Soil_Dry_P Parameter: Treatment Value: Drought vs. No Drought
  misc_feature: MA Experiment ID: 20001558 Result: Up-regulated in Transcription
  misc_feature: MA Experiment 20001558 PARAMETER Experiment Name: At_Drought_Soil_Dry_P Parameter: Age (day) Value: 27
  misc_feature: MA Experiment 20001558 PARAMETER Experiment Name: At_Drought_Soil_Dry_P Parameter: Organism Value: A. thaliana
  misc_feature: MA Experiment 20001558 PARAMETER Experiment Name: At_Drought_Soil_Dry_P Parameter: Plant Line Value: WS
  misc_feature: MA Experiment 20001558 PARAMETER Experiment Name: At_Drought_Soil_Dry_P Parameter: Post Timepoint (hr) Value: 6
  misc_feature: MA Experiment 20001558 PARAMETER Experiment Name: At_Drought_Soil_Dry_P Parameter: Post-Treatment Value: Re-Water vs. No Drought
  misc_feature: MA Experiment 20001558 PARAMETER Experiment Name: At_Drought_Soil_Dry_P Parameter: Timepoint (day) Value: 13
  misc_feature: MA Experiment 20001558 PARAMETER Experiment Name: At_Drought_Soil_Dry_P Parameter: Treatment Value: Drought vs. No Drought

SEQ ID NO: 44057 - protein, 255 aa, Arabidopsis thaliana; identical to SEQ ID NO: 34839
  peptide (1)..(255): Ceres Seq. ID no. 12333691
  misc_feature (162)..(239): Pfam Name: Pollen allergen Pfam Description: Pollen allergen
  misc_feature (162)..(239): Pfam Name: Pollen allergen Pfam Description: Pollen allergen
  misc_feature (6)..(254): Homolog of NCBI NO: 4138916 NR Description: expansin precursor [Lycopersicon esculentum]
  misc_feature (36)..(254): Homolog of NCBI NO: 20149054 NR Description: putative expansin [Capsicum annuum]
  misc_feature (14)..(254): Homolog of NCBI NO: 29466641 NR Description: expansin [Prunus persica]
  misc_feature (5)..(254): Homolog of NCBI NO: 20502788 NR Description: expansin 13 precursor [Rumex palustris]
  misc_feature (14)..(254): Homolog of NCBI NO: 17484121 NR Description: alpha-expansin [Prunus cerasus]
  misc_feature (6)..(254): Homolog of NCBI NO: 4138916 NR Description: expansin precursor [Lycopersicon esculentum]
  misc_feature (14)..(254): Homolog of NCBI NO: 29466641 NR Description: expansin [Prunus persica]
  misc_feature (14)..(254): Homolog of NCBI NO: 17484121 NR Description: alpha-expansin [Prunus cerasus]
  misc_feature (1)..(255): Homolog of NCBI NO: 15228564 NR Description: expansin (At-EXP5)
  misc_feature (33)..(253): Homolog of NCBI NO: 21314547 NR Description: alpha-expansin precursor [Gossypium hirsutum]
  misc_feature (28)..(255): Homolog of NCBI NO: 11932089 NR Description: expansin [Cicer arietinum]
  misc_feature (33)..(255): Homolog of NCBI NO: 22023949 NR Description: expansin 3 [Malus x domestica]
  misc_feature (6)..(254): Homolog of NCBI NO: 38046730 NR Description: alpha-expansin 3 [Populus tremula x Populus
  misc_feature (5)..(254): Homolog of NCBI NO: 20502788 NR Description: expansin 13 precursor [Rumex palustris]
  misc_feature (36)..(254): Homolog of NCBI NO: 20149054 NR Description: putative expansin [Capsicum annuum]
  misc_feature (6)..(254): Homolog of NCBI NO: 38046730 NR Description: alpha-expansin 3 [Populus tremula x Populus
  misc_feature (33)..(255): Homolog of NCBI NO: 22023949 NR Description: expansin 3 [Malus x domestica]
  misc_feature (28)..(255): Homolog of NCBI NO: 11932089 NR Description: expansin [Cicer arietinum]
  misc_feature (33)..(253): Homolog of NCBI NO: 21314547 NR Description: alpha-expansin precursor [Gossypium hirsutum]
  misc_feature (1)..(255): Homolog of NCBI NO: 15228564 NR Description: expansin (At-EXP5)

SEQ ID NO: 44058 - protein, 221 aa, Arabidopsis thaliana; identical to SEQ ID NO: 34840
  peptide (1)..(221): Ceres Seq. ID no. 12333692
  misc_feature (128)..(205): Pfam Name: Pollen allergen Pfam Description: Pollen allergen
  misc_feature (128)..(205): Pfam Name: Pollen allergen Pfam Description: Pollen allergen
  misc_feature (1)..(220): Homolog of NCBI NO: 4138916 NR Description: expansin precursor [Lycopersicon esculentum]
  misc_feature (2)..(220): Homolog of NCBI NO: 20149054 NR Description: putative expansin [Capsicum annuum]
  misc_feature (1)..(220): Homolog of NCBI NO: 29466641 NR Description: expansin [Prunus persica]
  misc_feature (1)..(220): Homolog of NCBI NO: 20502788 NR Description: expansin 13 precursor [Rumex palustris]
  misc_feature (1)..(220): Homolog of NCBI NO: 17484121 NR Description: alpha-expansin [Prunus cerasus]
  misc_feature (1)..(220): Homolog of NCBI NO: 4138916 NR Description: expansin precursor [Lycopersicon esculentum]
  misc_feature (1)..(220): Homolog of NCBI NO: 29466641 NR Description: expansin [Prunus persica]
  misc_feature (1)..(220): Homolog of NCBI NO: 17484121 NR Description: alpha-expansin [Prunus cerasus]
  misc_feature (1)..(221): Homolog of NCBI NO: 15228564 NR Description: expansin (At-EXP5)
  misc_feature (1)..(219): Homolog of NCBI NO: 21314547 NR Description: alpha-expansin precursor [Gossypium hirsutum]
  misc_feature (1)..(221): Homolog of NCBI NO: 11932089 NR Description: expansin [Cicer arietinum]
  misc_feature (1)..(221): Homolog of NCBI NO: 22023949 NR Description: expansin 3 [Malus x domestica]
  misc_feature (1)..(220): Homolog of NCBI NO: 38046730 NR Description: alpha-expansin 3 [Populus tremula x Populus
  misc_feature (1)..(220): Homolog of NCBI NO: 20502788 NR Description: expansin 13 precursor [Rumex palustris]
  misc_feature (2)..(220): Homolog of NCBI NO: 20149054 NR Description: putative expansin [Capsicum annuum]
  misc_feature (1)..(220): Homolog of NCBI NO: 38046730 NR Description: alpha-expansin 3 [Populus tremula x Populus
  misc_feature (1)..(221): Homolog of NCBI NO: 22023949 NR Description: expansin 3 [Malus x domestica]
  misc_feature (1)..(221): Homolog of NCBI NO: 11932089 NR Description: expansin [Cicer arietinum]
  misc_feature (1)..(219): Homolog of NCBI NO: 21314547 NR Description: alpha-expansin precursor [Gossypium hirsutum]
  misc_feature (1)..(221): Homolog of NCBI NO: 15228564 NR Description: expansin (At-EXP5)

SEQ ID NO: 44059 - protein, 201 aa, Arabidopsis thaliana; identical to SEQ ID NO: 34841
  peptide (1)..(201): Ceres Seq. ID no. 12333693
  misc_feature (108)..(185): Pfam Name: Pollen allergen Pfam Description: Pollen allergen
  misc_feature (108)..(185): Pfam Name: Pollen allergen Pfam Description: Pollen allergen
  misc_feature (1)..(200): Homolog of NCBI NO: 4138916 NR Description: expansin precursor [Lycopersicon esculentum]
  misc_feature (1)..(200): Homolog of NCBI NO: 20149054 NR Description: putative expansin [Capsicum annuum]
  misc_feature (1)..(200): Homolog of NCBI NO: 29466641 NR Description: expansin [Prunus persica]
  misc_feature (1)..(200): Homolog of NCBI NO: 20502788 NR Description: expansin 13 precursor [Rumex palustris]
  misc_feature (1)..(200): Homolog of NCBI NO: 17484121 NR Description: alpha-expansin [Prunus cerasus]
  misc_feature (1)..(200): Homolog of NCBI NO: 4138916 NR Description: expansin precursor [Lycopersicon esculentum]
  misc_feature (1)..(200): Homolog of NCBI NO: 29466641 NR Description: expansin [Prunus persica]
  misc_feature (1)..(200): Homolog of NCBI NO: 17484121 NR Description: alpha-expansin [Prunus cerasus]
  misc_feature (1)..(201): Homolog of NCBI NO: 15228564 NR Description: expansin (At-EXP5)
  misc_feature (1)..(199): Homolog of NCBI NO: 21314547 NR Description: alpha-expansin precursor [Gossypium hirsutum]
  misc_feature (1)..(201): Homolog of NCBI NO: 11932089 NR Description: expansin [Cicer arietinum]
  misc_feature (1)..(201): Homolog of NCBI NO: 22023949 NR Description: expansin 3 [Malus x domestica]
  misc_feature (1)..(200): Homolog of NCBI NO: 38046730 NR Description: alpha-expansin 3 [Populus tremula x Populus
  misc_feature (1)..(200): Homolog of NCBI NO: 20502788 NR Description: expansin 13 precursor [Rumex palustris]
  misc_feature (1)..(200): Homolog of NCBI NO: 20149054 NR Description: putative expansin [Capsicum annuum]
  misc_feature (1)..(200): Homolog of NCBI NO: 38046730 NR Description: alpha-expansin 3 [Populus tremula x Populus
  misc_feature (1)..(201): Homolog of NCBI NO: 22023949 NR Description: expansin 3 [Malus x domestica]
  misc_feature (1)..(201): Homolog of NCBI NO: 11932089 NR Description: expansin [Cicer arietinum]
  misc_feature (1)..(199): Homolog of NCBI NO: 21314547 NR Description: alpha-expansin precursor [Gossypium hirsutum]
  misc_feature (1)..(201): Homolog of NCBI NO: 15228564 NR Description: expansin (At-EXP5)

SEQ ID NO: 44060 - DNA, 1513 bp, Arabidopsis thaliana
  misc_feature (1)..(1513): Ceres Seq. ID no. 12489279
  misc_feature: MA Experiment ID: 20000179 Result: Down-regulated in Transcription
  misc_feature: MA Experiment 20000179 PARAMETER Experiment Name: At_Germinating_Seeds_P Parameter: Age (hr) Value: 6 vs. 0
  misc_feature: MA Experiment 20000179 PARAMETER Experiment Name: At_Germinating_Seeds_P Parameter: Tissue Value: Germinating Seeds
  misc_feature: MA Experiment ID: 20000527 Result: Down-regulated in Transcription
  misc_feature: MA Experiment 20000527 PARAMETER Experiment Name: At_10percent_PEG_P Parameter: Age (day) Value: 20
  misc_feature: MA Experiment 20000527 PARAMETER Experiment Name: At_10percent_PEG_P Parameter: Organism Value: A. thaliana
  misc_feature: MA Experiment 20000527 PARAMETER Experiment Name: At_10percent_PEG_P Parameter: Plant Line Value: WS
  misc_feature: MA Experiment 20000527 PARAMETER Experiment Name: At_10percent_PEG_P Parameter: Timepoint (day) Value: 20
  misc_feature: MA Experiment 20000527 PARAMETER Experiment Name: At_10percent_PEG_P Parameter: Tissue Value: Whole Plant
  misc_feature: MA Experiment 20000527 PARAMETER Experiment Name: At_10percent_PEG_P Parameter: Treatment Value: 10percent PEG vs. No Treatment
  misc_feature: MA Experiment ID: 20001459 Result: Up-regulated in Transcription
  misc_feature: MA Experiment 20001459 PARAMETER Experiment Name: At_50mM_NH4NO3_L-to-H_P Parameter: Age (day) Value: Undefined
  misc_feature: MA Experiment 20001459 PARAMETER Experiment Name: At_50mM_NH4NO3_L-to-H_P Parameter: Organism Value: Undefined
  misc_feature: MA Experiment 20001459 PARAMETER Experiment Name: At_50mM_NH4NO3_L-to-H_P Parameter: Plant Line Value: Undefined
  misc_feature: MA Experiment 20001459 PARAMETER Experiment Name: At_50mM_NH4NO3_L-to-H_P Parameter: Timepoint (hr) Value: 4
  misc_feature: MA Experiment 20001459 PARAMETER Experiment Name: At_50mM_NH4NO3_L-to-H_P Parameter: Tissue Value: Siliques
  misc_feature: MA Experiment 20001459 PARAMETER Experiment Name: At_50mM_NH4NO3_L-to-H_P Parameter: Treatment Value: 50mM NH4NO3 vs. 100mM Manitol
  misc_feature: MA Experiment ID: 20001557 Result: Up-regulated in Transcription
  misc_feature: MA Experiment 20001557 PARAMETER Experiment Name: At_Drought_Soil_Dry_P Parameter: Age (day) Value: 27
  misc_feature: MA Experiment 20001557 PARAMETER Experiment Name: At_Drought_Soil_Dry_P Parameter: Organism Value: A. thaliana
  misc_feature: MA Experiment 20001557 PARAMETER Experiment Name: At_Drought_Soil_Dry_P Parameter: Plant Line Value: WS
  misc_feature: MA Experiment 20001557 PARAMETER Experiment Name: At_Drought_Soil_Dry_P Parameter: Post Timepoint (hr) Value: 3
  misc_feature: MA Experiment 20001557 PARAMETER Experiment Name: At_Drought_Soil_Dry_P Parameter: Post-Treatment Value: Re-Water vs. No Drought
  misc_feature: MA Experiment 20001557 PARAMETER Experiment Name: At_Drought_Soil_Dry_P Parameter: Timepoint (day) Value: 13
  misc_feature: MA Experiment 20001557 PARAMETER Experiment Name: At_Drought_Soil_Dry_P Parameter: Treatment Value: Drought vs. No Drought
ggccgagaaaaaaaaaaaatgttgccggtcacaagtcgccgccacttcacaatgtccctatatatgctccgttcatcttctccacacatcaatcatcactctttccttcttccttcttttgtttcctccaaattcaaacaccatactttatctcctcctccttctcctcctcctcctcctcctatggctgcgtgcatcgacacctgccgcactggtaaaccccagatttctcctcgcgattcttctaaacaccacgacgatgaatctggctttcgttacatgaactacttccgttatcctgatcgatcttccttcaatggaacccagaccaaaaccctccatactcgtcctttgcttgaagatctcgatcgcgacgctgaagtcgatgatgtttgggccaaaatccgagaagaggctaaatctgatatcgccaaagaacctattgtttccgcttattatcacgcttcgattgtttctcagcgttcgttggaagctgcgttggcgaatactttatctgttaaactcagcaatttgaatcttccaagcaacacgcttttcgatttgttctctggtgttcttcaaggaaacccagatattgttgaatctgtcaagctagatcttttagctgttaaggagagagatcctgcttgtataagctacgttcattgtttccttcactttaaaggcttcctcgcttgtcaagcgcatcgtattgctcatgagctttggactcaggacagaaaaatcctagctttgttgatccagaacagagtctctgaagccttcgctgttgatttccaccctggagctaaaatcggtaccgggattttgctagaccatgctacggctattgtgatcggtgagacggcggttgtggggaacaatgtttcgattctccataacgttacgcttggaggaacggggaaacagtgtggagataggcacccgaagattggcgatggggttttgattggagctgggacttgtattttggggaatatcacgattggtgaaggagctaagattggtgcggggtcggtggtgttgaaagacgtgccgccgcgtacgacggctgttggaaatccggcgaggttgcttggtggtaaagataatccgaaaacgcatgacaagattcctggtttgactatggaccagacgtcgcatatatccgagtggtcggattatgtaatttgaaaaagtctttgtttttggttgttgttgttgtttatggcttttcattgttctctcggcttcttctgttattgaagctggtgaagtatatgatatgcgatgatgctgtttccataatcagatcatttgtctctccataagataacactgattaagatgggattggaaagtaaactcggaaactctgaactctgtttagtggagtttcctgtggttggtttctgattagcagagacttaagatatgtttagtatgtaagtgcttatttggttaaaccatgatttctgtgatcagattgttgggaagaaactgaagattcatc

SEQ ID NO: 44061 - protein, 397 aa, Arabidopsis thaliana
  peptide (1)..(397): Ceres Seq. ID no. 12489280
  misc_feature (74)..(397): Homolog of NCBI NO: 23343583 NR Description: serine acetyltransferase 4 [Nicotiana tabacum]
  misc_feature (64)..(397): Homolog of NCBI NO: 23343581 NR Description: serine acetyltransferase 1 [Nicotiana tabacum]
  misc_feature (60)..(397): Homolog of NCBI NO: 38350581 NR Description: serine acetyltransferase [Nicotiana
  misc_feature (86)..(397): Homolog of NCBI NO: 2146775 NR Description: serine O-acetyltransferase (EC 2.3.1.30) SAT1
  misc_feature (86)..(397): Homolog of NCBI NO: 15222799 NR Description: serine acetyltransferase
  misc_feature (94)..(397): Homolog of NCBI NO: 2129731 NR Description: serine O-acetyltransferase (EC 2.3.1.30) satA -
  misc_feature (86)..(397): Homolog of NCBI NO: 897678 NR Description: serine O-acetyltransferase [Arabidopsis thaliana]
  misc_feature (62)..(397): Homolog of NCBI NO: 1369758 NR Description: serine acetyltransferase
  misc_feature (62)..(397): Homolog of NCBI NO: 1107505 NR Description: serine O-acetyltransferase [Arabidopsis thaliana]
  misc_feature (7)..(397): Homolog of NCBI NO: 15231152 NR Description: serine acetyltransferase (Sat-1)
GREKKKMLPVTSRRHFTMSLYMLRSSSPHINHHSFLLPSFVSSKFKHHTLSPPPSPPPPPPMAACIDTCRTGKPQISPRDSSKHHDDESGFRYMNYFRYPDRSSFNGTQTKTLHTRPLLEDLDRDAEVDDVWAKIREEAKSDIAKEPIVSAYYHASIVSQRSLEAALANTLSVKLSNLNLPSNTLFDLFSGVLQGNPDIVESVKLDLLAVKERDPACISYVHCFLHFKGFLACQAHRIAHELWTQDRKILALLIQNRVSEAFAVDFHPGAKIGTGILLDHATAIVIGETAVVGNNVSILHNVTLGGTGKQCGDRHPKIGDGVLIGAGTCILGNITIGEGAKIGAGSVVLKDVPPRTTAVGNPARLLGGKDNPKTHDKIPGLTMDQTSHISEWSDYVI

SEQ ID NO: 44062 - protein, 391 aa, Arabidopsis thaliana
  peptide (1)..(391): Ceres Seq. ID no. 12489281
  misc_feature (68)..(391): Homolog of NCBI NO: 23343583 NR Description: serine acetyltransferase 4 [Nicotiana tabacum]
  misc_feature (58)..(391): Homolog of NCBI NO: 23343581 NR Description: serine acetyltransferase 1 [Nicotiana tabacum]
  misc_feature (54)..(391): Homolog of NCBI NO: 38350581 NR Description: serine acetyltransferase [Nicotiana
  misc_feature (80)..(391): Homolog of NCBI NO: 2146775 NR Description: serine O-acetyltransferase (EC 2.3.1.30) SAT1
  misc_feature (80)..(391): Homolog of NCBI NO: 15222799 NR Description: serine acetyltransferase
  misc_feature (88)..(391): Homolog of NCBI NO: 2129731 NR Description: serine O-acetyltransferase (EC 2.3.1.30) satA -
  misc_feature (80)..(391): Homolog of NCBI NO: 897678 NR Description: serine O-acetyltransferase [Arabidopsis thaliana]
  misc_feature (56)..(391): Homolog of NCBI NO: 1369758 NR Description: serine acetyltransferase
  misc_feature (56)..(391): Homolog of NCBI NO: 1107505 NR Description: serine O-acetyltransferase [Arabidopsis thaliana]
  misc_feature (1)..(391): Homolog of NCBI NO: 15231152 NR Description: serine acetyltransferase (Sat-1)
MLPVTSRRHFTMSLYMLRSSSPHINHHSFLLPSFVSSKFKHHTLSPPPSPPPPPPMAACIDTCRTGKPQISPRDSSKHHDDESGFRYMNYFRYPDRSSFNGTQTKTLHTRPLLEDLDRDAEVDDVWAKIREEAKSDIAKEPIVSAYYHASIVSQRSLEAALANTLSVKLSNLNLPSNTLFDLFSGVLQGNPDIVESVKLDLLAVKERDPACISYVHCFLHFKGFLACQAHRIAHELWTQDRKILALLIQNRVSEAFAVDFHPGAKIGTGILLDHATAIVIGETAVVGNNVSILHNVTLGGTGKQCGDRHPKIGDGVLIGAGTCILGNITIGEGAKIGAGSVVLKDVPPRTTAVGNPARLLGGKDNPKTHDKIPGLTMDQTSHISEWSDYVI

SEQ ID NO: 44063 - protein, 380 aa, Arabidopsis thaliana
  peptide (1)..(380): Ceres Seq. ID no. 12489282
  misc_feature (57)..(380): Homolog of NCBI NO: 23343583 NR Description: serine acetyltransferase 4 [Nicotiana tabacum]
  misc_feature (47)..(380): Homolog of NCBI NO: 23343581 NR Description: serine acetyltransferase 1 [Nicotiana tabacum]
  misc_feature (43)..(380): Homolog of NCBI NO: 38350581 NR Description: serine acetyltransferase [Nicotiana
  misc_feature (69)..(380): Homolog of NCBI NO: 2146775 NR Description: serine O-acetyltransferase (EC 2.3.1.30) SAT1
  misc_feature (69)..(380): Homolog of NCBI NO: 15222799 NR Description: serine acetyltransferase
  misc_feature (77)..(380): Homolog of NCBI NO: 2129731 NR Description: serine O-acetyltransferase (EC 2.3.1.30) satA -
  misc_feature (69)..(380): Homolog of NCBI NO: 897678 NR Description: serine O-acetyltransferase [Arabidopsis thaliana]
  misc_feature (45)..(380): Homolog of NCBI NO: 1369758 NR Description: serine acetyltransferase
  misc_feature (45)..(380): Homolog of NCBI NO: 1107505 NR Description: serine O-acetyltransferase [Arabidopsis thaliana]
  misc_feature (1)..(380): Homolog of NCBI NO: 15231152 NR Description: serine acetyltransferase (Sat-1)
MSLYMLRSSSPHINHHSFLLPSFVSSKFKHHTLSPPPSPPPPPPMAACIDTCRTGKPQISPRDSSKHHDDESGFRYMNYFRYPDRSSFNGTQTKTLHTRPLLEDLDRDAEVDDVWAKIREEAKSDIAKEPIVSAYYHASIVSQRSLEAALANTLSVKLSNLNLPSNTLFDLFSGVLQGNPDIVESVKLDLLAVKERDPACISYVHCFLHFKGFLACQAHRIAHELWTQDRKILALLIQNRVSEAFAVDFHPGAKIGTGILLDHATAIVIGETAVVGNNVSILHNVTLGGTGKQCGDRHPKIGDGVLIGAGTCILGNITIGEGAKIGAGSVVLKDVPPRTTAVGNPARLLGGKDNPKTHDKIPGLTMDQTSHISEWSDYVI

SEQ ID NO: 44064 - DNA, 1827 bp, Arabidopsis thaliana
  misc_feature (1)..(1827): Ceres Seq. ID no. 12488659
  misc_feature: MA Experiment ID: 20000180 Result: Up-regulated in Transcription
  misc_feature: MA Experiment 20000180 PARAMETER Experiment Name: At_Germinating_Seeds_P Parameter: Age (hr) Value: 24 vs. 0
  misc_feature: MA Experiment 20000180 PARAMETER Experiment Name: At_Germinating_Seeds_P Parameter: Tissue Value: Germinating Seeds
  misc_feature: MA Experiment ID: 20000185 Result: Down-regulated in Transcription
  misc_feature: MA Experiment 20000185 PARAMETER Experiment Name: At_Roots__P Parameter: Age (day) Value: 7 vs. 21
  misc_feature: MA Experiment 20000185 PARAMETER Experiment Name: At_Roots__P Parameter: Organism Value: A. thaliana
  misc_feature: MA Experiment 20000185 PARAMETER Experiment Name: At_Roots__P Parameter: Tissue Value: Roots vs. Whole Plant
tctctttctctctgactctgaaaaagatgaagtggagaagttaatgttcaccaacttaatactgcaaagtcgaaatctttctttcttcttctttgccttctttcaagtgctttccctctctcattctccttcttcctcctctgtttctttgttgttctaaacttaaaaaaagattgaagttgcaagtaacagaggagctgtctcagatctggttctaaagcgagagaaagagattttgagttgaggaaaaatgagtaaagaagagttcatgaagatccagacttgtgttcttaaagtgaacatacactgtgatggctgtaagcagaaagtcaagaaaatcttgcagaaaatcgaaggtgttttcacgaccaagattgactcagagcaagggaaagtgactgtctctgggagcgtagatccttcagttctcatcaagaagctcgccaaatctggtaaacatgctgaaatctggggagctccaaagggtaacaacaatcccaatcagtcccaaatggccaatcagtttaagggaatgcagattgaccatggaaaagccggaggcggtggtggcggaaacaataataacaacaagaaaggccagaaaaacggcggaggaggtggcggcggtggaggtggaggtaacagtaatgcgccaaagatgggccagcaactgaatccacaacatttgcagcagcttcaacagcttcagaagatgaaagggtttcaagatctgaagcttcctcctcagttaaaaggctctgttcctgtcaacaagaaccaaaaccagaaaggagtcaagtttgatgtccctgaagatgatgatgatgatgatttcagtgacgaattcgatgatgaatttactgatgatgatgacgacgagtttgatgatgagtttgacgatctccctcttccgtctaataagatgaagcccaacatgacgatgatgcctaatgctcaacagatgatgatgaacgctcagaagaatgccaatcttgccggtggtcctgctaaaaacggcggtaaaggcgctcccgctgctggcggcggcggtgccggtggtggaaagggtgctggcggcggtgctaagggtggtcctgggaatcaaaaccaaggtggaggcaagaacggcggtggtggacatccacaagatggtaaaaacggcggtggaggcggtggtcccaacgccggaaaaaagggtaacggcggaggtgggcccatggctggaggagtttcgggaggtttccgacccatgggaggtggaggaccacagaatatgagcatgccaatgggtggtcaaatgggtatgggtggtccgatggggaatatgccggcggttcaggggttaccagcgaccggtccaggcggtgcaccacagggttatttccaaggggccgggatagatcctatgcaaatgcagcaacagcaacaacaacagcaatatttagcggcggttatgaaccagcaacgagctatggggaacgaacggttccaaccaatgatgtacgcaaggccaccaccggcagttaactatatgccgccaaacccgcaccaatatccgaatccgcatccgtatccgtatccgtacccgtatccatatcctccaccttatgggaatgatcaatactctcatgcctttagcgacgagaacacatcaagctgcgatattatgtgagatggttaaaaatcaaaataaaacttttatagtttgtgtgtatttgaatcctaagttggggtttttttcgatggatcgaaatgctaagttgttgtaggtttttttttttcactttgtgatagcttcggtaatttaatagaataatataaaatttg

SEQ ID NO: 44065 - protein, 473 aa, Arabidopsis thaliana
  peptide (1)..(473): Ceres Seq. ID no. 12488660
  misc_feature (13)..(73): Pfam Name: Heavy-metal-associated domain Pfam Description: Heavy-metal-associated domain
  misc_feature (64)..(388): Homolog of NCBI NO: 15239643 NR Description: putative protein; protein id: At5g19090.1
  misc_feature (75)..(138): Homolog of NCBI NO: 27754558 NR Description: unknown protein [Arabidopsis thaliana]
  misc_feature (244)..(473): Homolog of NCBI NO: 27754558 NR Description: unknown protein [Arabidopsis thaliana]
  misc_feature (250)..(370): Homolog of NCBI NO: 15239643 NR Description: putative protein; protein id: At5g19090.1
  misc_feature (245)..(453): Homolog of NCBI NO: 15239643 NR Description: putative protein; protein id: At5g19090.1
  misc_feature (302)..(473): Homolog of NCBI NO: 30687142 NR Description: heavy-metal-associated domain-containing protein
  misc_feature (1)..(217): Homolog of NCBI NO: 30687142 NR Description: heavy-metal-associated domain-containing protein
  misc_feature (1)..(217): Homolog of NCBI NO: 15239643 NR Description: putative protein; protein id: At5g19090.1
  misc_feature (244)..(473): Homolog of NCBI NO: 15239643 NR Description: putative protein; protein id: At5g19090.1
  misc_feature (1)..(473): Homolog of NCBI NO: 18397481 NR Description: expressed protein
MSKEEFMKIQTCVLKVNIHCDGCKQKVKKILQKIEGVFTTKIDSEQGKVTVSGSVDPSVLIKKLAKSGKHAEIWGAPKGNNNPNQSQMANQFKGMQIDHGKAGGGGGGNNNNNKKGQKNGGGGGGGGGGGNSNAPKMGQQLNPQHLQQLQQLQKMKGFQDLKLPPQLKGSVPVNKNQNQKGVKFDVPEDDDDDDFSDEFDDEFTDDDDDEFDDEFDDLPLPSNKMKPNMTMMPNAQQMMMNAQKNANLAGGPAKNGGKGAPAAGGGGAGGGKGAGGGAKGGPGNQNQGGGKNGGGGHPQDGKNGGGGGGPNAGKKGNGGGGPMAGGVSGGFRPMGGGGPQNMSMPMGGQMGMGGPMGNMPAVQGLPATGPGGAPQGYFQGAGIDPMQMQQQQQQQQYLAAVMNQQRAMGNERFQPMMYARPPPAVNYMPPNPHQYPNPHPYPYPYPYPYPPPYGNDQYSHAFSDENTSSCDIM

SEQ ID NO: 44066 - protein, 467 aa, Arabidopsis thaliana
  peptide (1)..(467): Ceres Seq. ID no. 12488661
  misc_feature (7)..(67): Pfam Name: Heavy-metal-associated domain Pfam Description: Heavy-metal-associated domain
  misc_feature (58)..(382): Homolog of NCBI NO: 15239643 NR Description: putative protein; protein id: At5g19090.1
  misc_feature (69)..(132): Homolog of NCBI NO: 27754558 NR Description: unknown protein [Arabidopsis thaliana]
  misc_feature (238)..(467): Homolog of NCBI NO: 27754558 NR Description: unknown protein [Arabidopsis thaliana]
  misc_feature (244)..(364): Homolog of NCBI NO: 15239643 NR Description: putative protein; protein id: At5g19090.1
  misc_feature (239)..(447): Homolog of NCBI NO: 15239643 NR Description: putative protein; protein id: At5g19090.1
  misc_feature (296)..(467): Homolog of NCBI NO: 30687142 NR Description: heavy-metal-associated domain-containing protein
  misc_feature (1)..(211): Homolog of NCBI NO: 30687142 NR Description: heavy-metal-associated domain-containing protein
  misc_feature (1)..(211): Homolog of NCBI NO: 15239643 NR Description: putative protein; protein id: At5g19090.1
  misc_feature (238)..(467): Homolog of NCBI NO: 15239643 NR Description: putative protein; protein id: At5g19090.1
  misc_feature (1)..(467): Homolog of NCBI NO: 18397481 NR Description: expressed protein
MKIQTCVLKVNIHCDGCKQKVKKILQKIEGVFTTKIDSEQGKVTVSGSVDPSVLIKKLAKSGKHAEIWGAPKGNNNPNQSQMANQFKGMQIDHGKAGGGGGGNNNNNKKGQKNGGGGGGGGGGGNSNAPKMGQQLNPQHLQQLQQLQKMKGFQDLKLPPQLKGSVPVNKNQNQKGVKFDVPEDDDDDDFSDEFDDEFTDDDDDEFDDEFDDLPLPSNKMKPNMTMMPNAQQMMMNAQKNANLAGGPAKNGGKGAPAAGGGGAGGGKGAGGGAKGGPGNQNQGGGKNGGGGHPQDGKNGGGGGGPNAGKKGNGGGGPMAGGVSGGFRPMGGGGPQNMSMPMGGQMGMGGPMGNMPAVQGLPATGPGGAPQGYFQGAGIDPMQMQQQQQQQQYLAAVMNQQRAMGNERFQPMMYARPPPAVNYMPPNPHQYPNPHPYPYPYPYPYPPPYGNDQYSHAFSDENTSSCDIM

SEQ ID NO: 44067 - protein, 386 aa, Arabidopsis thaliana
  peptide (1)..(386): Ceres Seq. ID no. 12488662
  misc_feature (90)..(289): Pfam Name: S-antigen protein Pfam Description: S-antigen protein
  misc_feature (1)..(301): Homolog of NCBI NO: 15239643 NR Description: putative protein; protein id: At5g19090.1
  misc_feature (1)..(51): Homolog of NCBI NO: 27754558 NR Description: unknown protein [Arabidopsis thaliana]
  misc_feature (157)..(386): Homolog of NCBI NO: 27754558 NR Description: unknown protein [Arabidopsis thaliana]
  misc_feature (163)..(283): Homolog of NCBI NO: 15239643 NR Description: putative protein; protein id: At5g19090.1
  misc_feature (158)..(366): Homolog of NCBI NO: 15239643 NR Description: putative protein; protein id: At5g19090.1
  misc_feature (215)..(386): Homolog of NCBI NO: 30687142 NR Description: heavy-metal-associated domain-containing protein
  misc_feature (1)..(130): Homolog of NCBI NO: 30687142 NR Description: heavy-metal-associated domain-containing protein
  misc_feature (1)..(130): Homolog of NCBI NO: 15239643 NR Description: putative protein; protein id: At5g19090.1
  misc_feature (157)..(386): Homolog of NCBI NO: 15239643 NR Description: putative protein; protein id: At5g19090.1
  misc_feature (1)..(386): Homolog of NCBI NO: 18397481 NR Description: expressed protein
MANQFKGMQIDHGKAGGGGGGNNNNNKKGQKNGGGGGGGGGGGNSNAPKMGQQLNPQHLQQLQQLQKMKGFQDLKLPPQLKGSVPVNKNQNQKGVKFDVPEDDDDDDFSDEFDDEFTDDDDDEFDDEFDDLPLPSNKMKPNMTMMPNAQQMMMNAQKNANLAGGPAKNGGKGAPAAGGGGAGGGKGAGGGAKGGPGNQNQGGGKNGGGGHPQDGKNGGGGGGPNAGKKGNGGGGPMAGGVSGGFRPMGGGGPQNMSMPMGGQMGMGGPMGNMPAVQGLPATGPGGAPQGYFQGAGIDPMQMQQQQQQQQYLAAVMNQQRAMGNERFQPMMYARPPPAVNYMPPNPHQYPNPHPYPYPYPYPYPPPYGNDQYSHAFSDENTSSCDIM

SEQ ID NO: 44068 - DNA, 1975 bp, Arabidopsis thaliana
  misc_feature (1)..(1975): Ceres Seq. ID no. 13509683
  misc_feature: MA Experiment ID: 20000173 Result: Up-regulated in Transcription
  misc_feature: MA Experiment 20000173 PARAMETER Experiment Name: At_42deg_Heat_P Parameter: Age (day) Value: 14
  misc_feature: MA Experiment 20000173 PARAMETER Experiment Name: At_42deg_Heat_P Parameter: Organism Value: A. thaliana
  misc_feature: MA Experiment 20000173 PARAMETER Experiment Name: At_42deg_Heat_P Parameter: Plant Line Value: WS
  misc_feature: MA Experiment 20000173 PARAMETER Experiment Name: At_42deg_Heat_P Parameter: Temperature (deg C) Value: 42 vs. 22
  misc_feature: MA Experiment 20000173 PARAMETER Experiment Name: At_42deg_Heat_P Parameter: Timepoint (hr) Value: 6
  misc_feature: MA Experiment 20000173 PARAMETER Experiment Name: At_42deg_Heat_P Parameter: Tissue Value: Aerial
  misc_feature: MA Experiment ID: 20000184 Result: Down-regulated in Transcription
  misc_feature: MA Experiment 20000184 PARAMETER Experiment Name: At_Shoots__P Parameter: Age (day) Value: 7
  misc_feature: MA Experiment 20000184 PARAMETER Experiment Name: At_Shoots__P Parameter: Tissue Value: Shoots vs. Whole Plant
acctgagctgagactgagagacatctcggtgaagaagtagcagagatgtcgacggtgtacgtgctagagccgccgacaaagggaaaggtcattgtaaatactactcatggtccaatcgacgtcgagctttggcctaaggaagcgcccaaatccgtacggaacttcgttcaactatgcctcgagggttactttgacaacaccatcttccatcgtgtcattcccggttttctcgttcaaggcggcgatcccaccggctccggaaccggtggagatagtatatatggaggtgtctttgccgatgagttccattcaaggctgagatttagccaccgtgggattgttgccatggctaatgcgagctcacctaattctaatggaagtcagttctttttcactttggataagtgtgattggcttgataagaagcacactatctttggcaaggtaacgggcgattcaatctacaatcttttaagactaggagaggttgacacgagtaaggatgatcgacctctggatcctgctccgaaaatattatctgtcgaggttttgtggaacccttttgaagatattgttcctagagtgttagcaaagacatcagaagaatctgctgctgaaatcaaggaacccccaacaaagcccgtgaagaaattgaatttactgtcattcggagaagaagctgaagaagaggaaaaggaactggctgttgtaaagcaaaagattaagagcagtcatgacgtattgaatgatcctcgacttttgaaggcagaagcttcagataaagagaggaacgcatctgagtccaaggaggtactatctgtgcgagaagctctgaatgctaagaaagaagcggctcaaaaagataaaagcttttctgtatctgatacagttggaaatagtgatgatgacgatgatggtgaagatgagactaaatttgatgcaaagatgaggaatcaagtgctcagcagaaggaaggagattggagatacgccttcaaagccgactcagaaaaaaaagagctctagcctgaaaggccgtgaagagtctacgcaaaggtctgatgctgtaagtagtgaagatgagaaaccaaggatggaaaagttgtccttgaagaaaaaaggaataggctcagaagccaaagccgaacatatggagaaaggagacactgatttacagctttacaacgcttctgaacgcgcccggcagttgcataagttgaaaaagcgcagactgcaaggaaatgaggattctgtaagttgtttaccaaatttgtggcttaattttaaatttattttctggcttattatatattccccttcttcgtttcctaaacttgtccttgctttattgtggcatacttattccctaaaagttaaatctaattttgtcagagcaactgtgttagcaaaactcgagaagtttaagcagtctatctctgcaaaaccgtttacctcgagtaatgaaccagtagtgttgacctcgagtagtgaaccagttgacaataaagaagaagatctctctgattggaagaatgtaaagctcaagtttgctcctgagcgtggcaaggataaaatgttacgcagggatgatccagatgcgtatatggtggttgaccctcttcttgaaaagggaaaagagagttcaacagaatgcaagccaaacaaaaacgaagggagcgagaatggtctggaaaatctcttgcctgagtttggaaatnttaaccatttaattttgttttcttatgttgatccttaagatgcccgttcactgtcaaaatctctcctgtttaaacttagatacattcagagacatgaatgagcatnttaaataaggtcactagctccaatgatacagaactaatgtgttaatacatgttatatgtaggaaacttagctatataagtgatatgattttaagcccttcaactgacatttatcttcaatagattggtcatccaggttggatggtattctcc

SEQ ID NO: 44069 - protein, 569 aa, Arabidopsis thaliana
  peptide (1)..(569): Ceres Seq. ID no. 13509684
  misc_feature (1)..(341): Homolog of NCBI NO: 19112735 NR Description: peptidyl prolyl cis trans isomerase
  misc_feature (1)..(221): Homolog of NCBI NO: 7509444 NR Description: peptidylprolyl isomerase (EC 5.2.1.8) Y17G7B.9
  misc_feature (1)..(221): Homolog of NCBI NO: 27516689 NR Description: cyclophilin-16; OvCYP-16 [Onchocerca volvulus]
  misc_feature (1)..(403): Homolog of NCBI NO: 39591493 NR Description: Hypothetical protein CBG21016 [Caenorhabditis
  misc_feature (1)..(392): Homolog of NCBI NO: 21357249 NR Description: CG10907-PA [Drosophila melanogaster]
  misc_feature (1)..(365): Homolog of NCBI NO: 29436797 NR Description: Unknown (protein for MGC:56702) [Danio rerio]
  misc_feature (453)..(531): Homolog of NCBI NO: 21902020 NR Description: B1097D05.21 [Oryza sativa (japonica
  misc_feature (1)..(401): Homolog of NCBI NO: 21902020 NR Description: B1097D05.21 [Oryza sativa (japonica
  misc_feature (1)..(403): Homolog of NCBI NO: 30689591 NR Description: expressed protein [Arabidopsis thaliana]
  misc_feature (1)..(507): Homolog of NCBI NO: 7486212 NR Description: hypothetical protein F26P21.180 - Arabidopsis
  misc_feature (558)..(558): Xaa is any aa, unknown or other
MSTVYVLEPPTKGKVIVNTTHGPIDVELWPKEAPKSVRNFVQLCLEGYFDNTIFHRVIPGFLVQGGDPTGSGTGGDSIYGGVFADEFHSRLRFSHRGIVAMANASSPNSNGSQFFFTLDKCDWLDKKHTIFGKVTGDSIYNLLRLGEVDTSKDDRPLDPAPKILSVEVLWNPFEDIVPRVLAKTSEESAAEIKEPPTKPVKKLNLLSFGEEAEEEEKELAVVKQKIKSSHDVLNDPRLLKAEASDKERNASESKEVLSVREALNAKKEAAQKDKSFSVSDTVGNSDDDDDGEDETKFDAKMRNQVLSRRKEIGDTPSKPTQKKKSSSLKGREESTQRSDAVSSEDEKPRMEKLSLKKKGIGSEAKAEHMEKGDTDLQLYNASERARQLHKLKKRRLQGNEDSVSCLPNLWLNFKFIFWLIIYSPSSFPKLVLALLWHTYSLKVKSNFVRATVLAKLEKFKQSISAKPFTSSNEPVVLTSSSEPVDNKEEDLSDWKNVKLKFAPERGKDKMLRRDDPDAYMVVDPLLEKGKESSTECKPNKNEGSENGLENLLPEFGNXNHLILFSYVDP

SEQ ID NO: 44070 - protein, 469 aa, Arabidopsis thaliana
  peptide (1)..(469): Ceres Seq. ID no. 13509685
  misc_feature (1)..(241): Homolog of NCBI NO: 19112735 NR Description: peptidyl prolyl cis trans isomerase
  misc_feature (1)..(121): Homolog of NCBI NO: 7509444 NR Description: peptidylprolyl isomerase (EC 5.2.1.8) Y17G7B.9
  misc_feature (1)..(121): Homolog of NCBI NO: 27516689 NR Description: cyclophilin-16; OvCYP-16 [Onchocerca volvulus]
  misc_feature (1)..(303): Homolog of NCBI NO: 39591493 NR Description: Hypothetical protein CBG21016 [Caenorhabditis
  misc_feature (1)..(292): Homolog of NCBI NO: 21357249 NR Description: CG10907-PA [Drosophila melanogaster]
  misc_feature (1)..(265): Homolog of NCBI NO: 29436797 NR Description: Unknown (protein for MGC:56702) [Danio rerio]
  misc_feature (353)..(431): Homolog of NCBI NO: 21902020 NR Description: B1097D05.21 [Oryza sativa (japonica
  misc_feature (1)..(301): Homolog of NCBI NO: 21902020 NR Description: B1097D05.21 [Oryza sativa (japonica
  misc_feature (1)..(303): Homolog of NCBI NO: 30689591 NR Description: expressed protein [Arabidopsis thaliana]
  misc_feature (1)..(407): Homolog of NCBI NO: 7486212 NR Description: hypothetical protein F26P21.180 - Arabidopsis
  misc_feature (458)..(458): Xaa is any aa, unknown or other
MANASSPNSNGSQFFFTLDKCDWLDKKHTIFGKVTGDSIYNLLRLGEVDTSKDDRPLDPAPKILSVEVLWNPFEDIVPRVLAKTSEESAAEIKEPPTKPVKKLNLLSFGEEAEEEEKELAVVKQKIKSSHDVLNDPRLLKAEASDKERNASESKEVLSVREALNAKKEAAQKDKSFSVSDTVGNSDDDDDGEDETKFDAKMRNQVLSRRKEIGDTPSKPTQKKKSSSLKGREESTQRSDAVSSEDEKPRMEKLSLKKKGIGSEAKAEHMEKGDTDLQLYNASERARQLHKLKKRRLQGNEDSVSCLPNLWLNFKFIFWLIIYSPSSFPKLVLALLWHTYSLKVKSNFVRATVLAKLEKFKQSISAKPFTSSNEPVVLTSSSEPVDNKEEDLSDWKNVKLKFAPERGKDKMLRRDDPDAYMVVDPLLEKGKESSTECKPNKNEGSENGLENLLPEFGNXNHLILFSYVDP

SEQ ID NO: 44071 - DNA, 1040 bp, Arabidopsis thaliana
  misc_feature (1)..(1040): Ceres Seq. ID no. 12489363
  misc_feature: MA Experiment ID: 20000307 Result: Up-regulated in Transcription
  misc_feature: MA Experiment 20000307 PARAMETER Experiment Name: At_Germinating_Seeds_Sub_P Parameter: Age (hr) Value: 24 vs. 0
  misc_feature: MA Experiment 20000307 PARAMETER Experiment Name: At_Germinating_Seeds_Sub_P Parameter: Organism Value: A. thaliana
  misc_feature: MA Experiment 20000307 PARAMETER Experiment Name: At_Germinating_Seeds_Sub_P Parameter: Plant Line Value: WS
  misc_feature: MA Experiment 20000307 PARAMETER Experiment Name: At_Germinating_Seeds_Sub_P Parameter: Tissue Value: Germinating Seeds
  misc_feature: MA Experiment ID: 20000314 Result: Up-regulated in Transcription
  misc_feature: MA Experiment 20000314 PARAMETER Experiment Name: At_14day_Shoots-Roots_Sub_P Parameter: Age (day) Value: 14
  misc_feature: MA Experiment 20000314 PARAMETER Experiment Name: At_14day_Shoots-Roots_Sub_P Parameter: Organism Value: A. thaliana
  misc_feature: MA Experiment 20000314 PARAMETER Experiment Name: At_14day_Shoots-Roots_Sub_P Parameter: Plant Line Value: WS
  misc_feature: MA Experiment 20000314 PARAMETER Experiment Name: At_14day_Shoots-Roots_Sub_P Parameter: Tissue Value: Roots vs. Whole Plant
  misc_feature: MA Experiment ID: 20000315 Result: Down-regulated in Transcription
  misc_feature: MA Experiment 20000315 PARAMETER Experiment Name: At_14day_Shoots-Roots_Sub_P Parameter: Age (day) Value: 14
  misc_feature: MA Experiment 20000315 PARAMETER Experiment Name: At_14day_Shoots-Roots_Sub_P Parameter: Organism Value: A. thaliana
  misc_feature: MA Experiment 20000315 PARAMETER Experiment Name: At_14day_Shoots-Roots_Sub_P Parameter: Plant Line Value: WS
  misc_feature: MA Experiment 20000315 PARAMETER Experiment Name: At_14day_Shoots-Roots_Sub_P Parameter: Tissue Value: Shoots vs. Whole Plant
  misc_feature: MA Experiment ID: 20000347 Result: Up-regulated in Transcription
  misc_feature: MA Experiment 20000347 PARAMETER Experiment Name: At_2mM_SA_Sub_P Parameter: Age (day) Value: 14
  misc_feature: MA Experiment 20000347 PARAMETER Experiment Name: At_2mM_SA_Sub_P Parameter: Organism Value: A. thaliana
  misc_feature: MA Experiment 20000347 PARAMETER Experiment Name: At_2mM_SA_Sub_P Parameter: Plant Line Value: WS
  misc_feature: MA Experiment 20000347 PARAMETER Experiment Name: At_2mM_SA_Sub_P Parameter: Timepoint (hr) Value: 6
  misc_feature: MA Experiment 20000347 PARAMETER Experiment Name: At_2mM_SA_Sub_P Parameter: Tissue Value: Aerial
  misc_feature: MA Experiment 20000347 PARAMETER Experiment Name: At_2mM_SA_Sub_P Parameter: Treatment Value: 2mM SA vs. No Treatment
  misc_feature: MA Experiment ID: 20000348 Result: Up-regulated in Transcription
  misc_feature: MA Experiment 20000348 PARAMETER Experiment Name: At_100uM_ABA_Sub_P Parameter: Age (day) Value: 14
  misc_feature: MA Experiment 20000348 PARAMETER Experiment Name: At_100uM_ABA_Sub_P Parameter: Organism Value: A. thaliana
  misc_feature: MA Experiment 20000348 PARAMETER Experiment Name: At_100uM_ABA_Sub_P Parameter: Plant Line Value: WS
  misc_feature: MA Experiment 20000348 PARAMETER Experiment Name: At_100uM_ABA_Sub_P Parameter: Timepoint (hr) Value: 1
  misc_feature: MA Experiment 20000348 PARAMETER Experiment Name: At_100uM_ABA_Sub_P Parameter: Tissue Value: Aerial
  misc_feature: MA Experiment 20000348 PARAMETER Experiment Name: At_100uM_ABA_Sub_P Parameter: Treatment Value: 100uM ABA vs. No Treatment
  misc_feature: MA Experiment ID: 20000349 Result: Up-regulated in Transcription
  misc_feature: MA Experiment 20000349 PARAMETER Experiment Name: At_100uM_ABA_Sub_P Parameter: Age (day) Value: 14
  misc_feature: MA Experiment 20000349 PARAMETER Experiment Name: At_100uM_ABA_Sub_P Parameter: Organism Value: A. thaliana
  misc_feature: MA Experiment 20000349 PARAMETER Experiment Name: At_100uM_ABA_Sub_P Parameter: Plant Line Value: WS
  misc_feature: MA Experiment 20000349 PARAMETER Experiment Name: At_100uM_ABA_Sub_P Parameter: Timepoint (hr) Value: 6
  misc_feature: MA Experiment 20000349 PARAMETER Experiment Name: At_100uM_ABA_Sub_P Parameter: Tissue Value: Aerial
  misc_feature: MA Experiment 20000349 PARAMETER Experiment Name: At_100uM_ABA_Sub_P Parameter: Treatment Value: 100uM ABA vs. No Treatment
agaagagagtcatgggaagatctccttgctgcgagaaagaacacatgaacaaaggtgcttggactaaagaagaagatgagagactagtctcttacatcaagtctcacggtgaaggttgttggcgatctcttcctagagccgctggtctccttcgctgcggtaaaagctgccgtcttcggtggattaactatctccgacctgatctcaaaagaggaaactttacacatgatgaagatgaacttatcatcaagcttcatagcctcctaggcaacaagtggtctttgattgcggcgagattacctggaagaacagataacgagatcaagaactactggaacacacatataaagaggaagcttttgagcaaagggattgatccagccactcatagagggatcaacgaggcaaaaatttctgatttgaagaaaacaaaggaccaaattgtaaaagatgtttcttttgtgacaaagtttgaggaaacagacaagtctggggaccagaagcaaaataagtatattcgaaatgggttagtttgcaaagaagagagagttgttgttgaagaaaaaataggcccagatttgaatcttgagcttaggatcagtccaccatggcaaaaccagagagaaatatctacttgcactgcgtcccgtttttacatggaaaacgacatggagtgtagtagtgaaactgtgaaatgtcaaacagagaatagtagcagcattagctattcttctattgatattagtagtagtaacgttggttatgacttcttgggtttgaagacaagaattttggattttcgaagcttggaaatgaaataaatgaatagtattagattcttaatttgtaggtgtgataatgaatgttagattcttatttttgcttcttctttttttatttttcatctttgttttccttttttccacaacatttgtatattaacttgaaattttcaatcagattaccgcaagnccttgtgttcctatgagatcgatgagcattttgatagagatccacacgtgaatttgccatcaggcatc

SEQ ID NO: 44072 - protein, 272 aa, Arabidopsis thaliana
  peptide (1)..(272): Ceres Seq. ID no. 12489364
  misc_feature (17)..(64): Pfam Name: Myb-like DNA-binding domain Pfam Description: Myb-like DNA-binding domain
  misc_feature (4)..(208): Homolog of NCBI NO: 28628961 NR Description: MYB8 [Dendrobium sp. XMW-2002-8]
  misc_feature (4)..(206): Homolog of NCBI NO: 82308 NR Description: myb-related protein 308 - garden snapdragon
  misc_feature (4)..(268): Homolog of NCBI NO: 39725415 NR Description: MYB transcription factor [Eucalyptus gunnii]
  misc_feature (4)..(272): Homolog of NCBI NO: 11273985 NR Description: myb-related transcription factor MYB4
  misc_feature (4)..(272): Homolog of NCBI NO: 15233968 NR Description: putative transcription factor (MYB4)
  misc_feature (4)..(272): Homolog of NCBI NO: 2129933 NR Description: myb-related protein TMH27 - tomato
  misc_feature (4)..(272): Homolog of NCBI NO: 13346194 NR Description: GHMYB9 [Gossypium hirsutum]
  misc_feature (4)..(272): Homolog of NCBI NO: 15236236 NR Description: myb family transcription factor; protein id:
  misc_feature (4)..(272): Homolog of NCBI NO: 6467223 NR Description: DNA-binding protein [Arabidopsis thaliana]
  misc_feature (4)..(272): Homolog of NCBI NO: 15227288 NR Description: myb DNA-binding protein
KRVMGRSPCCEKEHMNKGAWTKEEDERLVSYIKSHGEGCWRSLPRAAGLLRCGKSCRLRWINYLRPDLKRGNFTHDEDELIIKLHSLLGNKWSLIAARLPGRTDNEIKNYWNTHIKRKLLSKGIDPATHRGINEAKISDLKKTKDQIVKDVSFVTKFEETDKSGDQKQNKYIRNGLVCKEERVVVEEKIGPDLNLELRISPPWQNQREISTCTASRFYMENDMECSSETVKCQTENSSSISYSSIDISSSNVGYDFLGLKTRILDFRSLEMK

SEQ ID NO: 44073 - protein, 269 aa, Arabidopsis thaliana
  peptide (1)..(269): Ceres Seq. ID no. 12489365
  misc_feature (14)..(61): Pfam Name: Myb-like DNA-binding domain Pfam Description: Myb-like DNA-binding domain
  misc_feature (1)..(205): Homolog of NCBI NO: 28628961 NR Description: MYB8 [Dendrobium sp. XMW-2002-8]
  misc_feature (1)..(203): Homolog of NCBI NO: 82308 NR Description: myb-related protein 308 - garden snapdragon
  misc_feature (1)..(265): Homolog of NCBI NO: 39725415 NR Description: MYB transcription factor [Eucalyptus gunnii]
  misc_feature (1)..(269): Homolog of NCBI NO: 11273985 NR Description: myb-related transcription factor MYB4
  misc_feature (1)..(269): Homolog of NCBI NO: 15233968 NR Description: putative transcription factor (MYB4)
  misc_feature (1)..(269): Homolog of NCBI NO: 2129933 NR Description: myb-related protein TMH27 - tomato
  misc_feature (1)..(269): Homolog of NCBI NO: 13346194 NR Description: GHMYB9 [Gossypium hirsutum]
  misc_feature (1)..(269): Homolog of NCBI NO: 15236236 NR Description: myb family transcription factor; protein id:
  misc_feature (1)..(269): Homolog of NCBI NO: 6467223 NR Description: DNA-binding protein [Arabidopsis thaliana]
  misc_feature (1)..(269): Homolog of NCBI NO: 15227288 NR Description: myb DNA-binding protein
MGRSPCCEKEHMNKGAWTKEEDERLVSYIKSHGEGCWRSLPRAAGLLRCGKSCRLRWINYLRPDLKRGNFTHDEDELIIKLHSLLGNKWSLIAARLPGRTDNEIKNYWNTHIKRKLLSKGIDPATHRGINEAKISDLKKTKDQIVKDVSFVTKFEETDKSGDQKQNKYIRNGLVCKEERVVVEEKIGPDLNLELRISPPWQNQREISTCTASRFYMENDMECSSETVKCQTENSSSISYSSIDISSSNVGYDFLGLKTRILDFRSLEMK

SEQ ID NO: 44074 - protein, 258 aa, Arabidopsis thaliana
  peptide (1)..(258): Ceres Seq. ID no. 12489366
  misc_feature (3)..(50): Pfam Name: Myb-like DNA-binding domain Pfam Description: Myb-like DNA-binding domain
  misc_feature (1)..(194): Homolog of NCBI NO: 28628961 NR Description: MYB8 [Dendrobium sp. XMW-2002-8]
  misc_feature (1)..(192): Homolog of NCBI NO: 82308 NR Description: myb-related protein 308 - garden snapdragon
  misc_feature (1)..(254): Homolog of NCBI NO: 39725415 NR Description: MYB transcription factor [Eucalyptus gunnii]
  misc_feature (1)..(258): Homolog of NCBI NO: 11273985 NR Description: myb-related transcription factor MYB4
  misc_feature (1)..(258): Homolog of NCBI NO: 15233968 NR Description: putative transcription factor (MYB4)
  misc_feature (1)..(258): Homolog of NCBI NO: 2129933 NR Description: myb-related protein TMH27 - tomato
  misc_feature (1)..(258): Homolog of NCBI NO: 13346194 NR Description: GHMYB9 [Gossypium hirsutum]
  misc_feature (1)..(258): Homolog of NCBI NO: 15236236 NR Description: myb family transcription factor; protein id:
  misc_feature (1)..(258): Homolog of NCBI NO: 6467223 NR Description: DNA-binding protein [Arabidopsis thaliana]
  misc_feature (1)..(258): Homolog of NCBI NO: 15227288 NR Description: myb DNA-binding protein
MNKGAWTKEEDERLVSYIKSHGEGCWRSLPRAAGLLRCGKSCRLRWINYLRPDLKRGNFTHDEDELIIKLHSLLGNKWSLIAARLPGRTDNEIKNYWNTHIKRKLLSKGIDPATHRGINEAKISDLKKTKDQIVKDVSFVTKFEETDKSGDQKQNKYIRNGLVCKEERVVVEEKIGPDLNLELRISPPWQNQREISTCTASRFYMENDMECSSETVKCQTENSSSISYSSIDISSSNVGYDFLGLKTRILDFRSLEMK

SEQ ID NO: 44075 - DNA, 2179 bp, Arabidopsis thaliana
  misc_feature (1)..(2179): Ceres Seq. ID no. 13509312
  misc_feature: MA Experiment ID: 20000180 Result: Down-regulated in Transcription
  misc_feature: MA Experiment 20000180 PARAMETER Experiment Name: At_Germinating_Seeds_P Parameter: Age (hr) Value: 24 vs. 0
  misc_feature: MA Experiment 20000180 PARAMETER Experiment Name: At_Germinating_Seeds_P Parameter: Tissue Value: Germinating Seeds
agttctggctcgtccttcacgccactctctcctatatctctctctcgctctcctccccctttccgccgatcgtcctttccccaccgtcgagtttttccctatccatctccggcaggctttacgttgcacaccagatgtctgttgatctctgcaagaagaatccatcttttctttggtgtgactgtggttatatgagcagggggaggttgtggtgttttcagattatcctcttcaggcactggacttgacttgtcttcaattcctcgacttctctctctttcttcttctcctctcttctttctcgtttctctgttttttttttctgcttgatttgatcaaagggtattcgtttctgctgctccctgtttactgtgaacttgaagactaagttttctttgctaaactctcactttactggtgaagagtttacagaagattgttcaaagttttcccctttggattcttcgccaatggggaaaactcaactcgctcctggatttcgtttccatccgactgatgttgaactcgtgaggtattacttgaagaggaaaatactggggaaaaagctccttgtcgatgctattgctgaagttgacatttacaagtttgaaccccctgatttacctgatatgtcttttataagaagtggggatcttaagtggcacttcttctgccccagggaaaagaagtatgctagtggggtaagggcaaaccgtgcaactgagtgtggctactggaagaccacggggaaggagagaccagttctgtgcaattctgaggttgtgggaaagatcaaaactctggtttatcactttggcaagtcgcctcgtggggagcggactgattgggttatgcatgaatacaggcttgacgacaaagtactgacgcagatgaatgttcctcaggatacttatgtggtgtgtgttctgttcaagaaagatggtcctggacctagaaatggagctcaatatggagctccgtttaaggaagaggactggagtgatgaggaagtacgtactgatgttccttctactagtaatcccacaaaccttcttgagcctagcaaagaaaccactctggctttgactgccccagatgactccaataaggattgttttggtggcatgatatcagagtcatgtgtctcggatttcctaccagctacaactaataccaccagcgagcttccacatccaagtgatgcagctaccactcctatgtctactgcacctctggcagagaccgttcagacccccaacaatgatgacttatattcaatgttggatctatttgatgatgacgaagagttcttagggttcaacaataatgaggtaagatatgatcccggtgtctcagctccagtttgcttagaagaagaaggcattttcaacggactaccagagttgagcagcatgccaaggacggcctcttacgacctagttgaaaactcggagttatacctagagctacaagacctcactgctccattaaatccccaaactgggctacaagacctcactgctccatttaatcctcaaactgggctacaagacctcactgctccatttaatcatcaaactgggctacaagaccacactgctccatttaatcctcaaactgggctacaagaccacactgctccatttaatcatcaaactgggctacaagacctcactgctccatttaatcctcaaactgggctacaagacctcactgctccatttaatcctcaaactgggctacatgacctcacttctccatttaatcctcaaactgggctacaagacctcactgctccattaaatcctcaaactgggaatcgcaatgacccgagaagctcctcctttctgtataatcaaggccattttgacttctctggtggtaatgatgatgatccttatggcttttctgcttccatgagacatagaccaaaaatgtaaaaaaagaagaagagaagagaagcaggatttacaaatccaacagatgcaaatcagaccgaatagaaggaggagcaagcncctttgtttcttgtctttgaattatgatttttattagtcaaaatctttttaatgtgtcgaaacttccctatcaacattntctgtttcatccttagaatctcgtatttnttcagagtattntcaacntttattnttgnttntattttgntatggattattgc

SEQ ID NO: 44076 - protein, 489 aa, Arabidopsis thaliana
  peptide (1)..(489): Ceres Seq. ID no. 13509313
  misc_feature (6)..(134): Pfam Name: No apical meristem (NAM) protein Pfam Description: No apical meristem (NAM) protein
  misc_feature (6)..(134): Pfam Name: No apical meristem (NAM) protein Pfam Description: No apical meristem (NAM) protein
  misc_feature (6)..(194): Homolog of NCBI NO: 21105746 NR Description: nam-like protein 9 [Petunia x hybrida]
  misc_feature (8)..(205): Homolog of NCBI NO: 21105742 NR Description: nam-like protein 7 [Petunia x hybrida]
  misc_feature (4)..(187): Homolog of NCBI NO: 15237699 NR Description: NAC2 protein [Arabidopsis thaliana]
  misc_feature (4)..(186): Homolog of NCBI NO: 21593389 NR Description: NAC, putative [Arabidopsis thaliana]
  misc_feature (4)..(186): Homolog of NCBI NO: 18398895 NR Description: expressed protein [Arabidopsis thaliana]
  misc_feature (6)..(194): Homolog of NCBI NO: 21105746 NR Description: nam-like protein 9 [Petunia x hybrida]
  misc_feature (4)..(187): Homolog of NCBI NO: 15237699 NR Description: NAC2 protein [Arabidopsis thaliana]
  misc_feature (4)..(186): Homolog of NCBI NO: 18398895 NR Description: expressed protein [Arabidopsis thaliana]
  misc_feature (1)..(489): Homolog of NCBI NO: 15242390 NR Description: expressed protein [Arabidopsis thaliana]
  misc_feature (1)..(326): Homolog of NCBI NO: 15237609 NR Description: hypothetical protein [Arabidopsis thaliana]
  misc_feature (1)..(261): Homolog of NCBI NO: 7716952 NR Description: NAC1 [Medicago truncatula]
  misc_feature (1)..(445): Homolog of NCBI NO: 21105732 NR Description: nam-like protein 2 [Petunia x hybrida]
  misc_feature (4)..(186): Homolog of NCBI NO: 8567779 NR Description: NAC, putative [Arabidopsis thaliana]
  misc_feature (4)..(186): Homolog of NCBI NO: 21593389 NR Description: NAC, putative [Arabidopsis thaliana]
  misc_feature (8)..(205): Homolog of NCBI NO: 21105742 NR Description: nam-like protein 7 [Petunia x hybrida]
  misc_feature (4)..(186): Homolog of NCBI NO: 8567779 NR Description: NAC, putative [Arabidopsis thaliana]
  misc_feature (1)..(445): Homolog of NCBI NO: 21105732 NR Description: nam-like protein 2 [Petunia x hybrida]
  misc_feature (1)..(261): Homolog of NCBI NO: 7716952 NR Description: NAC1 [Medicago truncatula]
  misc_feature (1)..(326): Homolog of NCBI NO: 15237609 NR Description: hypothetical protein [Arabidopsis thaliana]
  misc_feature (1)..(489): Homolog of NCBI NO: 15242390 NR Description: expressed protein [Arabidopsis thaliana]
MGKTQLAPGFRFHPTDVELVRYYLKRKILGKKLLVDAIAEVDIYKFEPPDLPDMSFIRSGDLKWHFFCPREKKYASGVRANRATECGYWKTTGKERPVLCNSEVVGKIKTLVYHFGKSPRGERTDWVMHEYRLDDKVLTQMNVPQDTYVVCVLFKKDGPGPRNGAQYGAPFKEEDWSDEEVRTDVPSTSNPTNLLEPSKETTLALTAPDDSNKDCFGGMISESCVSDFLPATTNTTSELPHPSDAATTPMSTAPLAETVQTPNNDDLYSMLDLFDDDEEFLGFNNNEVRYDPGVSAPVCLEEEGIFNGLPELSSMPRTASYDLVENSELYLELQDLTAPLNPQTGLQDLTAPFNPQTGLQDLTAPFNHQTGLQDHTAPFNPQTGLQDHTAPFNHQTGLQDLTAPFNPQTGLQDLTAPFNPQTGLHDLTSPFNPQTGLQDLTAPLNPQTGNRNDPRSSSFLYNQGHFDFSGGNDDDPYGFSASMRHRPKM

SEQ ID NO: 44077 - protein, 436 aa, Arabidopsis thaliana
  peptide (1)..(436): Ceres Seq. ID no. 13509314
  misc_feature (1)..(81): Pfam Name: No apical meristem (NAM) protein Pfam Description: No apical meristem (NAM) protein
  misc_feature (1)..(81): Pfam Name: No apical meristem (NAM) protein Pfam Description: No apical meristem (NAM) protein
  misc_feature (1)..(141): Homolog of NCBI NO: 21105746 NR Description: nam-like protein 9 [Petunia x hybrida]
  misc_feature (1)..(152): Homolog of NCBI NO: 21105742 NR Description: nam-like protein 7 [Petunia x hybrida]
  misc_feature (1)..(134): Homolog of NCBI NO: 15237699 NR Description: NAC2 protein [Arabidopsis thaliana]
  misc_feature (1)..(133): Homolog of NCBI NO: 21593389 NR Description: NAC, putative [Arabidopsis thaliana]
  misc_feature (1)..(133): Homolog of NCBI NO: 18398895 NR Description: expressed protein [Arabidopsis thaliana]
  misc_feature (1)..(141): Homolog of NCBI NO: 21105746 NR Description: nam-like protein 9 [Petunia x hybrida]
  misc_feature (1)..(134): Homolog of NCBI NO: 15237699 NR Description: NAC2 protein [Arabidopsis thaliana]
  misc_feature (1)..(133): Homolog of NCBI NO: 18398895 NR Description: expressed protein [Arabidopsis thaliana]
  misc_feature (1)..(436): Homolog of NCBI NO: 15242390 NR Description: expressed protein [Arabidopsis thaliana]
  misc_feature (1)..(273): Homolog of NCBI NO: 15237609 NR Description: hypothetical protein [Arabidopsis thaliana]
  misc_feature (1)..(208): Homolog of NCBI NO: 7716952 NR Description: NAC1 [Medicago truncatula]
  misc_feature (1)..(392): Homolog of NCBI NO: 21105732 NR Description: nam-like protein 2 [Petunia x hybrida]
  misc_feature (1)..(133): Homolog of NCBI NO: 8567779 NR Description: NAC, putative [Arabidopsis thaliana]
  misc_feature (1)..(133): Homolog of NCBI NO: 21593389 NR Description: NAC, putative [Arabidopsis thaliana]
  misc_feature (1)..(152): Homolog of NCBI NO: 21105742 NR Description: nam-like protein 7 [Petunia x hybrida]
  misc_feature (1)..(133): Homolog of NCBI NO: 8567779 NR Description: NAC, putative [Arabidopsis thaliana]
  misc_feature (1)..(392): Homolog of NCBI NO: 21105732 NR Description: nam-like protein 2 [Petunia x hybrida]
  misc_feature (1)..(208): Homolog of NCBI NO: 7716952 NR Description: NAC1 [Medicago truncatula]
  misc_feature (1)..(273): Homolog of NCBI NO: 15237609 NR Description: hypothetical protein [Arabidopsis thaliana]
  misc_feature (1)..(436): Homolog of NCBI NO: 15242390 NR Description: expressed protein [Arabidopsis thaliana]
MSFIRSGDLKWHFFCPREKKYASGVRANRATECGYWKTTGKERPVLCNSEVVGKIKTLVYHFGKSPRGERTDWVMHEYRLDDKVLTQMNVPQDTYVVCVLFKKDGPGPRNGAQYGAPFKEEDWSDEEVRTDVPSTSNPTNLLEPSKETTLALTAPDDSNKDCFGGMISESCVSDFLPATTNTTSELPHPSDAATTPMSTAPLAETVQTPNNDDLYSMLDLFDDDEEFLGFNNNEVRYDPGVSAPVCLEEEGIFNGLPELSSMPRTASYDLVENSELYLELQDLTAPLNPQTGLQDLTAPFNPQTGLQDLTAPFNHQTGLQDHTAPFNPQTGLQDHTAPFNHQTGLQDLTAPFNPQTGLQDLTAPFNPQTGLHDLTSPFNPQTGLQDLTAPLNPQTGNRNDPRSSSFLYNQGHFDFSGGNDDDPYGFSASMRHRPKM

SEQ ID NO: 44078 - protein, 362 aa, Arabidopsis thaliana
  peptide (1)..(362): Ceres Seq. ID no. 13509315
  misc_feature (1)..(67): Homolog of NCBI NO: 21105746 NR Description: nam-like protein 9 [Petunia x hybrida]
  misc_feature (1)..(78): Homolog of NCBI NO: 21105742 NR Description: nam-like protein 7 [Petunia x hybrida]
  misc_feature (1)..(60): Homolog of NCBI NO: 15237699 NR Description: NAC2 protein [Arabidopsis thaliana]
  misc_feature (1)..(59): Homolog of NCBI NO: 21593389 NR Description: NAC, putative [Arabidopsis thaliana]
  misc_feature (1)..(59): Homolog of NCBI NO: 18398895 NR Description: expressed protein [Arabidopsis thaliana]
  misc_feature (1)..(59): Homolog of NCBI NO: 8567779 NR Description: NAC, putative [Arabidopsis thaliana]
  misc_feature (1)..(318): Homolog of NCBI NO: 21105732 NR Description: nam-like protein 2 [Petunia x hybrida]
  misc_feature (1)..(134): Homolog of NCBI NO: 7716952 NR Description: NAC1 [Medicago truncatula]
  misc_feature (1)..(199): Homolog of NCBI NO: 15237609 NR Description: hypothetical protein [Arabidopsis thaliana]
  misc_feature (1)..(362): Homolog of NCBI NO: 15242390 NR Description: expressed protein [Arabidopsis thaliana]
  misc_feature (1)..(67): Homolog of NCBI NO: 21105746 NR Description: nam-like protein 9 [Petunia x hybrida]
  misc_feature (1)..(78): Homolog of NCBI NO: 21105742 NR Description: nam-like protein 7 [Petunia x hybrida]
  misc_feature (1)..(60): Homolog of NCBI NO: 15237699 NR Description: NAC2 protein [Arabidopsis thaliana]
  misc_feature (1)..(59): Homolog of NCBI NO: 21593389 NR Description: NAC, putative [Arabidopsis thaliana]
  misc_feature (1)..(59): Homolog of NCBI NO: 18398895 NR Description: expressed protein [Arabidopsis thaliana]
  misc_feature (1)..(59): Homolog of NCBI NO: 8567779 NR Description: NAC, putative [Arabidopsis thaliana]
  misc_feature (1)..(318): Homolog of NCBI NO: 21105732 NR Description: nam-like protein 2 [Petunia x hybrida]
  misc_feature (1)..(134): Homolog of NCBI NO: 7716952 NR Description: NAC1 [Medicago truncatula]
  misc_feature (1)..(199): Homolog of NCBI NO: 15237609 NR Description: hypothetical protein [Arabidopsis thaliana]
  misc_feature (1)..(362): Homolog of NCBI NO: 15242390 NR Description: expressed protein [Arabidopsis thaliana]
MHEYRLDDKVLTQMNVPQDTYVVCVLFKKDGPGPRNGAQYGAPFKEEDWSDEEVRTDVPSTSNPTNLLEPSKETTLALTAPDDSNKDCFGGMISESCVSDFLPATTNTTSELPHPSDAATTPMSTAPLAETVQTPNNDDLYSMLDLFDDDEEFLGFNNNEVRYDPGVSAPVCLEEEGIFNGLPELSSMPRTASYDLVENSELYLELQDLTAPLNPQTGLQDLTAPFNPQTGLQDLTAPFNHQTGLQDHTAPFNPQTGLQDHTAPFNHQTGLQDLTAPFNPQTGLQDLTAPFNPQTGLHDLTSPFNPQTGLQDLTAPLNPQTGNRNDPRSSSFLYNQGHFDFSGGNDDDPYGFSASMRHRPKM

SEQ ID NO: 44079 - DNA, 1121 bp, Arabidopsis thaliana; identical to SEQ ID NO: 36876
  misc_feature (1)..(1121): Ceres Seq. ID no. 13592128
  misc_feature: MA Experiment ID: 20000227 Result: Up-regulated in Transcription
  misc_feature: MA Experiment 20000227 PARAMETER Experiment Name: At_Root-Tips-vs-Tops_P Parameter: Tissue Value: Root Tips vs. Root Tops
  misc_feature: MA Experiment ID: 20000495 Result: Up-regulated in Transcription
  misc_feature: MA Experiment 20000495 PARAMETER Experiment Name: At_Guard_Cells_P Parameter: Harvest Date Value: 8/2/2002
  misc_feature: MA Experiment 20000495 PARAMETER Experiment Name: At_Guard_Cells_P Parameter: Organism Value: A. thaliana
  misc_feature: MA Experiment 20000495 PARAMETER Experiment Name: At_Guard_Cells_P Parameter: Tissue Value: Guard Cells vs. Leaves
  misc_feature: MA Experiment ID: 20000794 Result: Down-regulated in Transcription
  misc_feature: MA Experiment 20000794 PARAMETER Experiment Name: At_Petals_P Parameter: Age (day) Value: 23-25 days
  misc_feature: MA Experiment 20000794 PARAMETER Experiment Name: At_Petals_P Parameter: Plant Line Value: WS
  misc_feature: MA Experiment 20000794 PARAMETER Experiment Name: At_Petals_P Parameter: Tissue Value: Petals vs. Whole plant
  misc_feature: MA Experiment ID: 20001458 Result: Up-regulated in Transcription
  misc_feature: MA Experiment 20001458 PARAMETER Experiment Name: At_50mM_NH4NO3_L-to-H_P Parameter: Age (day) Value: Undefined
  misc_feature: MA Experiment 20001458 PARAMETER Experiment Name: At_50mM_NH4NO3_L-to-H_P Parameter: Organism Value: Undefined
  misc_feature: MA Experiment 20001458 PARAMETER Experiment Name: At_50mM_NH4NO3_L-to-H_P Parameter: Plant Line Value: Undefined
  misc_feature: MA Experiment 20001458 PARAMETER Experiment Name: At_50mM_NH4NO3_L-to-H_P Parameter: Timepoint (hr) Value: 2
  misc_feature: MA Experiment 20001458 PARAMETER Experiment Name: At_50mM_NH4NO3_L-to-H_P Parameter: Tissue Value: Siliques
  misc_feature: MA Experiment 20001458 PARAMETER Experiment Name: At_50mM_NH4NO3_L-to-H_P Parameter: Treatment Value: 50mM NH4NO3 vs. 100mM Manitol
  misc_feature: MA Experiment ID: 20001558 Result: Up-regulated in Transcription
  misc_feature: MA Experiment 20001558 PARAMETER Experiment Name: At_Drought_Soil_Dry_P Parameter: Age (day) Value: 27
  misc_feature: MA Experiment 20001558 PARAMETER Experiment Name: At_Drought_Soil_Dry_P Parameter: Organism Value: A. thaliana
  misc_feature: MA Experiment 20001558 PARAMETER Experiment Name: At_Drought_Soil_Dry_P Parameter: Plant Line Value: WS
  misc_feature: MA Experiment 20001558 PARAMETER Experiment Name: At_Drought_Soil_Dry_P Parameter: Post Timepoint (hr) Value: 6
  misc_feature: MA Experiment 20001558 PARAMETER Experiment Name: At_Drought_Soil_Dry_P Parameter: Post-Treatment Value: Re-Water vs. No Drought
  misc_feature: MA Experiment 20001558 PARAMETER Experiment Name: At_Drought_Soil_Dry_P Parameter: Timepoint (day) Value: 13
  misc_feature: MA Experiment 20001558 PARAMETER Experiment Name: At_Drought_Soil_Dry_P Parameter: Treatment Value: Drought vs. No Drought
  misc_feature: MA Experiment ID: 20001757 Result: Up-regulated in Transcription
  misc_feature: MA Experiment 20001757 PARAMETER Experiment Name: At_50mM_NH4NO3_L-to-H_P Parameter: Timepoint (hr) Value: 6
  misc_feature: MA Experiment 20001757 PARAMETER Experiment Name: At_50mM_NH4NO3_L-to-H_P Parameter: Tissue Value: Leaf
  misc_feature: MA Experiment 20001757 PARAMETER Experiment Name: At_50mM_NH4NO3_L-to-H_P Parameter: Treatment Value: 50mM NH4NO3 vs 100mM Mannitol

SEQ ID NO: 44080 - protein, 262 aa, Arabidopsis thaliana [sequence omitted]

SEQ ID NO: 44081 - protein, 160 aa, Arabidopsis thaliana; identical to SEQ ID NO: 36878
  peptide (1)..(160): Ceres Seq. ID no. 13592130
  misc_feature (1)..(120): Pfam Name: Ribosomal S3Ae family Pfam Description: Ribosomal S3Ae family
  misc_feature (1)..(120): Pfam Name: Ribosomal S3Ae family Pfam Description: Ribosomal S3Ae family
  misc_feature (1)..(137): Homolog of NCBI NO: 1856971 NR Description: This gene is specifically expressed at the S during the cell cycle in the synchronous culture of periwinkle
  misc_feature (1)..(153): Homolog of NCBI NO: 7441116 NR Description: ribosomal protein S3a, cytosolic - rice
  misc_feature (1)..(150): Homolog of NCBI NO: 1350986 NR Description: 40S RIBOSOMAL PROTEIN S3A (CYC07 PROTEIN)
  misc_feature (1)..(160): Homolog of NCBI NO: 1350983 NR Description: 40S RIBOSOMAL PROTEIN S3A (CYC07 PROTEIN)
  misc_feature (1)..(160): Homolog of NCBI NO: 1350984 NR Description: 40S RIBOSOMAL PROTEIN S3A
  misc_feature (1)..(137): Homolog of NCBI NO: 1856971 NR Description: This gene is specifically expressed at the S during the cell cycle in the synchronous culture of periwinkle
  misc_feature (1)..(150): Homolog of NCBI NO: 1350986 NR Description: 40S RIBOSOMAL PROTEIN S3A (CYC07 PROTEIN)
  misc_feature (1)..(160): Homolog of NCBI NO: 1350984 NR Description: 40S RIBOSOMAL PROTEIN S3A
  misc_feature (1)..(160): Homolog of NCBI NO: 15236171 NR Description: 40S ribosomal protein S3A (RPS3aB) [Arabidopsis
  misc_feature (1)..(160): Homolog of NCBI NO: 15229364 NR Description: 40S ribosomal protein S3A (RPS3aA) [Arabidopsis
  misc_feature (1)..(160): Homolog of NCBI NO: 1350981 NR Description: 40S RIBOSOMAL PROTEIN S3A (S PHASE SPECIFIC
  misc_feature (1)..(160): Homolog of NCBI NO: 6714564 NR Description: cyc07 [Daucus carota]
  misc_feature (1)..(160): Homolog of NCBI NO: 24817254 NR Description: ribosomal protein S3a [Cicer arietinum]
  misc_feature (1)..(160): Homolog of NCBI NO: 1350983 NR Description: 40S RIBOSOMAL PROTEIN S3A (CYC07 PROTEIN)
  misc_feature (1)..(153): Homolog of NCBI NO: 7441116 NR Description: ribosomal protein S3a, cytosolic - rice
  misc_feature (1)..(160): Homolog of NCBI NO: 24817254 NR Description: ribosomal protein S3a [Cicer arietinum]
  misc_feature (1)..(160): Homolog of NCBI NO: 6714564 NR Description: cyc07 [Daucus carota]
  misc_feature (1)..(160): Homolog of NCBI NO: 1350981 NR Description: 40S RIBOSOMAL PROTEIN S3A (S PHASE SPECIFIC
  misc_feature (1)..(160): Homolog of NCBI NO: 15229364 NR Description: 40S ribosomal protein S3A (RPS3aA) [Arabidopsis
  misc_feature (1)..(160): Homolog of NCBI NO: 15236171 NR Description: 40S ribosomal protein S3A (RPS3aB) [Arabidopsis

SEQ ID NO: 44082 - DNA, 1036 bp, Arabidopsis thaliana; identical to SEQ ID NO: 28440
  misc_feature (1)..(1036): Ceres Seq. ID no. 12488547
  misc_feature: MA Experiment ID: 20000235 Result: Down-regulated in Transcription
  misc_feature: MA Experiment 20000235 PARAMETER Experiment Name: At_Siliques_P Parameter: Age (day) Value: 21
  misc_feature: MA Experiment 20000235 PARAMETER Experiment Name: At_Siliques_P Parameter: Organism Value: A. thaliana
  misc_feature: MA Experiment 20000235 PARAMETER Experiment Name: At_Siliques_P Parameter: Plant Line Value: WS
  misc_feature: MA Experiment 20000235 PARAMETER Experiment Name: At_Siliques_P Parameter: Tissue Value: 5-10mm Siliques vs. Whole Plant
  misc_feature: MA Experiment ID: 20000264 Result: Up-regulated in Transcription
  misc_feature: MA Experiment 20000264 PARAMETER Experiment Name: At_Open_Flower_P Parameter: Age (day) Value: 21
  misc_feature: MA Experiment 20000264 PARAMETER Experiment Name: At_Open_Flower_P Parameter: Plant Line Value: WS
  misc_feature: MA Experiment 20000264 PARAMETER Experiment Name: At_Open_Flower_P Parameter: Tissue Value: Open Flower vs. Whole Plant
  misc_feature: MA Experiment ID: 20000265 Result: Up-regulated in Transcription
  misc_feature: MA Experiment 20000265 PARAMETER Experiment Name: At_Open_Flower_P Parameter: Age (day) Value: 21
  misc_feature: MA Experiment 20000265 PARAMETER Experiment Name: At_Open_Flower_P Parameter: Plant Line Value: WS
  misc_feature: MA Experiment 20000265 PARAMETER Experiment Name: At_Open_Flower_P Parameter: Tissue Value: Closed Flower vs. Whole Plant
  misc_feature: MA Experiment ID: 20000286 Result: Up-regulated in Transcription
  misc_feature: MA Experiment 20000286 PARAMETER Experiment Name: At_Open_Flower_P Parameter: Age (day) Value: 21
  misc_feature: MA Experiment 20000286 PARAMETER Experiment Name: At_Open_Flower_P Parameter: Plant Line Value: WS
  misc_feature: MA Experiment 20000286 PARAMETER Experiment Name: At_Open_Flower_P Parameter: Tissue Value: Half Open vs. Whole Plant
  misc_feature: MA Experiment ID: 20000438 Result: Down-regulated in Transcription
  misc_feature: MA Experiment 20000438 PARAMETER Experiment Name: At_Shoots__P Parameter: Age (day) Value: 14
  misc_feature: MA Experiment 20000438 PARAMETER Experiment Name: At_Shoots__P Parameter: Tissue Value: Shoots vs. Whole Plant
  misc_feature: MA Experiment ID: 20000794 Result: Up-regulated in Transcription
  misc_feature: MA Experiment 20000794 PARAMETER Experiment Name: At_Petals_P Parameter: Age (day) Value: 23-25 days
  misc_feature: MA Experiment 20000794 PARAMETER Experiment Name: At_Petals_P Parameter: Plant Line Value: WS
  misc_feature: MA Experiment 20000794 PARAMETER Experiment Name: At_Petals_P Parameter: Tissue Value: Petals vs. Whole plant
  misc_feature: MA Experiment ID: 20001910 Result: Down-regulated in Transcription
  misc_feature: MA Experiment 20001910 PARAMETER Experiment Name: At_Drought_Reproduction_P Parameter: Age (day) Value: 37
  misc_feature: MA Experiment 20001910 PARAMETER Experiment Name: At_Drought_Reproduction_P Parameter: Organism Value: A. thaliana
  misc_feature: MA Experiment 20001910 PARAMETER Experiment Name: At_Drought_Reproduction_P Parameter: Plant Line Value: WS
  misc_feature: MA Experiment 20001910 PARAMETER Experiment Name: At_Drought_Reproduction_P Parameter: Timepoint (day) Value: 7
  misc_feature: MA Experiment 20001910 PARAMETER Experiment Name: At_Drought_Reproduction_P Parameter: Tissue Value: Flowers
  misc_feature: MA Experiment 20001910 PARAMETER Experiment Name: At_Drought_Reproduction_P Parameter: Treatment Value: Drought vs. No Drought

SEQ ID NO: 44083 - protein, 309 aa, Arabidopsis thaliana; identical to SEQ ID NO: 28441
  peptide (1)..(309): Ceres Seq. ID no. 12488548
  misc_feature (1)..(290): Homolog of NCBI NO: 15234888 NR Description: putative oxidoreductase; protein id: At4g10020.1
  misc_feature (16)..(291): Homolog of NCBI NO: 21742781 NR Description: OSJNBa0055C08.3 [Oryza sativa (japonica
  misc_feature (1)..(300): Homolog of NCBI NO: 21311775 NR Description: steroleosin-B [Sesamum indicum]
  misc_feature (1)..(306): Homolog of NCBI NO: 15241261 NR Description: putative protein; protein id: At5g50770.1
  misc_feature (1)..(292): Homolog of NCBI NO: 18423187 NR Description: 11-beta-hydroxysteroid dehydrogenase-like
  misc_feature (1)..(300): Homolog of NCBI NO: 15824408 NR Description: steroleosin [Sesamum indicum]
  misc_feature (1)..(290): Homolog of NCBI NO: 8777392 NR Description: 11-beta-hydroxysteroid dehydrogenase-like
  misc_feature (1)..(290): Homolog of NCBI NO: 15241203 NR Description: 11-beta-hydroxysteroid dehydrogenase-like
  misc_feature (1)..(309): Homolog of NCBI NO: 15232779 NR Description: putative protein; protein id: At3g47360.1
  misc_feature (1)..(309): Homolog of NCBI NO: 15232777 NR Description: putative protein; protein id: At3g47350.1
  misc_feature (1)..(290): Homolog of NCBI NO: 15234888 NR Description: putative oxidoreductase; protein id: At4g10020.1
  misc_feature (16)..(291): Homolog of NCBI NO: 21742781 NR Description: OSJNBa0055C08.3 [Oryza sativa (japonica
  misc_feature (1)..(300): Homolog of NCBI NO: 21311775 NR Description: steroleosin-B [Sesamum indicum]
  misc_feature (1)..(306): Homolog of NCBI NO: 15241261 NR Description: putative protein; protein id: At5g50770.1
  misc_feature (1)..(292): Homolog of NCBI NO: 18423187 NR Description: 11-beta-hydroxysteroid dehydrogenase-like
  misc_feature (1)..(300): Homolog of NCBI NO: 15824408 NR Description: steroleosin [Sesamum indicum]
  misc_feature (1)..(290): Homolog of NCBI NO: 8777392 NR Description: 11-beta-hydroxysteroid dehydrogenase-like
  misc_feature (1)..(290): Homolog of NCBI NO: 15241203 NR Description: 11-beta-hydroxysteroid dehydrogenase-like
  misc_feature (1)..(309): Homolog of NCBI NO: 15232779 NR Description: putative protein; protein id: At3g47360.1
  misc_feature (1)..(309): Homolog of NCBI NO: 15232777 NR Description: putative protein; protein id: At3g47350.1

SEQ ID NO: 44084 - protein, 307 aa, Arabidopsis thaliana; identical to SEQ ID NO: 28442
  peptide (1)..(307): Ceres Seq. ID no. 12488549
  misc_feature (1)..(288): Homolog of NCBI NO: 15234888 NR Description: putative oxidoreductase; protein id: At4g10020.1
  misc_feature (14)..(289): Homolog of NCBI NO: 21742781 NR Description: OSJNBa0055C08.3 [Oryza sativa (japonica
  misc_feature (1)..(298): Homolog of NCBI NO: 21311775 NR Description: steroleosin-B [Sesamum indicum]
  misc_feature (1)..(304): Homolog of NCBI NO: 15241261 NR Description: putative protein; protein id: At5g50770.1
  misc_feature (1)..(290): Homolog of NCBI NO: 18423187 NR Description: 11-beta-hydroxysteroid dehydrogenase-like
  misc_feature (1)..(298): Homolog of NCBI NO: 15824408 NR Description: steroleosin [Sesamum indicum]
  misc_feature (1)..(288): Homolog of NCBI NO: 8777392 NR Description: 11-beta-hydroxysteroid dehydrogenase-like
  misc_feature (1)..(288): Homolog of NCBI NO: 15241203 NR Description: 11-beta-hydroxysteroid dehydrogenase-like
  misc_feature (1)..(307): Homolog of NCBI NO: 15232779 NR Description: putative protein; protein id: At3g47360.1
  misc_feature (1)..(307): Homolog of NCBI NO: 15232777 NR Description: putative protein; protein id: At3g47350.1
  misc_feature (1)..(288): Homolog of NCBI NO: 15234888 NR Description: putative oxidoreductase; protein id: At4g10020.1
  misc_feature (14)..(289): Homolog of NCBI NO: 21742781 NR Description: OSJNBa0055C08.3 [Oryza sativa (japonica
  misc_feature (1)..(298): Homolog of NCBI NO: 21311775 NR Description: steroleosin-B [Sesamum indicum]
  misc_feature (1)..(304): Homolog of NCBI NO: 15241261 NR Description: putative protein; protein id: At5g50770.1
  misc_feature (1)..(290): Homolog of NCBI NO: 18423187 NR Description: 11-beta-hydroxysteroid dehydrogenase-like
  misc_feature (1)..(298): Homolog of NCBI NO: 15824408 NR Description: steroleosin [Sesamum indicum]
  misc_feature (1)..(288): Homolog of NCBI NO: 8777392 NR Description: 11-beta-hydroxysteroid dehydrogenase-like
  misc_feature (1)..(288): Homolog of NCBI NO: 15241203 NR Description: 11-beta-hydroxysteroid dehydrogenase-like
  misc_feature (1)..(307): Homolog of NCBI NO: 15232779 NR Description: putative protein; protein id: At3g47360.1
  misc_feature (1)..(307): Homolog of NCBI NO: 15232777 NR Description: putative protein; protein id: At3g47350.1

SEQ ID NO: 44085 - protein, 156 aa, Arabidopsis thaliana; identical to SEQ ID NO: 28443
  peptide (1)..(156): Ceres Seq. ID no. 12488550
  misc_feature (1)..(137): Homolog of NCBI NO: 15234888 NR Description: putative oxidoreductase; protein id: At4g10020.1
  misc_feature (1)..(138): Homolog of NCBI NO: 21742781 NR Description: OSJNBa0055C08.3 [Oryza sativa (japonica
  misc_feature (1)..(147): Homolog of NCBI NO: 21311775 NR Description: steroleosin-B [Sesamum indicum]
  misc_feature (1)..(153): Homolog of NCBI NO: 15241261 NR Description: putative protein; protein id: At5g50770.1
  misc_feature (1)..(139): Homolog of NCBI NO: 18423187 NR Description: 11-beta-hydroxysteroid dehydrogenase-like
  misc_feature (1)..(147): Homolog of NCBI NO: 15824408 NR Description: steroleosin [Sesamum indicum]
  misc_feature (1)..(137): Homolog of NCBI NO: 8777392 NR Description: 11-beta-hydroxysteroid dehydrogenase-like
  misc_feature (1)..(137): Homolog of NCBI NO: 15241203 NR Description: 11-beta-hydroxysteroid dehydrogenase-like
  misc_feature (1)..(156): Homolog of NCBI NO: 15232779 NR Description: putative protein; protein id: At3g47360.1
  misc_feature (1)..(156): Homolog of NCBI NO: 15232777 NR Description: putative protein; protein id: At3g47350.1
  misc_feature (1)..(137): Homolog of NCBI NO: 15234888 NR Description: putative oxidoreductase; protein id: At4g10020.1
  misc_feature (1)..(138): Homolog of NCBI NO: 21742781 NR Description: OSJNBa0055C08.3 [Oryza sativa (japonica
  misc_feature (1)..(147): Homolog of NCBI NO: 21311775 NR Description: steroleosin-B [Sesamum indicum]
  misc_feature (1)..(153): Homolog of NCBI NO: 15241261 NR Description: putative protein; protein id: At5g50770.1
  misc_feature (1)..(139): Homolog of NCBI NO: 18423187 NR Description: 11-beta-hydroxysteroid dehydrogenase-like
  misc_feature (1)..(147): Homolog of NCBI NO: 15824408 NR Description: steroleosin [Sesamum indicum]
  misc_feature (1)..(137): Homolog of NCBI NO: 8777392 NR Description: 11-beta-hydroxysteroid dehydrogenase-like
  misc_feature (1)..(137): Homolog of NCBI NO: 15241203 NR Description: 11-beta-hydroxysteroid dehydrogenase-like
  misc_feature (1)..(156): Homolog of NCBI NO: 15232779 NR Description: putative protein; protein id: At3g47360.1
  misc_feature (1)..(156): Homolog of NCBI NO: 15232777 NR Description: putative protein; protein id: At3g47350.1

SEQ ID NO: 44086 - DNA, 1013 bp, Arabidopsis thaliana; identical to SEQ ID NO: 26249
  misc_feature (1)..(1013): Ceres Seq. ID no. 12580328
  misc_feature: MA Experiment ID: 108434 Result: Up-regulated in Transcription
  misc_feature: MA Experiment 108434 PARAMETER Experiment Name: At_Root_Tips_cDNA_P Parameter: Tissue Value: Root Tips
  misc_feature: MA Experiment ID: 108461 Result: Up-regulated in Transcription
  misc_feature: MA Experiment 108461 PARAMETER Experiment Name: At_Germinating_Seeds_cDNA_P Parameter: Age (day) Value: 1 vs. 0
  misc_feature: MA Experiment 108461 PARAMETER Experiment Name: At_Germinating_Seeds_cDNA_P Parameter: Tissue Value: Germinating Seeds
  misc_feature: MA Experiment ID: 108462 Result: Up-regulated in Transcription
  misc_feature: MA Experiment 108462 PARAMETER Experiment Name: At_Germinating_Seeds_cDNA_P Parameter: Age (day) Value: 2 vs. 0
  misc_feature: MA Experiment 108462 PARAMETER Experiment Name: At_Germinating_Seeds_cDNA_P Parameter: Tissue Value: Germinating Seeds
  misc_feature: MA Experiment ID: 20000113 Result: Down-regulated in Transcription
  misc_feature: MA Experiment 20000113 PARAMETER Experiment Name: At_42deg_Heat_cDNA_P Parameter: Temperature (deg C) Value: 42 vs. 22
  misc_feature: MA Experiment 20000113 PARAMETER Experiment Name: At_42deg_Heat_cDNA_P Parameter: Timepoint (hr) Value: 8
  misc_feature: MA Experiment 20000113 PARAMETER Experiment Name: At_42deg_Heat_cDNA_P Parameter: Tissue Value: Aerial
  misc_feature: MA Experiment ID: 20000179 Result: Up-regulated in Transcription
  misc_feature: MA Experiment 20000179 PARAMETER Experiment Name: At_Germinating_Seeds_P Parameter: Age (hr) Value: 6 vs. 0
  misc_feature: MA Experiment 20000179 PARAMETER Experiment Name: At_Germinating_Seeds_P Parameter: Tissue Value: Germinating Seeds

SEQ ID NO: 44087 - protein, 182 aa, Arabidopsis thaliana; identical to SEQ ID NO: 26250
  peptide (1)..(182): Ceres Seq. ID no. 12580329
  misc_feature (4)..(177): Pfam Name: ADP-ribosylation factor family Pfam Description: ADP-ribosylation factor family
  misc_feature (4)..(177): Pfam Name: ADP-ribosylation factor family Pfam Description: ADP-ribosylation factor family
  misc_feature (4)..(177): Pfam Name: ADP-ribosylation factor family Pfam Description: ADP-ribosylation factor family
  misc_feature (1)..(179): Homolog of NCBI NO: 11131023 NR Description: ADP-ribosylation factor 1
  misc_feature (1)..(179): Homolog of NCBI NO: 39653273 NR Description: ADP-ribosylation factor [Medicago sativa]
  misc_feature (1)..(181): Homolog of NCBI NO: 31240205 NR Description: ENSANGP00000015770 [Anopheles gambiae]
  misc_feature (1)..(179): Homolog of NCBI NO: 29124979 NR Description: ADP-ribosylation factor 1 [Populus tremuloides]
  misc_feature (1)..(179): Homolog of NCBI NO: 4502227 NR Description: ADP-ribosylation factor-like 1 [Homo sapiens]
  misc_feature (1)..(179): Homolog of NCBI NO: 11131023 NR Description: ADP-ribosylation factor 1
  misc_feature (1)..(181): Homolog of NCBI NO: 31240205 NR Description: ENSANGP00000015770 [Anopheles gambiae]
  misc_feature (1)..(179): Homolog of NCBI NO: 4502227 NR Description: ADP-ribosylation factor-like 1 [Homo sapiens]
  misc_feature (1)..(179): Homolog of NCBI NO: 29124979 NR Description: ADP-ribosylation factor 1 [Populus tremuloides]
  misc_feature (1)..(181): Homolog of NCBI NO: 31240205 NR Description: ENSANGP00000015770 [Anopheles gambiae]
  misc_feature (1)..(179): Homolog of NCBI NO: 39653273 NR Description: ADP-ribosylation factor [Medicago sativa]
  misc_feature (1)..(179): Homolog of NCBI NO: 11131023 NR Description: ADP-ribosylation factor 1
  misc_feature (1)..(182): Homolog of NCBI NO: 30682545 NR Description: ADP-ribosylation factor 3 (ARF3) [Arabidopsis
  misc_feature (1)..(182): Homolog of NCBI NO: 3182922 NR Description: ADP-ribosylation factor 1
  misc_feature (1)..(181): Homolog of NCBI NO: 40253742 NR Description: putative ADP-ribosylation factor 3
  misc_feature (1)..(179): Homolog of NCBI NO: 13385340 NR Description: ADP-ribosylation-like 1 [Mus musculus]
  misc_feature (1)..(179): Homolog of NCBI NO: 11693150 NR Description: ADP-ribosylation factor-like 1 [Rattus
  misc_feature (1)..(182): Homolog of NCBI NO: 30682545 NR Description: ADP-ribosylation factor 3 (ARF3) [Arabidopsis
  misc_feature (1)..(182): Homolog of NCBI NO: 3182922 NR Description: ADP-ribosylation factor 1
  misc_feature (1)..(181): Homolog of NCBI NO: 40253742 NR Description: putative ADP-ribosylation factor 3
  misc_feature (1)..(179): Homolog of NCBI NO: 13385340 NR Description: ADP-ribosylation-like 1 [Mus musculus]
  misc_feature (1)..(179): Homolog of NCBI NO: 11693150 NR Description: ADP-ribosylation factor-like 1 [Rattus
  misc_feature (1)..(179): Homolog of NCBI NO: 4502227 NR Description: ADP-ribosylation factor-like 1 [Homo sapiens]
  misc_feature (1)..(179): Homolog of NCBI NO: 29124979 NR Description: ADP-ribosylation factor 1 [Populus tremuloides]
  misc_feature (1)..(179): Homolog of NCBI NO: 39653273 NR Description: ADP-ribosylation factor [Medicago sativa]
  misc_feature (1)..(179): Homolog of NCBI NO: 11693150 NR Description: ADP-ribosylation factor-like 1 [Rattus
  misc_feature (1)..(179): Homolog of NCBI NO: 13385340 NR Description: ADP-ribosylation-like 1 [Mus musculus]
  misc_feature (1)..(181): Homolog of NCBI NO: 40253742 NR Description: putative ADP-ribosylation factor 3
  misc_feature (1)..(182): Homolog of NCBI NO: 3182922 NR Description: ADP-ribosylation factor 1
  misc_feature (1)..(182): Homolog of NCBI NO: 30682545 NR Description: ADP-ribosylation factor 3 (ARF3) [Arabidopsis

SEQ ID NO: 44088 - protein, 175 aa, Arabidopsis thaliana; identical to SEQ ID NO: 26251
  peptide (1)..(175): Ceres Seq. ID no. 12580330
  misc_feature (1)..(170): Pfam Name: ADP-ribosylation factor family Pfam Description: ADP-ribosylation factor family
  misc_feature (1)..(170): Pfam Name: ADP-ribosylation factor family Pfam Description: ADP-ribosylation factor family
  misc_feature (1)..(170): Pfam Name: ADP-ribosylation factor family Pfam Description: ADP-ribosylation factor family
  misc_feature (1)..(172): Homolog of NCBI NO: 11131023 NR Description: ADP-ribosylation factor 1
  misc_feature (1)..(172): Homolog of NCBI NO: 39653273 NR Description: ADP-ribosylation factor [Medicago sativa]
  misc_feature (1)..(174): Homolog of NCBI NO: 31240205 NR Description: ENSANGP00000015770 [Anopheles gambiae]
  misc_feature (1)..(172): Homolog of NCBI NO: 29124979 NR Description: ADP-ribosylation factor 1 [Populus tremuloides]
  misc_feature (1)..(172): Homolog of NCBI NO: 4502227 NR Description: ADP-ribosylation factor-like 1 [Homo sapiens]
  misc_feature (1)..(172): Homolog of NCBI NO: 11131023 NR Description: ADP-ribosylation factor 1
  misc_feature (1)..(174): Homolog of NCBI NO: 31240205 NR Description: ENSANGP00000015770 [Anopheles gambiae]
  misc_feature (1)..(172): Homolog of NCBI NO: 4502227 NR Description: ADP-ribosylation factor-like 1 [Homo sapiens]
  misc_feature (1)..(172): Homolog of NCBI NO: 29124979 NR Description: ADP-ribosylation factor 1 [Populus tremuloides]
  misc_feature (1)..(174): Homolog of NCBI NO: 31240205 NR Description: ENSANGP00000015770 [Anopheles gambiae]
  misc_feature (1)..(172): Homolog of NCBI NO: 39653273 NR Description: ADP-ribosylation factor [Medicago sativa]
  misc_feature (1)..(172): Homolog of NCBI NO: 11131023 NR Description: ADP-ribosylation factor 1
  misc_feature (1)..(175): Homolog of NCBI NO: 30682545 NR Description: ADP-ribosylation factor 3 (ARF3) [Arabidopsis
  misc_feature (1)..(175): Homolog of NCBI NO: 3182922 NR Description: ADP-ribosylation factor 1
  misc_feature (1)..(174): Homolog of NCBI NO: 40253742 NR Description: putative ADP-ribosylation factor 3
  misc_feature (1)..(172): Homolog of NCBI NO: 13385340 NR Description: ADP-ribosylation-like 1 [Mus musculus]
  misc_feature (1)..(172): Homolog of NCBI NO: 11693150 NR Description: ADP-ribosylation factor-like 1 [Rattus
  misc_feature (1)..(175): Homolog of NCBI NO: 30682545 NR Description: ADP-ribosylation factor 3 (ARF3) [Arabidopsis
  misc_feature (1)..(175): Homolog of NCBI NO: 3182922 NR Description: ADP-ribosylation factor 1
  misc_feature (1)..(174): Homolog of NCBI NO: 40253742 NR Description: putative ADP-ribosylation factor 3
  misc_feature (1)..(172): Homolog of NCBI NO: 13385340 NR Description: ADP-ribosylation-like 1 [Mus musculus]
  misc_feature (1)..(172): Homolog of NCBI NO: 11693150 NR Description: ADP-ribosylation factor-like 1 [Rattus
  misc_feature (1)..(172): Homolog of NCBI NO: 4502227 NR Description: ADP-ribosylation factor-like 1 [Homo sapiens]
  misc_feature (1)..(172): Homolog of NCBI NO: 29124979 NR Description: ADP-ribosylation factor 1 [Populus tremuloides]
  misc_feature (1)..(172): Homolog of NCBI NO: 39653273 NR Description: ADP-ribosylation factor [Medicago sativa]
  misc_feature (1)..(172): Homolog of NCBI NO: 11693150 NR Description: ADP-ribosylation factor-like 1 [Rattus
  misc_feature (1)..(172): Homolog of NCBI NO: 13385340 NR Description: ADP-ribosylation-like 1 [Mus musculus]
  misc_feature (1)..(174): Homolog of NCBI NO: 40253742 NR Description: putative ADP-ribosylation factor 3
  misc_feature (1)..(175): Homolog of NCBI NO: 3182922 NR Description: ADP-ribosylation factor 1
  misc_feature (1)..(175): Homolog of NCBI NO: 30682545 NR Description: ADP-ribosylation factor 3 (ARF3) [Arabidopsis

SEQ ID NO: 44089 - protein, 144 aa, Arabidopsis thaliana; identical to SEQ ID NO: 26252
  peptide (1)..(144): Ceres Seq. ID no. 12580331
  misc_feature (1)..(139): Pfam Name: ADP-ribosylation factor family Pfam Description: ADP-ribosylation factor family
  misc_feature (1)..(139): Pfam Name: ADP-ribosylation factor family Pfam Description: ADP-ribosylation factor family
  misc_feature (1)..(139): Pfam Name: ADP-ribosylation factor family Pfam Description: ADP-ribosylation factor family
  misc_feature (1)..(141): Homolog of NCBI NO: 11131023 NR Description: ADP-ribosylation factor 1
  misc_feature (1)..(141): Homolog of NCBI NO: 39653273 NR Description: ADP-ribosylation factor [Medicago sativa]
  misc_feature (1)..(143): Homolog of NCBI NO: 31240205 NR Description: ENSANGP00000015770 [Anopheles gambiae]
  misc_feature (1)..(141): Homolog of NCBI NO: 29124979 NR Description: ADP-ribosylation factor 1 [Populus tremuloides]
  misc_feature (1)..(141): Homolog of NCBI NO: 4502227 NR Description: ADP-ribosylation factor-like 1 [Homo sapiens]
  misc_feature (1)..(141): Homolog of NCBI NO: 11131023 NR Description: ADP-ribosylation factor 1
  misc_feature (1)..(143): Homolog of NCBI NO: 31240205 NR Description: ENSANGP00000015770 [Anopheles gambiae]
  misc_feature (1)..(141): Homolog of NCBI NO: 4502227 NR Description: ADP-ribosylation factor-like 1 [Homo sapiens]
  misc_feature (1)..(141): Homolog of NCBI NO: 29124979 NR Description: ADP-ribosylation factor 1 [Populus tremuloides]
  misc_feature (1)..(143): Homolog of NCBI NO: 31240205 NR Description: ENSANGP00000015770 [Anopheles gambiae]
  misc_feature (1)..(141): Homolog of NCBI NO: 39653273 NR Description: ADP-ribosylation factor [Medicago sativa]
  misc_feature (1)..(141): Homolog of NCBI NO: 11131023 NR Description: ADP-ribosylation factor 1
  misc_feature (1)..(144): Homolog of NCBI NO: 30682545 NR Description: ADP-ribosylation factor 3 (ARF3) [Arabidopsis
  misc_feature (1)..(144): Homolog of NCBI NO: 3182922 NR Description: ADP-ribosylation factor 1
  misc_feature (1)..(143): Homolog of NCBI NO: 40253742 NR Description: putative ADP-ribosylation factor 3
  misc_feature (1)..(141): Homolog of NCBI NO: 13385340 NR Description: ADP-ribosylation-like 1 [Mus musculus]
  misc_feature (1)..(141): Homolog of NCBI NO: 11693150 NR Description: ADP-ribosylation factor-like 1 [Rattus
  misc_feature (1)..(144): Homolog of NCBI NO: 30682545 NR Description: ADP-ribosylation factor 3 (ARF3) [Arabidopsis
  misc_feature (1)..(144): Homolog of NCBI NO: 3182922 NR Description: ADP-ribosylation factor 1
  misc_feature (1)..(143): Homolog of NCBI NO: 40253742 NR Description: putative ADP-ribosylation factor 3
  misc_feature (1)..(141): Homolog of NCBI NO: 13385340 NR Description: ADP-ribosylation-like 1 [Mus musculus]
  misc_feature (1)..(141): Homolog of NCBI NO: 11693150 NR Description: ADP-ribosylation factor-like 1 [Rattus
  misc_feature (1)..(141): Homolog of NCBI NO: 4502227 NR Description: ADP-ribosylation factor-like 1 [Homo sapiens]
  misc_feature (1)..(141): Homolog of NCBI NO: 29124979 NR Description: ADP-ribosylation factor 1 [Populus tremuloides]
  misc_feature (1)..(141): Homolog of NCBI NO: 39653273 NR Description: ADP-ribosylation factor [Medicago sativa]
  misc_feature (1)..(141): Homolog of NCBI NO: 11693150 NR Description: ADP-ribosylation factor-like 1 [Rattus
  misc_feature (1)..(141): Homolog of NCBI NO: 13385340 NR Description: ADP-ribosylation-like 1 [Mus musculus]
  misc_feature (1)..(143): Homolog of NCBI NO: 40253742 NR Description: putative ADP-ribosylation factor 3
  misc_feature (1)..(144): Homolog of NCBI NO: 3182922 NR Description: ADP-ribosylation factor 1
  misc_feature (1)..(144): Homolog of NCBI NO: 30682545 NR Description: ADP-ribosylation factor 3 (ARF3) [Arabidopsis

SEQ ID NO: 44090 - DNA, 539 bp, Arabidopsis thaliana
  misc_feature (1)..(539): Ceres Seq. ID no. 12455419
  misc_feature: MA Experiment ID: 20000306 Result: Down-regulated in Transcription
  misc_feature: MA Experiment 20000306 PARAMETER Experiment Name: At_Germinating_Seeds_Sub_P Parameter: Age (hr) Value: 6 vs. 0
  misc_feature: MA Experiment 20000306 PARAMETER Experiment Name: At_Germinating_Seeds_Sub_P Parameter: Organism Value: A. thaliana
  misc_feature: MA Experiment 20000306 PARAMETER Experiment Name: At_Germinating_Seeds_Sub_P Parameter: Plant Line Value: WS
  misc_feature: MA Experiment 20000306 PARAMETER Experiment Name: At_Germinating_Seeds_Sub_P Parameter: Tissue Value: Germinating Seeds
  misc_feature: MA Experiment ID: 20000307 Result: Down-regulated in Transcription
  misc_feature: MA Experiment 20000307 PARAMETER Experiment Name: At_Germinating_Seeds_Sub_P Parameter: Age (hr) Value: 24 vs. 0
  misc_feature: MA Experiment 20000307 PARAMETER Experiment Name: At_Germinating_Seeds_Sub_P Parameter: Organism Value: A. thaliana
  misc_feature: MA Experiment 20000307 PARAMETER Experiment Name: At_Germinating_Seeds_Sub_P Parameter: Plant Line Value: WS
  misc_feature: MA Experiment 20000307 PARAMETER Experiment Name: At_Germinating_Seeds_Sub_P Parameter: Tissue Value: Germinating Seeds
  misc_feature: MA Experiment ID: 20000315 Result: Down-regulated in Transcription
  misc_feature: MA Experiment 20000315 PARAMETER Experiment Name: At_14day_Shoots-Roots_Sub_P Parameter: Age (day) Value: 14
  misc_feature: MA Experiment 20000315 PARAMETER Experiment Name: At_14day_Shoots-Roots_Sub_P Parameter: Organism Value: A. thaliana
  misc_feature: MA Experiment 20000315 PARAMETER Experiment Name: At_14day_Shoots-Roots_Sub_P Parameter: Plant Line Value: WS
  misc_feature: MA Experiment 20000315 PARAMETER Experiment Name: At_14day_Shoots-Roots_Sub_P Parameter: Tissue Value: Shoots vs. Whole Plant
gttaaaaccccaattcacattagcctgttgcgatctaaaacctctaaaaccctagaatcaaaatcgcccattcgagatcgagagagacgatggatcacatagcggcagcggaggagcaaattgtaacggagaggattagaagaaaacttgaagaagttaatgcaactgctcaatcgcaactctctcctattcaagatcacatcaatttcacccttcagcaagcctatttcaaatgtgcatacgagtgctttgacagaaataggaagcaagaggagatagccaactgtgttgagcactgcagtgttccagttgtcaatgctcaacagcatttcgaaggcgaaatgtctcagtttcaggaaaggatgaacagatctctcatggtctgtcaagacaaatttgaggctgcaaagctccataagaacaggggagatgccgccaaagctatggagagttgtgtgaacacatccattgaggatagtctcgatacattgcctcatattgtgcagagaatgaagacgtcattctccattgccgactaa

SEQ ID NO: 44091 - protein, 149 aa, Arabidopsis thaliana
  peptide (1)..(149): Ceres Seq. ID no. 12455420
  misc_feature (15)..(145): Pfam Name: Eukaryotic protein of unknown function (DUF842) Pfam Description: Eukaryotic protein of unknown function (DUF842)
  misc_feature (23)..(142): Homolog of NCBI NO: 15929034 NR Description: hypothetical protein FLJ14668 [Homo sapiens]
  misc_feature (42)..(146): Homolog of NCBI NO: 27712200 NR Description: similar to RIKEN cDNA 2010309E21
  misc_feature (42)..(146): Homolog of NCBI NO: 15489002 NR Description: Unknown (protein for IMAGE:3493774) [Mus musculus]
  misc_feature (42)..(146): Homolog of NCBI NO: 13385042 NR Description: RIKEN cDNA 2010309E21 [Mus musculus]
  misc_feature (1)..(142): Homolog of NCBI NO: 31215413 NR Description: ENSANGP00000010887 [Anopheles gambiae]
  misc_feature (24)..(146): Homolog of NCBI NO: 37589716 NR Description: Unknown (protein for MGC:73247) [Danio rerio]
  misc_feature (1)..(124): Homolog of NCBI NO: 15221247 NR Description: hypothetical protein; protein id: At1g05740.1
  misc_feature (7)..(149): Homolog of NCBI NO: 15224344 NR Description: hypothetical protein
  misc_feature (1)..(149): Homolog of NCBI NO: 18402744 NR Description: expressed protein
  misc_feature (1)..(149): Homolog of NCBI NO: 15221245 NR Description: hypothetical Protein; protein id: At1g05730.1
MDHIAAAEEQIVTERIRRKLEEVNATAQSQLSPIQDHINFTLQQAYFKCAYECFDRNRKQEEIANCVEHCSVPVVNAQQHFEGEMSQFQERMNRSLMVCQDKFEAAKLHKNRGDAAKAMESCVNTSIEDSLDTLPHIVQRMKTSFSIAD

SEQ ID NO: 44092 - DNA, 1876 bp, Arabidopsis thaliana
  misc_feature (1)..(1876): Ceres Seq. ID no. 12462191
  misc_feature: MA Experiment ID: 108461 Result: Up-regulated in Transcription
  misc_feature: MA Experiment 108461 PARAMETER Experiment Name: At_Germinating_Seeds_cDNA_P Parameter: Age (day) Value: 1 vs. 0
  misc_feature: MA Experiment 108461 PARAMETER Experiment Name: At_Germinating_Seeds_cDNA_P Parameter: Tissue Value: Germinating Seeds
  misc_feature: MA Experiment ID: 108462 Result: Up-regulated in Transcription
  misc_feature: MA Experiment 108462 PARAMETER Experiment Name: At_Germinating_Seeds_cDNA_P Parameter: Age (day) Value: 2 vs. 0
  misc_feature: MA Experiment 108462 PARAMETER Experiment Name: At_Germinating_Seeds_cDNA_P Parameter: Tissue Value: Germinating Seeds
  misc_feature: MA Experiment ID: 108463 Result: Up-regulated in Transcription
  misc_feature: MA Experiment 108463 PARAMETER Experiment Name: At_Germinating_Seeds_cDNA_P Parameter: Age (day) Value: 3 vs. 0
  misc_feature: MA Experiment 108463 PARAMETER Experiment Name: At_Germinating_Seeds_cDNA_P Parameter: Tissue Value: Germinating Seeds
  misc_feature: MA Experiment ID: 108464 Result: Up-regulated in Transcription
  misc_feature: MA Experiment 108464 PARAMETER Experiment Name: At_Germinating_Seeds_cDNA_P Parameter: Age (day) Value: 4 vs. 0
  misc_feature: MA Experiment 108464 PARAMETER Experiment Name: At_Germinating_Seeds_cDNA_P Parameter: Tissue Value: Germinating Seeds
  misc_feature: MA Experiment ID: 108569 Result: Up-regulated in Transcription
  misc_feature: MA Experiment 108569 PARAMETER Experiment Name: At_0.001%_MeJA__cDNA_P Parameter: Timepoint (hr) Value: 6
  misc_feature: MA Experiment 108569 PARAMETER Experiment Name: At_0.001%_MeJA__cDNA_P Parameter: Tissue Value: Aerial
  misc_feature: MA Experiment 108569 PARAMETER Experiment Name: At_0.001%_MeJA__cDNA_P Parameter: Treatment Value: 0.001% MeJA vs. No Treatment
  misc_feature: MA Experiment ID: 108573 Result: Up-regulated in Transcription
  misc_feature: MA Experiment 108573 PARAMETER Experiment Name: At_Drought_cDNA_P Parameter: Timepoint (hr) Value: 6
  misc_feature: MA Experiment 108573 PARAMETER Experiment Name: At_Drought_cDNA_P Parameter: Tissue Value: Aerial
  misc_feature: MA Experiment 108573 PARAMETER Experiment Name: At_Drought_cDNA_P Parameter: Treatment Value: Drought vs. No Drought
  misc_feature: MA Experiment ID: 108579 Result: Down-regulated in Transcription
  misc_feature: MA Experiment 108579 PARAMETER Experiment Name: At_4deg_Cold_cDNA_P Parameter: Temperature (deg C) Value: 4 vs. 22
  misc_feature: MA Experiment 108579 PARAMETER Experiment Name: At_4deg_Cold_cDNA_P Parameter: Timepoint (hr) Value: 6
  misc_feature: MA Experiment 108579 PARAMETER Experiment Name: At_4deg_Cold_cDNA_P Parameter: Tissue Value: Aerial
  misc_feature: MA Experiment ID: 108585 Result: Up-regulated in Transcription
  misc_feature: MA Experiment 108585 PARAMETER Experiment Name: At_5mM_NaNP_cDNA_P Parameter: Timepoint (hr) Value: 6
  misc_feature: MA Experiment 108585 PARAMETER Experiment Name: At_5mM_NaNP_cDNA_P Parameter: Tissue Value: Aerial
  misc_feature: MA Experiment 108585 PARAMETER Experiment Name: At_5mM_NaNP_cDNA_P Parameter: Treatment Value: null
  misc_feature: MA Experiment ID: 108595 Result: Down-regulated in Transcription
  misc_feature: MA Experiment 108595 PARAMETER Experiment Name: At_Ler-pi_Ovule_cDNA_P Parameter: Plant Line Value: null
  misc_feature: MA Experiment ID: 20000111 Result: Down-regulated in Transcription
  misc_feature: MA Experiment 20000111 PARAMETER Experiment Name: At_42deg_Heat_cDNA_P Parameter: Temperature (deg C) Value: 42 vs. 22
  misc_feature: MA Experiment 20000111 PARAMETER Experiment Name: At_42deg_Heat_cDNA_P Parameter: Timepoint (hr) Value: 6
  misc_feature: MA Experiment 20000111 PARAMETER Experiment Name: At_42deg_Heat_cDNA_P Parameter: Tissue Value: Aerial
  misc_feature: MA Experiment ID: 20000113 Result: Down-regulated in Transcription
  misc_feature: MA Experiment 20000113 PARAMETER Experiment Name: At_42deg_Heat_cDNA_P Parameter: Temperature (deg C) Value: 42 vs. 22
  misc_feature: MA Experiment 20000113 PARAMETER Experiment Name: At_42deg_Heat_cDNA_P Parameter: Timepoint (hr) Value: 8
  misc_feature: MA Experiment 20000113 PARAMETER Experiment Name: At_42deg_Heat_cDNA_P Parameter: Tissue Value: Aerial
  misc_feature: MA Experiment ID: 20000173 Result: Down-regulated in Transcription
  misc_feature: MA Experiment 20000173 PARAMETER Experiment Name: At_42deg_Heat_P Parameter: Age (day) Value: 14
  misc_feature: MA Experiment 20000173 PARAMETER Experiment Name: At_42deg_Heat_P Parameter: Organism Value: A. thaliana
  misc_feature: MA Experiment 20000173 PARAMETER Experiment Name: At_42deg_Heat_P Parameter: Plant Line Value: WS
  misc_feature: MA Experiment 20000173 PARAMETER Experiment Name: At_42deg_Heat_P Parameter: Temperature (deg C) Value: 42 vs. 22
  misc_feature: MA Experiment 20000173 PARAMETER Experiment Name: At_42deg_Heat_P Parameter: Timepoint (hr) Value: 6
  misc_feature: MA Experiment 20000173 PARAMETER Experiment Name: At_42deg_Heat_P Parameter: Tissue Value: Aerial
  misc_feature: MA Experiment ID: 20000179 Result: Up-regulated in Transcription
  misc_feature: MA Experiment 20000179 PARAMETER Experiment Name: At_Germinating_Seeds_P Parameter: Age (hr) Value: 6 vs. 0
  misc_feature: MA Experiment 20000179 PARAMETER Experiment Name: At_Germinating_Seeds_P Parameter: Tissue Value: Germinating Seeds
  misc_feature: MA Experiment ID: 20000180 Result: Up-regulated in Transcription
  misc_feature: MA Experiment 20000180 PARAMETER Experiment Name: At_Germinating_Seeds_P Parameter: Age (hr) Value: 24 vs. 0
  misc_feature: MA Experiment 20000180 PARAMETER Experiment Name: At_Germinating_Seeds_P Parameter: Tissue Value: Germinating Seeds
  misc_feature: MA Experiment ID: 20000439 Result: Down-regulated in Transcription
  misc_feature: MA Experiment 20000439 PARAMETER Experiment Name: At_Roots__P Parameter: Age (day) Value: 14 vs. 21
  misc_feature: MA Experiment 20000439 PARAMETER Experiment Name: At_Roots__P Parameter: Organism Value: A. thaliana
  misc_feature: MA Experiment 20000439 PARAMETER Experiment Name: At_Roots__P Parameter: Tissue Value: Roots vs. Whole Plant
  misc_feature: MA Experiment ID: 20001450 Result: Up-regulated in Transcription
  misc_feature: MA Experiment 20001450 PARAMETER Experiment Name: At_Far-red-induction_P Parameter: Age (day) Value: 7
  misc_feature: MA Experiment 20001450 PARAMETER Experiment Name: At_Far-red-induction_P Parameter: Light Value: Far-red vs. White
  misc_feature: MA Experiment 20001450 PARAMETER Experiment Name: At_Far-red-induction_P Parameter: Organism Value: A. thaliana
  misc_feature: MA Experiment 20001450 PARAMETER Experiment Name: At_Far-red-induction_P Parameter: Plant Line Value: Columbia
  misc_feature: MA Experiment 20001450 PARAMETER Experiment Name: At_Far-red-induction_P Parameter: Timepoint (hr) Value: 8
  misc_feature: MA Experiment 20001450 PARAMETER Experiment Name: At_Far-red-induction_P Parameter: Tissue Value: Whole Plant
  misc_feature: MA Experiment ID: 20001557 Result: Down-regulated in Transcription
  misc_feature: MA Experiment 20001557 PARAMETER Experiment Name: At_Drought_Soil_Dry_P Parameter: Age (day) Value: 27
  misc_feature: MA Experiment 20001557 PARAMETER Experiment Name: At_Drought_Soil_Dry_P Parameter: Organism Value: A. thaliana
  misc_feature: MA Experiment 20001557 PARAMETER Experiment Name: At_Drought_Soil_Dry_P Parameter: Plant Line Value: WS
  misc_feature: MA Experiment 20001557 PARAMETER Experiment Name: At_Drought_Soil_Dry_P Parameter: Post Timepoint (hr) Value: 3
  misc_feature: MA Experiment 20001557 PARAMETER Experiment Name: At_Drought_Soil_Dry_P Parameter: Post-Treatment Value: Re-Water vs. No Drought
  misc_feature: MA Experiment 20001557 PARAMETER Experiment Name: At_Drought_Soil_Dry_P Parameter: Timepoint (day) Value: 13
  misc_feature: MA Experiment 20001557 PARAMETER Experiment Name: At_Drought_Soil_Dry_P Parameter: Treatment Value: Drought vs. No Drought
aagctccacagtgagttcttctcagcaatcacaatctatctggtttaagccctcactatcctctctctcaaatcgcggagtctccgaagtttctctgacaaaatgcagtcgtcaacgtatgcggttaaaggaaacgctgcgtttgcgtttcagagacggaccttctcttctgacagatcgacgacttctaccggaattcgcttcgctggttataagagcttagccaccaccgggccactctactgttctggttctgaagccatgggagcgacgcttgctcgtgctgataacgggatccagagcgttatgagtttctcttctgtcaaagctcgatcggtcagagctcaagcctcatctgatggagatgaagaagaagctatacctctgagatctgaagggaaaagctctggaacagttttgccttttgttggtgttgcttgtcttggtgctatactctttggttatcatctcggggtggttaatggtgctcttgaatatcttgctaaggatcttgggatcgccgaaaatactgttttgcaaggatggattgttagttctctgcttgctggtgctacggtaggttcattcactggaggtgcattagctgacaaatttggacgaacaagaacttttcaattggatgctatcccgcttgccattggagctttcttatgtgcaacagctcagagtgtgcagactatgattgtgggacgtctgctcgctggaattggaattggaatctcatcagcgattgtaccactttacatatctgagatatcaccaactgaaatccgtggagcactcggatctgtgaaccagttgttcatctgtataggaatacttgcagccttgatagctggattaccccttgcagcaaaccctctatggtggaggacgatgtttggtgttgcagttatcccttccgttctattggccataggaatggctttttctccagaaagcccaaggtggctcgttcagcaaggaaaagtctctgaagctgaaaaggcgatcaaaactttgtatggtaaagaaagagtggttgaactagttcgcgacttatcagcctctggccaaggttcttctgagccggaggcaggatggtttgatctattcagcagccgctactggaaagttgtaagcgtaggtgcggctctcttcttgtttcaacagttagccgggataaacgcagttgtgtattactccacatcggtattccgtagtgcgggaatccaatcagatgttgcagccagtgctctcgttggagcatcaaatgtctttggcactgctgttgcttcatcgttgatggataaaatgggaaggaaaagtcttttactgacaagctttggtggaatggctttgtcaatgctgttactctccttgtccttcacatggaaggctcttgctgcctattctggaacccttgccgttgttggaactgttctatatgtcctgtcattctcacttggtgctggcccggtaccggctcttcttcttccagagatatttgcatcccgaatcagagcaaaagccgtcgctctttctctcggcatgcactggatatcaaactttgtgatcggactatacttcttaagcgttgtgactaaattcggaatcagcagtgtctacttgggttttgctggagtctgcgtccttgcggtcctctacattgcaggaaacgtcgtcgagactaaaggtcgatcactggaggaaatagagcttgctcttacatctggagcttgaaattaaacaaaagaaatcagcagaacaaaaaccagtttgtttcatcatttagtttgtgagtctttctctaatctgctactcttaaattgtacaatggacgacgttatcaataacgagaaatcttttcatgacc

SEQ ID NO: 44093 - protein, 546 aa, Arabidopsis thaliana
  peptide (1)..(546): Ceres Seq. ID no. 12462192
  misc_feature (108)..(542): Pfam Name: Sugar (and other) transporter Pfam Description: Sugar (and other) transporter
  misc_feature (77)..(543): Homolog of NCBI NO: 8347246 NR Description: hexose transporter [Solanum tuberosum]
  misc_feature (47)..(543): Homolog of NCBI NO: 8347248 NR Description: hexose transporter [Zea mays]
  misc_feature (51)..(543): Homolog of NCBI NO: 8347244 NR Description: hexose transporter [Nicotiana tabacum]
  misc_feature (72)..(543): Homolog of NCBI NO: 2688830 NR Description: putative sugar transporter [Prunus armeniaca]
  misc_feature (1)..(543): Homolog of NCBI NO: 9858106 NR Description: putative glucose translocator [Mesembryanthemum
  misc_feature (1)..(543): Homolog of NCBI NO: 8347242 NR Description: hexose transporter [Spinacia oleracea]
  misc_feature (1)..(544): Homolog of NCBI NO: 15625046 NR Description: hexose transporter pGlT [Olea europaea]
  misc_feature (34)..(542): Homolog of NCBI NO: 8347250 NR Description: hexose transporter [Arabidopsis thaliana]
  misc_feature (1)..(546): Homolog of NCBI NO: 11278994 NR Description: sugar transporter-like protein - Arabidopsis
  misc_feature (1)..(546): Homolog of NCBI NO: 18417892 NR Description: sugar transporter-like protein
MQSSTYAVKGNAAFAFQRRTFSSDRSTTSTGIRFAGYKSLATTGPLYCSGSEAMGATLARADNGIQSVMSFSSVKARSVRAQASSDGDEEEAIPLRSEGKSSGTVLPFVGVACLGAILFGYHLGVVNGALEYLAKDLGIAENTVLQGWIVSSLLAGATVGSFTGGALADKFGRTRTFQLDAIPLAIGAFLCATAQSVQTMIVGRLLAGIGIGISSAIVPLYISEISPTEIRGALGSVNQLFICIGILAALIAGLPLAANPLWWRTMFGVAVIPSVLLAIGMAFSPESPRWLVQQGKVSEAEKAIKTLYGKERVVELVRDLSASGQGSSEPEAGWFDLFSSRYWKVVSVGAALFLFQQLAGINAVVYYSTSVFRSAGIQSDVAASALVGASNVFGTAVASSLMDKMGRKSLLLTSFGGMALSMLLLSLSFTWKALAAYSGTLAVVGTVLYVLSFSLGAGPVPALLLPEIFASRIRAKAVALSLGMHWISNFVIGLYFLSVVTKFGISSVYLGFAGVCVLAVLYIAGNVVETKGRSLEEIELALTSGA

SEQ ID NO: 44094 - protein, 493 aa, Arabidopsis thaliana
  peptide (1)..(493): Ceres Seq. ID no. 12462193
  misc_feature (55)..(489): Pfam Name: Sugar (and other) transporter Pfam Description: Sugar (and other) transporter
  misc_feature (24)..(490): Homolog of NCBI NO: 8347246 NR Description: hexose transporter [Solanum tuberosum]
  misc_feature (1)..(490): Homolog of NCBI NO: 8347248 NR Description: hexose transporter [Zea mays]
  misc_feature (1)..(490): Homolog of NCBI NO: 8347244 NR Description: hexose transporter [Nicotiana tabacum]
  misc_feature (19)..(490): Homolog of NCBI NO: 2688830 NR Description: putative sugar transporter [Prunus armeniaca]
  misc_feature (1)..(490): Homolog of NCBI NO: 9858106 NR Description: putative glucose translocator [Mesembryanthemum
  misc_feature (1)..(490): Homolog of NCBI NO: 8347242 NR Description: hexose transporter [Spinacia oleracea]
  misc_feature (1)..(491): Homolog of NCBI NO: 15625046 NR Description: hexose transporter pGlT [Olea europaea]
  misc_feature (1)..(489): Homolog of NCBI NO: 8347250 NR Description: hexose transporter [Arabidopsis thaliana]
  misc_feature (1)..(493): Homolog of NCBI NO: 11278994 NR Description: sugar transporter-like protein - Arabidopsis
  misc_feature (1)..(493): Homolog of NCBI NO: 18417892 NR Description: sugar transporter-like protein
MGATLARADNGIQSVMSFSSVKARSVRAQASSDGDEEEAIPLRSEGKSSGTVLPFVGVACLGAILFGYHLGVVNGALEYLAKDLGIAENTVLQGWIVSSLLAGATVGSFTGGALADKFGRTRTFQLDAIPLAIGAFLCATAQSVQTMIVGRLLAGIGIGISSAIVPLYISEISPTEIRGALGSVNQLFICIGILAALIAGLPLAANPLWWRTMFGVAVIPSVLLAIGMAFSPESPRWLVQQGKVSEAEKAIKTLYGKERVVELVRDLSASGQGSSEPEAGWFDLFSSRYWKVVSVGAALFLFQQLAGINAVVYYSTSVFRSAGIQSDVAASALVGASNVFGTAVASSLMDKMGRKSLLLTSFGGMALSMLLLSLSFTWKALAAYSGTLAVVGTVLYVLSFSLGAGPVPALLLPEIFASRIRAKAVALSLGMHWISNFVIGLYFLSVVTKFGISSVYLGFAGVCVLAVLYIAGNVVETKGRSLEEIELALTSGA

SEQ ID NO: 44095 - protein, 478 aa, Arabidopsis thaliana; identical to SEQ ID NO: 30167
  peptide (1)..(478): Ceres Seq. ID no. 12462194
  misc_feature (40)..(474): Pfam Name: Sugar (and other) transporter Pfam Description: Sugar (and other) transporter
  misc_feature (9)..(475): Homolog of NCBI NO: 8347246 NR Description: hexose transporter [Solanum tuberosum]
  misc_feature (1)..(475): Homolog of NCBI NO: 8347248 NR Description: hexose transporter [Zea mays]
  misc_feature (1)..(475): Homolog of NCBI NO: 8347244 NR Description: hexose transporter [Nicotiana tabacum]
  misc_feature (4)..(475): Homolog of NCBI NO: 2688830 NR Description: putative sugar transporter [Prunus armeniaca]
  misc_feature (1)..(475): Homolog of NCBI NO: 9858106 NR Description: putative glucose translocator [Mesembryanthemum
  misc_feature (1)..(475): Homolog of NCBI NO: 8347242 NR Description: hexose transporter [Spinacia oleracea]
  misc_feature (1)..(476): Homolog of NCBI NO: 15625046 NR Description: hexose transporter pGlT [Olea europaea]
  misc_feature (1)..(474): Homolog of NCBI NO: 8347250 NR Description: hexose transporter [Arabidopsis thaliana]
  misc_feature (1)..(478): Homolog of NCBI NO: 11278994 NR Description: sugar transporter-like protein - Arabidopsis
  misc_feature (1)..(478): Homolog of NCBI NO: 18417892 NR Description: sugar transporter-like protein

SEQ ID NO: 44096 - DNA, 1884 bp, Arabidopsis thaliana
  misc_feature (1)..(1884): Ceres Seq. ID no. 12489261
  misc_feature: MA Experiment ID: 20000307 Result: Down-regulated in Transcription
  misc_feature: MA Experiment 20000307 PARAMETER Experiment Name: At_Germinating_Seeds_Sub_P Parameter: Age (hr) Value: 24 vs. 0
  misc_feature: MA Experiment 20000307 PARAMETER Experiment Name: At_Germinating_Seeds_Sub_P Parameter: Organism Value: A. thaliana
  misc_feature: MA Experiment 20000307 PARAMETER Experiment Name: At_Germinating_Seeds_Sub_P Parameter: Plant Line Value: WS
  misc_feature: MA Experiment 20000307 PARAMETER Experiment Name: At_Germinating_Seeds_Sub_P Parameter: Tissue Value: Germinating Seeds
  misc_feature: MA Experiment ID: 20000314 Result: Up-regulated in Transcription
  misc_feature: MA Experiment 20000314 PARAMETER Experiment Name: At_14day_Shoots-Roots_Sub_P Parameter: Age (day) Value: 14
  misc_feature: MA Experiment 20000314 PARAMETER Experiment Name: At_14day_Shoots-Roots_Sub_P Parameter: Organism Value: A. thaliana
  misc_feature: MA Experiment 20000314 PARAMETER Experiment Name: At_14day_Shoots-Roots_Sub_P Parameter: Plant Line Value: WS
  misc_feature: MA Experiment 20000314 PARAMETER Experiment Name: At_14day_Shoots-Roots_Sub_P Parameter: Tissue Value: Roots vs. Whole Plant
  misc_feature: MA Experiment ID: 20000328 Result: Up-regulated in Transcription
  misc_feature: MA Experiment 20000328 PARAMETER Experiment Name: At_42deg_Heat_Sub_P Parameter: Age (day) Value: 14
  misc_feature: MA Experiment 20000328 PARAMETER Experiment Name: At_42deg_Heat_Sub_P Parameter: Organism Value: A. thaliana
  misc_feature: MA Experiment 20000328 PARAMETER Experiment Name: At_42deg_Heat_Sub_P Parameter: Plant Line Value: WS
  misc_feature: MA Experiment 20000328 PARAMETER Experiment Name: At_42deg_Heat_Sub_P Parameter: Temperature (deg C) Value: 42 vs. 22
  misc_feature: MA Experiment 20000328 PARAMETER Experiment Name: At_42deg_Heat_Sub_P Parameter: Timepoint (hr) Value: 6
  misc_feature: MA Experiment 20000328 PARAMETER Experiment Name: At_42deg_Heat_Sub_P Parameter: Tissue Value: Aerial
  misc_feature: MA Experiment ID: 20000355 Result: Up-regulated in Transcription
  misc_feature: MA Experiment 20000355 PARAMETER Experiment Name: At_Siliques_Sub_P Parameter: Age (day) Value: 21
  misc_feature: MA Experiment 20000355 PARAMETER Experiment Name: At_Siliques_Sub_P Parameter: Organism Value: A. thaliana
  misc_feature: MA Experiment 20000355 PARAMETER Experiment Name: At_Siliques_Sub_P Parameter: Plant Line Value: WS
  misc_feature: MA Experiment 20000355 PARAMETER Experiment Name: At_Siliques_Sub_P Parameter: Tissue Value: Less Than 5mm Siliques vs. Whole Plant
ctcgcttttttccccatttcaacttttttttttcctctccagtgcactaggaaacaaaaaaaacccaagatctatagttcgatcggatcgagagaagctcgaaaatggcgctggcgttcgatgagttcgggcgtccgttcattatactgagagagcaagatcaaaagactcgtcttagaggaatcgatgctcagaaagccaatatcgccgctggtaaagccgtggctcggatccttcgatcctctcttggacccaaaggaatggataagatgcttcaaggacctgacggagacatcaccatcacaaacgatggtgctacgatattggagcaaatggatgttgacaaccagattgcgaaactaatggtggaactgtcgcggagtcaggattatgaaattggtgatggaacaacaggtgttgttgttatggctggtgcacttcttgagcaagctgaacgtcagttagatagaggaattcatcccattcgtattgctgaaggatatgagatggcttctagggtggctgttgagcatttggagcgtattgcccaaaagtttgaattcgatgttaataattatgagcctctggttcagacttgcatgactactctgtcctcgaagattgtgaatcgatgcaagcgcagcttagctgagattgctgttaaagcggttcttgctgttgctgatttagagaggagggatgttaacttagatctgatcaaagtagaggggaaagttgggggaaagttggaggacactgagcttatttatggaatactgattgacaaagatatgagtcatccgcaaatgccaaagcagattgaagatgcccacattgccattttgacttgtccctttgagccaccgaagccgaagactaagcataaggtggacattgatacagtggaaaagtttgagacattgcgcaagcaagagcagcaatatttcgatgagatggtacaaaagtgcaaggatgttggtgctacgctggttatttgccaatggggattcgatgatgaggcaaaccatctattgatgcacaggaatttgcctgctgtcagatgggtagggggtgttgaattagaacttatcgcaatagccacaggcggtagaattgttccaagattccaggagttgaccccagagaagttagggaaggctggcgtggttcgtgagaaatcttttggcacaacaaaagaacgaatgctgtatattgagcactgtgcgaactcaaaagctgtcactgttttcatccgtggaggtaacaaaatgatgatagaagagacgaaacgtagtatccacgatgctctgtgtgtggctaggaatctcatccgcaacaaatcaattgtttatggaggtggggcagctgaaatcgcttgctcacttgcggttgatgcagctgctgataaataccctggcgtggagcagtatgcaattagggcgtttgcagaagctttggactctgtccctatggctcttgcagagaacagtggattacagcccattgagacactctctgcggttaaatctcagcaaattaaggagaatattcccttctatggaatagattgcaatgacgtgggaacaaacgatatgagggagcaaaatgtgtttgaaacattgatcgggaaacagcaacaaattttgctagctacgcaagtcgttaagatgattctaaagatcgacgatgtcatctccaattctgaatactgatttgttgctacctttgtcctaacctttggcttcttcggtgttttttgtttgctttctattagcttttgatacccttcgacatcgttatccttgacttgttccctttgttttgcaaccttctatttaagaacatcgtcagatcttaatttttgtgtgtacttgtccacagatc

SEQ ID NO: 44097 - protein, 535 aa, Arabidopsis thaliana
  peptide (1)..(535): Ceres Seq. ID no. 12489262
  misc_feature (40)..(534): Pfam Name: TCP-1/cpn60 chaperonin family Pfam Description: TCP-1/cpn60 chaperonin family
  misc_feature (3)..(529): Homolog of NCBI NO: 6683670 NR Description: CCT (chaperonin containing T-complex polypeptide
  misc_feature (3)..(529): Homolog of NCBI NO: 12804225 NR Description: Unknown (protein for IMAGE:3543711) [Homo sapiens]
  misc_feature (1)..(529): Homolog of NCBI NO: 24307939 NR Description: chaperonin containing TCP1, subunit 5 (epsilon)
  misc_feature (1)..(529): Homolog of NCBI NO: 603955 NR Description: KIAA0098 protein [Homo sapiens]
  misc_feature (115)..(535): Homolog of NCBI NO: 4206124 NR Description: T-complex protein 1 epsilon subunit
  misc_feature (3)..(529): Homolog of NCBI NO: 27924333 NR Description: Similar to chaperonin containing TCP1, subunit 5
  misc_feature (1)..(535): Homolog of NCBI NO: 730919 NR Description: T-COMPLEX PROTEIN 1, EPSILON SUBUNIT
  misc_feature (1)..(535): Homolog of NCBI NO: 1729864 NR Description: T-COMPLEX PROTEIN 1, EPSILON SUBUNIT
  misc_feature (1)..(535): Homolog of NCBI NO: 1587206 NR Description: T complex protein
  misc_feature (1)..(535): Homolog of NCBI NO: 15221770 NR Description: T-complex chaperonin protein , epsilon subunit
MALAFDEFGRPFIILREQDQKTRLRGIDAQKANIAAGKAVARILRSSLGPKGMDKMLQGPDGDITITNDGATILEQMDVDNQIAKLMVELSRSQDYEIGDGTTGVVVMAGALLEQAERQLDRGIHPIRIAEGYEMASRVAVEHLERIAQKFEFDVNNYEPLVQTCMTTLSSKIVNRCKRSLAEIAVKAVLAVADLERRDVNLDLIKVEGKVGGKLEDTELIYGILIDKDMSHPQMPKQIEDAHIAILTCPFEPPKPKTKHKVDIDTVEKFETLRKQEQQYFDEMVQKCKDVGATLVICQWGFDDEANHLLMHRNLPAVRWVGGVELELIAIATGGRIVPRFQELTPEKLGKAGVVREKSFGTTKERMLYIEHCANSKAVTVFIRGGNKMMIEETKRSIHDALCVARNLIRNKSIVYGGGAAEIACSLAVDAAADKYPGVEQYAIRAFAEALDSVPMALAENSGLQPIETLSAVKSQQIKENIPFYGIDCNDVGTNDMREQNVFETLIGKQQQILLATQVVKMILKIDDVISNSEY

SEQ ID NO: 44098 - protein, 483 aa, Arabidopsis thaliana
  peptide (1)..(483): Ceres Seq. ID no. 12489263
  misc_feature (1)..(482): Pfam Name: TCP-1/cpn60 chaperonin family Pfam Description: TCP-1/cpn60 chaperonin family
  misc_feature (1)..(477): Homolog of NCBI NO: 6683670 NR Description: CCT (chaperonin containing T-complex polypeptide
  misc_feature (1)..(477): Homolog of NCBI NO: 12804225 NR Description: Unknown (protein for IMAGE:3543711) [Homo sapiens]
  misc_feature (1)..(477): Homolog of NCBI NO: 24307939 NR Description: chaperonin containing TCP1, subunit 5 (epsilon)
  misc_feature (1)..(477): Homolog of NCBI NO: 603955 NR Description: KIAA0098 protein [Homo sapiens]
  misc_feature (63)..(483): Homolog of NCBI NO: 4206124 NR Description: T-complex protein 1 epsilon subunit
  misc_feature (1)..(477): Homolog of NCBI NO: 27924333 NR Description: Similar to chaperonin containing TCP1, subunit 5
  misc_feature (1)..(483): Homolog of NCBI NO: 730919 NR Description: T-COMPLEX PROTEIN 1, EPSILON SUBUNIT
  misc_feature (1)..(483): Homolog of NCBI NO: 1729864 NR Description: T-COMPLEX PROTEIN 1, EPSILON SUBUNIT
  misc_feature (1)..(483): Homolog of NCBI NO: 1587206 NR Description: T complex protein
  misc_feature (1)..(483): Homolog of NCBI NO: 15221770 NR Description: T-complex chaperonin protein , epsilon subunit
MDKMLQGPDGDITITNDGATILEQMDVDNQIAKLMVELSRSQDYEIGDGTTGVVVMAGALLEQAERQLDRGIHPIRIAEGYEMASRVAVEHLERIAQKFEFDVNNYEPLVQTCMTTLSSKIVNRCKRSLAEIAVKAVLAVADLERRDVNLDLIKVEGKVGGKLEDTELIYGILIDKDMSHPQMPKQIEDAHIAILTCPFEPPKPKTKHKVDIDTVEKFETLRKQEQQYFDEMVQKCKDVGATLVICQWGFDDEANHLLMHRNLPAVRWVGGVELELIAIATGGRIVPRFQELTPEKLGKAGVVREKSFGTTKERMLYIEHCANSKAVTVFIRGGNKMMIEETKRSIHDALCVARNLIRNKSIVYGGGAAEIACSLAVDAAADKYPGVEQYAIRAFAEALDSVPMALAENSGLQPIETLSAVKSQQIKENIPFYGIDCNDVGTNDMREQNVFETLIGKQQQILLATQVVKMILKIDDVISNSEY

SEQ ID NO: 44099 - protein, 480 aa, Arabidopsis thaliana
  peptide (1)..(480): Ceres Seq. ID no. 12489264
  misc_feature (1)..(479): Pfam Name: TCP-1/cpn60 chaperonin family Pfam Description: TCP-1/cpn60 chaperonin family
  misc_feature (1)..(474): Homolog of NCBI NO: 6683670 NR Description: CCT (chaperonin containing T-complex polypeptide
  misc_feature (1)..(474): Homolog of NCBI NO: 12804225 NR Description: Unknown (protein for IMAGE:3543711) [Homo sapiens]
  misc_feature (1)..(474): Homolog of NCBI NO: 24307939 NR Description: chaperonin containing TCP1, subunit 5 (epsilon)
  misc_feature (1)..(474): Homolog of NCBI NO: 603955 NR Description: KIAA0098 protein [Homo sapiens]
  misc_feature (60)..(480): Homolog of NCBI NO: 4206124 NR Description: T-complex protein 1 epsilon subunit
  misc_feature (1)..(474): Homolog of NCBI NO: 27924333 NR Description: Similar to chaperonin containing TCP1, subunit 5
  misc_feature (1)..(480): Homolog of NCBI NO: 730919 NR Description: T-COMPLEX PROTEIN 1, EPSILON SUBUNIT
  misc_feature (1)..(480): Homolog of NCBI NO: 1729864 NR Description: T-COMPLEX PROTEIN 1, EPSILON SUBUNIT
  misc_feature (1)..(480): Homolog of NCBI NO: 1587206 NR Description: T complex protein
  misc_feature (1)..(480): Homolog of NCBI NO: 15221770 NR Description: T-complex chaperonin protein , epsilon subunit
MLQGPDGDITITNDGATILEQMDVDNQIAKLMVELSRSQDYEIGDGTTGVVVMAGALLEQAERQLDRGIHPIRIAEGYEMASRVAVEHLERIAQKFEFDVNNYEPLVQTCMTTLSSKIVNRCKRSLAEIAVKAVLAVADLERRDVNLDLIKVEGKVGGKLEDTELIYGILIDKDMSHPQMPKQIEDAHIAILTCPFEPPKPKTKHKVDIDTVEKFETLRKQEQQYFDEMVQKCKDVGATLVICQWGFDDEANHLLMHRNLPAVRWVGGVELELIAIATGGRIVPRFQELTPEKLGKAGVVREKSFGTTKERMLYIEHCANSKAVTVFIRGGNKMMIEETKRSIHDALCVARNLIRNKSIVYGGGAAEIACSLAVDAAADKYPGVEQYAIRAFAEALDSVPMALAENSGLQPIETLSAVKSQQIKENIPFYGIDCNDVGTNDMREQNVFETLIGKQQQILLATQVVKMILKIDDVISNSEY

SEQ ID NO: 44100 - DNA, 1135 bp, Arabidopsis thaliana
  misc_feature (1)..(1135): Ceres Seq. ID no. 12489247
  misc_feature: MA Experiment ID: 20000166 Result: Up-regulated in Transcription
  misc_feature: MA Experiment 20000166 PARAMETER Experiment Name: At_100uM_ABA_P Parameter: Age (day) Value: 14
  misc_feature: MA Experiment 20000166 PARAMETER Experiment Name: At_100uM_ABA_P Parameter: Organism Value: A. thaliana
  misc_feature: MA Experiment 20000166 PARAMETER Experiment Name: At_100uM_ABA_P Parameter: Plant Line Value: WS
  misc_feature: MA Experiment 20000166 PARAMETER Experiment Name: At_100uM_ABA_P Parameter: Timepoint (hr) Value: 1
  misc_feature: MA Experiment 20000166 PARAMETER Experiment Name: At_100uM_ABA_P Parameter: Tissue Value: Aerial
  misc_feature: MA Experiment 20000166 PARAMETER Experiment Name: At_100uM_ABA_P Parameter: Treatment Value: 100uM ABA vs. No Treatment
  misc_feature: MA Experiment ID: 20000173 Result: Up-regulated in Transcription
  misc_feature: MA Experiment 20000173 PARAMETER Experiment Name: At_42deg_Heat_P Parameter: Age (day) Value: 14
  misc_feature: MA Experiment 20000173 PARAMETER Experiment Name: At_42deg_Heat_P Parameter: Organism Value: A. thaliana
  misc_feature: MA Experiment 20000173 PARAMETER Experiment Name: At_42deg_Heat_P Parameter: Plant Line Value: WS
  misc_feature: MA Experiment 20000173 PARAMETER Experiment Name: At_42deg_Heat_P Parameter: Temperature (deg C) Value: 42 vs. 22
  misc_feature: MA Experiment 20000173 PARAMETER Experiment Name: At_42deg_Heat_P Parameter: Timepoint (hr) Value: 6
  misc_feature: MA Experiment 20000173 PARAMETER Experiment Name: At_42deg_Heat_P Parameter: Tissue Value: Aerial
  misc_feature: MA Experiment ID: 20000180 Result: Down-regulated in Transcription
  misc_feature: MA Experiment 20000180 PARAMETER Experiment Name: At_Germinating_Seeds_P Parameter: Age (hr) Value: 24 vs. 0
  misc_feature: MA Experiment 20000180 PARAMETER Experiment Name: At_Germinating_Seeds_P Parameter: Tissue Value: Germinating Seeds
  misc_feature: MA Experiment ID: 20000184 Result: Down-regulated in Transcription
  misc_feature: MA Experiment 20000184 PARAMETER Experiment Name: At_Shoots__P Parameter: Age (day) Value: 7
  misc_feature: MA Experiment 20000184 PARAMETER Experiment Name: At_Shoots__P Parameter: Tissue Value: Shoots vs. Whole Plant
  misc_feature: MA Experiment ID: 20000185 Result: Down-regulated in Transcription
  misc_feature: MA Experiment 20000185 PARAMETER Experiment Name: At_Roots__P Parameter: Age (day) Value: 7 vs. 21
  misc_feature: MA Experiment 20000185 PARAMETER Experiment Name: At_Roots__P Parameter: Organism Value: A. thaliana
  misc_feature: MA Experiment 20000185 PARAMETER Experiment Name: At_Roots__P Parameter: Tissue Value: Roots vs. Whole Plant
  misc_feature: MA Experiment ID: 20000227 Result: Up-regulated in Transcription
  misc_feature: MA Experiment 20000227 PARAMETER Experiment Name: At_Root-Tips-vs-Tops_P Parameter: Tissue Value: Root Tips vs. Root Tops
  misc_feature: MA Experiment ID: 20000234 Result: Down-regulated in Transcription
  misc_feature: MA Experiment 20000234 PARAMETER Experiment Name: At_Siliques_P Parameter: Age (day) Value: 21
  misc_feature: MA Experiment 20000234 PARAMETER Experiment Name: At_Siliques_P Parameter: Organism Value: A. thaliana
  misc_feature: MA Experiment 20000234 PARAMETER Experiment Name: At_Siliques_P Parameter: Plant Line Value: WS
  misc_feature: MA Experiment 20000234 PARAMETER Experiment Name: At_Siliques_P Parameter: Tissue Value: Less Than 5mm Siliques vs. Whole Plant
  misc_feature: MA Experiment ID: 20000265 Result: Down-regulated in Transcription
  misc_feature: MA Experiment 20000265 PARAMETER Experiment Name: At_Open_Flower_P Parameter: Age (day) Value: 21
  misc_feature: MA Experiment 20000265 PARAMETER Experiment Name: At_Open_Flower_P Parameter: Plant Line Value: WS
  misc_feature: MA Experiment 20000265 PARAMETER Experiment Name: At_Open_Flower_P Parameter: Tissue Value: Closed Flower vs. Whole Plant
  misc_feature: MA Experiment ID: 20000268 Result: Down-regulated in Transcription
  misc_feature: MA Experiment 20000268 PARAMETER Experiment Name: At_100mM_NaCl__P Parameter: Age (day) Value: 14
  misc_feature: MA Experiment 20000268 PARAMETER Experiment Name: At_100mM_NaCl__P Parameter: Organism Value: A. thaliana
  misc_feature: MA Experiment 20000268 PARAMETER Experiment Name: At_100mM_NaCl__P Parameter: Plant Line Value: WS
  misc_feature: MA Experiment 20000268 PARAMETER Experiment Name: At_100mM_NaCl__P Parameter: Timepoint (hr) Value: 6
  misc_feature: MA Experiment 20000268 PARAMETER Experiment Name: At_100mM_NaCl__P Parameter: Tissue Value: Whole Plant
  misc_feature: MA Experiment 20000268 PARAMETER Experiment Name: At_100mM_NaCl__P Parameter: Treatment Value: 100mM NaCl vs. No Treatment
  misc_feature: MA Experiment ID: 20000286 Result: Down-regulated in Transcription
  misc_feature: MA Experiment 20000286 PARAMETER Experiment Name: At_Open_Flower_P Parameter: Age (day) Value: 21
  misc_feature: MA Experiment 20000286 PARAMETER Experiment Name: At_Open_Flower_P Parameter: Plant Line Value: WS
  misc_feature: MA Experiment 20000286 PARAMETER Experiment Name: At_Open_Flower_P Parameter: Tissue Value: Half Open vs. Whole Plant
  misc_feature: MA Experiment ID: 20000288 Result: Down-regulated in Transcription
  misc_feature: MA Experiment 20000288 PARAMETER Experiment Name: At_Drought_P Parameter: Age (day) Value: 7
  misc_feature: MA Experiment 20000288 PARAMETER Experiment Name: At_Drought_P Parameter: Organism Value: A. thaliana
  misc_feature: MA Experiment 20000288 PARAMETER Experiment Name: At_Drought_P Parameter: Plant Line Value: WS
  misc_feature: MA Experiment 20000288 PARAMETER Experiment Name: At_Drought_P Parameter: Timepoint (hr) Value: 1
  misc_feature: MA Experiment 20000288 PARAMETER Experiment Name: At_Drought_P Parameter: Tissue Value: Whole Plant
  misc_feature: MA Experiment 20000288 PARAMETER Experiment Name: At_Drought_P Parameter: Treatment Value: Drought vs. No Drought
  misc_feature: MA Experiment ID: 20000308 Result: Down-regulated in Transcription
  misc_feature: MA Experiment 20000308 PARAMETER Experiment Name: At_100mM_NaCl__P Parameter: Age (day) Value: 17
  misc_feature: MA Experiment 20000308 PARAMETER Experiment Name: At_100mM_NaCl__P Parameter: Organism Value: A. thaliana
  misc_feature: MA Experiment 20000308 PARAMETER Experiment Name: At_100mM_NaCl__P Parameter: Plant Line Value: WS
  misc_feature: MA Experiment 20000308 PARAMETER Experiment Name: At_100mM_NaCl__P Parameter: Timepoint (hr) Value: 72
  misc_feature: MA Experiment 20000308 PARAMETER Experiment Name: At_100mM_NaCl__P Parameter: Tissue Value: Whole Plant
  misc_feature: MA Experiment 20000308 PARAMETER Experiment Name: At_100mM_NaCl__P Parameter: Treatment Value: 100mM NaCl vs. No Treatment
  misc_feature: MA Experiment ID: 20000437 Result: Down-regulated in Transcription
  misc_feature: MA Experiment 20000437 PARAMETER Experiment Name: At_Drought_P Parameter: Age (day) Value: 8
  misc_feature: MA Experiment 20000437 PARAMETER Experiment Name: At_Drought_P Parameter: Organism Value: A. thaliana
  misc_feature: MA Experiment 20000437 PARAMETER Experiment Name: At_Drought_P Parameter: Plant Line Value: WS
  misc_feature: MA Experiment 20000437 PARAMETER Experiment Name: At_Drought_P Parameter: Timepoint (hr) Value: 24
  misc_feature: MA Experiment 20000437 PARAMETER Experiment Name: At_Drought_P Parameter: Tissue Value: Whole Plant
  misc_feature: MA Experiment 20000437 PARAMETER Experiment Name: At_Drought_P Parameter: Treatment Value: Drought vs. No Drought
  misc_feature: MA Experiment ID: 20000438 Result: Down-regulated in Transcription
  misc_feature: MA Experiment 20000438 PARAMETER Experiment Name: At_Shoots__P Parameter: Age (day) Value: 14
  misc_feature: MA Experiment 20000438 PARAMETER Experiment Name: At_Shoots__P Parameter: Tissue Value: Shoots vs. Whole Plant
  misc_feature: MA Experiment ID: 20000439 Result: Down-regulated in Transcription
  misc_feature: MA Experiment 20000439 PARAMETER Experiment Name: At_Roots__P Parameter: Age (day) Value: 14 vs. 21
  misc_feature: MA Experiment 20000439 PARAMETER Experiment Name: At_Roots__P Parameter: Organism Value: A. thaliana
  misc_feature: MA Experiment 20000439 PARAMETER Experiment Name: At_Roots__P Parameter: Tissue Value: Roots vs. Whole Plant
  misc_feature: MA Experiment ID: 20000441 Result: Up-regulated in Transcription
  misc_feature: MA Experiment 20000441 PARAMETER Experiment Name: At_1uM_BR-BRZ__P Parameter: Tissue Value: Shoot Apices
  misc_feature: MA Experiment 20000441 PARAMETER Experiment Name: At_1uM_BR-BRZ__P Parameter: Treatment Value: 1uM BR vs. No Treatment
  misc_feature: MA Experiment ID: 20000460 Result: Up-regulated in Transcription
  misc_feature: MA Experiment 20000460 PARAMETER Experiment Name: At_10percent_PEG_P Parameter: Age (day) Value: 12
  misc_feature: MA Experiment 20000460 PARAMETER Experiment Name: At_10percent_PEG_P Parameter: Organism Value: A. thaliana
  misc_feature: MA Experiment 20000460 PARAMETER Experiment Name: At_10percent_PEG_P Parameter: Plant Line Value: WS
  misc_feature: MA Experiment 20000460 PARAMETER Experiment Name: At_10percent_PEG_P Parameter: Timepoint (day) Value: 12
  misc_feature: MA Experiment 20000460 PARAMETER Experiment Name: At_10percent_PEG_P Parameter: Tissue Value: Whole Plant
  misc_feature: MA Experiment 20000460 PARAMETER Experiment Name: At_10percent_PEG_P Parameter: Treatment Value: 10percent PEG vs. No Treatment
  misc_feature: MA Experiment ID: 20000527 Result: Up-regulated in Transcription
  misc_feature: MA Experiment 20000527 PARAMETER Experiment Name: At_10percent_PEG_P Parameter: Age (day) Value: 20
  misc_feature: MA Experiment 20000527 PARAMETER Experiment Name: At_10percent_PEG_P Parameter: Organism Value: A. thaliana
  misc_feature: MA Experiment 20000527 PARAMETER Experiment Name: At_10percent_PEG_P Parameter: Plant Line Value: WS
  misc_feature: MA Experiment 20000527 PARAMETER Experiment Name: At_10percent_PEG_P Parameter: Timepoint (day) Value: 20
  misc_feature: MA Experiment 20000527 PARAMETER Experiment Name: At_10percent_PEG_P Parameter: Tissue Value: Whole Plant
  misc_feature: MA Experiment 20000527 PARAMETER Experiment Name: At_10percent_PEG_P Parameter: Treatment Value: 10percent PEG vs. No Treatment
  misc_feature: MA Experiment ID: 20000573 Result: Down-regulated in Transcription
  misc_feature: MA Experiment 20000573 PARAMETER Experiment Name: At_100uM_ABA_Mutants__P Parameter: Organism Value: A. thaliana
  misc_feature: MA Experiment 20000573 PARAMETER Experiment Name: At_100uM_ABA_Mutants__P Parameter: Plant Line Value: CS22 vs. Ler wt
  misc_feature: MA Experiment 20000573 PARAMETER Experiment Name: At_100uM_ABA_Mutants__P Parameter: Timepoint (hr) Value: N/A
  misc_feature: MA Experiment 20000573 PARAMETER Experiment Name: At_100uM_ABA_Mutants__P Parameter: Tissue Value: Whole Plant
  misc_feature: MA Experiment 20000573 PARAMETER Experiment Name: At_100uM_ABA_Mutants__P Parameter: Treatment Value: None
  misc_feature: MA Experiment ID: 20000574 Result: Down-regulated in Transcription
  misc_feature: MA Experiment 20000574 PARAMETER Experiment Name: At_100uM_ABA_Mutants__P Parameter: Organism Value: A. thaliana
  misc_feature: MA Experiment 20000574 PARAMETER Experiment Name: At_100uM_ABA_Mutants__P Parameter: Plant Line Value: CS23 vs. Ler wt
  misc_feature: MA Experiment 20000574 PARAMETER Experiment Name: At_100uM_ABA_Mutants__P Parameter: Timepoint (hr) Value: N/A
  misc_feature: MA Experiment 20000574 PARAMETER Experiment Name: At_100uM_ABA_Mutants__P Parameter: Tissue Value: Whole Plant
  misc_feature: MA Experiment 20000574 PARAMETER Experiment Name: At_100uM_ABA_Mutants__P Parameter: Treatment Value: None
  misc_feature: MA Experiment ID: 20001247 Result: Up-regulated in Transcription
  misc_feature: MA Experiment 20001247 PARAMETER Experiment Name: At_Far-red-induction_P Parameter: Age (day) Value: 7
  misc_feature: MA Experiment 20001247 PARAMETER Experiment Name: At_Far-red-induction_P Parameter: Light Value: Far-red vs. White
  misc_feature: MA Experiment 20001247 PARAMETER Experiment Name: At_Far-red-induction_P Parameter: Organism Value: A. thaliana
  misc_feature: MA Experiment 20001247 PARAMETER Experiment Name: At_Far-red-induction_P Parameter: Plant Line Value: Columbia
  misc_feature: MA Experiment 20001247 PARAMETER Experiment Name: At_Far-red-induction_P Parameter: Timepoint (hr) Value: 1
  misc_feature: MA Experiment 20001247 PARAMETER Experiment Name: At_Far-red-induction_P Parameter: Tissue Value: Whole Plant
  misc_feature: MA Experiment ID: 20001248 Result: Down-regulated in Transcription
  misc_feature: MA Experiment 20001248 PARAMETER Experiment Name: At_Far-red-induction_P Parameter: Age (day) Value: 7
  misc_feature: MA Experiment 20001248 PARAMETER Experiment Name: At_Far-red-induction_P Parameter: Light Value: Far-red vs. White
  misc_feature: MA Experiment 20001248 PARAMETER Experiment Name: At_Far-red-induction_P Parameter: Organism Value: A. thaliana
  misc_feature: MA Experiment 20001248 PARAMETER Experiment Name: At_Far-red-induction_P Parameter: Plant Line Value: Columbia
  misc_feature: MA Experiment 20001248 PARAMETER Experiment Name: At_Far-red-induction_P Parameter: Timepoint (hr) Value: 4
  misc_feature: MA Experiment 20001248 PARAMETER Experiment Name: At_Far-red-induction_P Parameter: Tissue Value: Whole Plant
  misc_feature: MA Experiment ID: 20001451 Result: Up-regulated in Transcription
  misc_feature: MA Experiment 20001451 PARAMETER Experiment Name: At_Far-red-induction_P Parameter: Age (day) Value: 7
  misc_feature: MA Experiment 20001451 PARAMETER Experiment Name: At_Far-red-induction_P Parameter: Light Value: Far-red vs. White
  misc_feature: MA Experiment 20001451 PARAMETER Experiment Name: At_Far-red-induction_P Parameter: Organism Value: A. thaliana
  misc_feature: MA Experiment 20001451 PARAMETER Experiment Name: At_Far-red-induction_P Parameter: Plant Line Value: Columbia
  misc_feature: MA Experiment 20001451 PARAMETER Experiment Name: At_Far-red-induction_P Parameter: Timepoint (hr) Value: 24
  misc_feature: MA Experiment 20001451 PARAMETER Experiment Name: At_Far-red-induction_P Parameter: Tissue Value: Whole Plant
  misc_feature: MA Experiment ID: 20001555 Result: Down-regulated in Transcription
  misc_feature: MA Experiment 20001555 PARAMETER Experiment Name: At_Drought_Soil_Dry_P Parameter: Age (day) Value: 24
  misc_feature: MA Experiment 20001555 PARAMETER Experiment Name: At_Drought_Soil_Dry_P Parameter: Organism Value: A. thaliana
  misc_feature: MA Experiment 20001555 PARAMETER Experiment Name: At_Drought_Soil_Dry_P Parameter: Plant Line Value: WS
  misc_feature: MA Experiment 20001555 PARAMETER Experiment Name: At_Drought_Soil_Dry_P Parameter: Post Timepoint (hr) Value: None
  misc_feature: MA Experiment 20001555 PARAMETER Experiment Name: At_Drought_Soil_Dry_P Parameter: Post-Treatment Value: None
  misc_feature: MA Experiment 20001555 PARAMETER Experiment Name: At_Drought_Soil_Dry_P Parameter: Timepoint (day) Value: 10
  misc_feature: MA Experiment 20001555 PARAMETER Experiment Name: At_Drought_Soil_Dry_P Parameter: Treatment Value: Drought vs. No Drought
  misc_feature: MA Experiment ID: 20001556 Result: Down-regulated in Transcription
  misc_feature: MA Experiment 20001556 PARAMETER Experiment Name: At_Drought_Soil_Dry_P Parameter: Age (day) Value: 26
  misc_feature: MA Experiment 20001556 PARAMETER Experiment Name: At_Drought_Soil_Dry_P Parameter: Organism Value: A. thaliana
  misc_feature: MA Experiment 20001556 PARAMETER Experiment Name: At_Drought_Soil_Dry_P Parameter: Plant Line Value: WS
  misc_feature: MA Experiment 20001556 PARAMETER Experiment Name: At_Drought_Soil_Dry_P Parameter: Post Timepoint (hr) Value: None
  misc_feature: MA Experiment 20001556 PARAMETER Experiment Name: At_Drought_Soil_Dry_P Parameter: Post-Treatment Value: None
  misc_feature: MA Experiment 20001556 PARAMETER Experiment Name: At_Drought_Soil_Dry_P Parameter: Timepoint (day) Value: 12
  misc_feature: MA Experiment 20001556 PARAMETER Experiment Name: At_Drought_Soil_Dry_P Parameter: Treatment Value: Drought vs. No Drought
  misc_feature: MA Experiment ID: 20001558 Result: Up-regulated in Transcription
  misc_feature: MA Experiment 20001558 PARAMETER Experiment Name: At_Drought_Soil_Dry_P Parameter: Age (day) Value: 27
  misc_feature: MA Experiment 20001558 PARAMETER Experiment Name: At_Drought_Soil_Dry_P Parameter: Organism Value: A. thaliana
  misc_feature: MA Experiment 20001558 PARAMETER Experiment Name: At_Drought_Soil_Dry_P Parameter: Plant Line Value: WS
  misc_feature: MA Experiment 20001558 PARAMETER Experiment Name: At_Drought_Soil_Dry_P Parameter: Post Timepoint (hr) Value: 6
  misc_feature: MA Experiment 20001558 PARAMETER Experiment Name: At_Drought_Soil_Dry_P Parameter: Post-Treatment Value: Re-Water vs. No Drought
  misc_feature: MA Experiment 20001558 PARAMETER Experiment Name: At_Drought_Soil_Dry_P Parameter: Timepoint (day) Value: 13
  misc_feature: MA Experiment 20001558 PARAMETER Experiment Name: At_Drought_Soil_Dry_P Parameter: Treatment Value: Drought vs. No Drought
  misc_feature: MA Experiment ID: 20001559 Result: Down-regulated in Transcription
  misc_feature: MA Experiment 20001559 PARAMETER Experiment Name: At_Drought_Soil_Dry_P Parameter: Age (day) Value: 28
  misc_feature: MA Experiment 20001559 PARAMETER Experiment Name: At_Drought_Soil_Dry_P Parameter: Organism Value: A. thaliana
  misc_feature: MA Experiment 20001559 PARAMETER Experiment Name: At_Drought_Soil_Dry_P Parameter: Plant Line Value: WS
  misc_feature: MA Experiment 20001559 PARAMETER Experiment Name: At_Drought_Soil_Dry_P Parameter: Post Timepoint (hr) Value: 29
  misc_feature: MA Experiment 20001559 PARAMETER Experiment Name: At_Drought_Soil_Dry_P Parameter: Post-Treatment Value: Re-Water vs. No Drought
  misc_feature: MA Experiment 20001559 PARAMETER Experiment Name: At_Drought_Soil_Dry_P Parameter: Timepoint (day) Value: 14
  misc_feature: MA Experiment 20001559 PARAMETER Experiment Name: At_Drought_Soil_Dry_P Parameter: Treatment Value: Drought vs. No Drought
  misc_feature: MA Experiment ID: 20001560 Result: Up-regulated in Transcription
  misc_feature: MA Experiment 20001560 PARAMETER Experiment Name: At_Drought_Soil_Dry_P Parameter: Age (day) Value: 28
  misc_feature: MA Experiment 20001560 PARAMETER Experiment Name: At_Drought_Soil_Dry_P Parameter: Organism Value: A. thaliana
  misc_feature: MA Experiment 20001560 PARAMETER Experiment Name: At_Drought_Soil_Dry_P Parameter: Plant Line Value: WS
  misc_feature: MA Experiment 20001560 PARAMETER Experiment Name: At_Drought_Soil_Dry_P Parameter: Post Timepoint (hr) Value: None
  misc_feature: MA Experiment 20001560 PARAMETER Experiment Name: At_Drought_Soil_Dry_P Parameter: Post-Treatment Value: None
  misc_feature: MA Experiment 20001560 PARAMETER Experiment Name: At_Drought_Soil_Dry_P Parameter: Timepoint (day) Value: 14
  misc_feature: MA Experiment 20001560 PARAMETER Experiment Name: At_Drought_Soil_Dry_P Parameter: Treatment Value: Drought vs. No Drought
  misc_feature: MA Experiment ID: 20001757 Result: Down-regulated in Transcription
  misc_feature: MA Experiment 20001757 PARAMETER Experiment Name: At_50mM_NH4NO3_L-to-H_P Parameter: Timepoint (hr) Value: 6
  misc_feature: MA Experiment 20001757 PARAMETER Experiment Name: At_50mM_NH4NO3_L-to-H_P Parameter: Tissue Value: Leaf
  misc_feature: MA Experiment 20001757 PARAMETER Experiment Name: At_50mM_NH4NO3_L-to-H_P Parameter: Treatment Value: 50mM NH4NO3 vs 100mM Mannitol
  misc_feature: MA Experiment ID: 20001774 Result: Down-regulated in Transcription
  misc_feature: MA Experiment 20001774 PARAMETER Experiment Name: At_Far-red-enriched-adult_P Parameter: Age (day) Value: 31
  misc_feature: MA Experiment 20001774 PARAMETER Experiment Name: At_Far-red-enriched-adult_P Parameter: Light Value: Far-red enriched vs. White
  misc_feature: MA Experiment 20001774 PARAMETER Experiment Name: At_Far-red-enriched-adult_P Parameter: Organism Value: A. thaliana
  misc_feature: MA Experiment 20001774 PARAMETER Experiment Name: At_Far-red-enriched-adult_P Parameter: Plant Line Value: Columbia
  misc_feature: MA Experiment 20001774 PARAMETER Experiment Name: At_Far-red-enriched-adult_P Parameter: Timepoint (hr) Value: 72
  misc_feature: MA Experiment 20001774 PARAMETER Experiment Name: At_Far-red-enriched-adult_P Parameter: Tissue Value: Aerial
accttcttcttcttcttcttcttctctacaacaaacaaacaaaagatctgtttcaatggcggatcgtgttaaaggtccatggagtcaagaagaagatgagcagctacgaaggatggttgagaaatacggaccgaggaattggtctgcgattagcaaatcgattccaggtcgatctggtaaatcgtgtagattacgttggtgtaatcagttatctccggaggttgagcatcgtcctttctcgccggaggaagatgagactattgtaaccgcccgtgctcagtttggtaacaagtgggcgacgattgctcgtcttcttaacggtcgtacggataacgccgttaaaaatcactggaactctacgcttaagaggaaatgcagcggaggtgtggcggttacgacggtgacggagacggaggaagatcaggatcggccgaagaagaggagatctgttagctttgattctgcttttgctccggtggatactggattgtacatgagtcctgagagtcctaacggaatcgatgttagtgattctagcacgattccgtcaccgtcgtctcctgttgctcagctgtttaaaccaatgccgatttccggcggttttacggtggttccgcagccgttaccggttgaaatgtcttcgtcttcggaggatccacctacttcgttgagtttgtcactacctggagctgagaacacgagttcgagccataacaataacaacaacgcgttgatgtttccgagatttgagagtcagatgaagattaatgtagaggagagaggagaaggacgtagaggtgagtttatgacggtggtgcaggagatgataaaagctgaagtgaggagttacatggcggaaatgcagaaaacaagtggtggattcgtcgtcggaggtttatacgaatccggcggcaatggtggttttagggattgtggagtaataacacctaaggttgagtagttttggtttagggttaaaacttgaatcgattggggattttcaagagcattcatttttggggtttatggtaaaattaaaaacaaaaacaaaatgtacagaggaattaaaatttctatggaataatcttaaatctcaaatatttgttacttgttttggtgattcataaccaaaatc

SEQ ID NO: 44101 - protein, 319 aa, Arabidopsis thaliana
  peptide (1)..(319): Ceres Seq. ID no. 12489248
  misc_feature (24)..(70): Pfam Name: Myb-like DNA-binding domain Pfam Description: Myb-like DNA-binding domain
  misc_feature (21)..(239): Homolog of NCBI NO: 9954112 NR Description: tuber-specific and sucrose-responsive element
  misc_feature (21)..(310): Homolog of NCBI NO: 21593586 NR Description: putative MYB family transcription factor
  misc_feature (21)..(307): Homolog of NCBI NO: 15235484 NR Description: myb DNA-binding protein (AtMYB73)
  misc_feature (19)..(303): Homolog of NCBI NO: 21592897 NR Description: myb-related protein, 33.3K [Arabidopsis thaliana]
  misc_feature (19)..(303): Homolog of NCBI NO: 2129648 NR Description: myb-related protein, 33.3K - Arabidopsis thaliana
  misc_feature (19)..(303): Homolog of NCBI NO: 15450393 NR Description: AT5g67300/K8K14_2 [Arabidopsis thaliana]
  misc_feature (19)..(303): Homolog of NCBI NO: 15240708 NR Description: myb family transcription factor
  misc_feature (19)..(319): Homolog of NCBI NO: 2129647 NR Description: myb-related protein, 33.2K - Arabidopsis thaliana
  misc_feature (19)..(319): Homolog of NCBI NO: 2832406 NR Description: R2R3-MYB transcription factor [Arabidopsis
  misc_feature (19)..(319): Homolog of NCBI NO: 15229664 NR Description: myb DNA-binding protein (MYB77)
PSSSSSSSLQQTNKRSVSMADRVKGPWSQEEDEQLRRMVEKYGPRNWSAISKSIPGRSGKSCRLRWCNQLSPEVEHRPFSPEEDETIVTARAQFGNKWATIARLLNGRTDNAVKNHWNSTLKRKCSGGVAVTTVTETEEDQDRPKKRRSVSFDSAFAPVDTGLYMSPESPNGIDVSDSSTIPSPSSPVAQLFKPMPISGGFTVVPQPLPVEMSSSSEDPPTSLSLSLPGAENTSSSHNNNNNALMFPRFESQMKINVEERGEGRRGEFMTVVQEMIKAEVRSYMAEMQKTSGGFVVGGLYESGGNGGFRDCGVITPKVE

SEQ ID NO: 44102 - protein, 301 aa, Arabidopsis thaliana
  peptide (1)..(301): Ceres Seq. ID no. 12489249
  misc_feature (6)..(52): Pfam Name: Myb-like DNA-binding domain Pfam Description: Myb-like DNA-binding domain
  misc_feature (3)..(221): Homolog of NCBI NO: 9954112 NR Description: tuber-specific and sucrose-responsive element
  misc_feature (3)..(292): Homolog of NCBI NO: 21593586 NR Description: putative MYB family transcription factor
  misc_feature (3)..(289): Homolog of NCBI NO: 15235484 NR Description: myb DNA-binding protein (AtMYB73)
  misc_feature (1)..(285): Homolog of NCBI NO: 21592897 NR Description: myb-related protein, 33.3K [Arabidopsis thaliana]
  misc_feature (1)..(285): Homolog of NCBI NO: 2129648 NR Description: myb-related protein, 33.3K - Arabidopsis thaliana
  misc_feature (1)..(285): Homolog of NCBI NO: 15450393 NR Description: AT5g67300/K8K14_2 [Arabidopsis thaliana]
  misc_feature (1)..(285): Homolog of NCBI NO: 15240708 NR Description: myb family transcription factor
  misc_feature (1)..(301): Homolog of NCBI NO: 2129647 NR Description: myb-related protein, 33.2K - Arabidopsis thaliana
  misc_feature (1)..(301): Homolog of NCBI NO: 2832406 NR Description: R2R3-MYB transcription factor [Arabidopsis
  misc_feature (1)..(301): Homolog of NCBI NO: 15229664 NR Description: myb DNA-binding protein (MYB77)
MADRVKGPWSQEEDEQLRRMVEKYGPRNWSAISKSIPGRSGKSCRLRWCNQLSPEVEHRPFSPEEDETIVTARAQFGNKWATIARLLNGRTDNAVKNHWNSTLKRKCSGGVAVTTVTETEEDQDRPKKRRSVSFDSAFAPVDTGLYMSPESPNGIDVSDSSTIPSPSSPVAQLFKPMPISGGFTVVPQPLPVEMSSSSEDPPTSLSLSLPGAENTSSSHNNNNNALMFPRFESQMKINVEERGEGRRGEFMTVVQEMIKAEVRSYMAEMQKTSGGFVVGGLYESGGNGGFRDCGVITPKVE

SEQ ID NO: 44103 - protein, 282 aa, Arabidopsis thaliana
  peptide (1)..(282): Ceres Seq. ID no. 12489250
  misc_feature (1)..(202): Homolog of NCBI NO: 9954112 NR Description: tuber-specific and sucrose-responsive element
  misc_feature (1)..(273): Homolog of NCBI NO: 21593586 NR Description: putative MYB family transcription factor
  misc_feature (1)..(270): Homolog of NCBI NO: 15235484 NR Description: myb DNA-binding protein (AtMYB73)
  misc_feature (1)..(266): Homolog of NCBI NO: 21592897 NR Description: myb-related protein, 33.3K [Arabidopsis thaliana]
  misc_feature (1)..(266): Homolog of NCBI NO: 2129648 NR Description: myb-related protein, 33.3K - Arabidopsis thaliana
  misc_feature (1)..(266): Homolog of NCBI NO: 15450393 NR Description: AT5g67300/K8K14_2 [Arabidopsis thaliana]
  misc_feature (1)..(266): Homolog of NCBI NO: 15240708 NR Description: myb family transcription factor
  misc_feature (1)..(282): Homolog of NCBI NO: 2129647 NR Description: myb-related protein, 33.2K - Arabidopsis thaliana
  misc_feature (1)..(282): Homolog of NCBI NO: 2832406 NR Description: R2R3-MYB transcription factor [Arabidopsis
  misc_feature (1)..(282): Homolog of NCBI NO: 15229664 NR Description: myb DNA-binding protein (MYB77)
MVEKYGPRNWSAISKSIPGRSGKSCRLRWCNQLSPEVEHRPFSPEEDETIVTARAQFGNKWATIARLLNGRTDNAVKNHWNSTLKRKCSGGVAVTTVTETEEDQDRPKKRRSVSFDSAFAPVDTGLYMSPESPNGIDVSDSSTIPSPSSPVAQLFKPMPISGGFTVVPQPLPVEMSSSSEDPPTSLSLSLPGAENTSSSHNNNNNALMFPRFESQMKINVEERGEGRRGEFMTVVQEMIKAEVRSYMAEMQKTSGGFVVGGLYESGGNGGFRDCGVITPKVE

SEQ ID NO: 44104 - DNA, 1710 bp, Arabidopsis thaliana
  misc_feature (1)..(1710): Ceres Seq. ID no. 12488449
  misc_feature: MA Experiment ID: 20000179 Result: Up-regulated in Transcription
  misc_feature: MA Experiment 20000179 PARAMETER Experiment Name: At_Germinating_Seeds_P Parameter: Age (hr) Value: 6 vs. 0
  misc_feature: MA Experiment 20000179 PARAMETER Experiment Name: At_Germinating_Seeds_P Parameter: Tissue Value: Germinating Seeds
  misc_feature: MA Experiment ID: 20000180 Result: Up-regulated in Transcription
  misc_feature: MA Experiment 20000180 PARAMETER Experiment Name: At_Germinating_Seeds_P Parameter: Age (hr) Value: 24 vs. 0
  misc_feature: MA Experiment 20000180 PARAMETER Experiment Name: At_Germinating_Seeds_P Parameter: Tissue Value: Germinating Seeds
  misc_feature: MA Experiment ID: 20000184 Result: Up-regulated in Transcription
  misc_feature: MA Experiment 20000184 PARAMETER Experiment Name: At_Shoots__P Parameter: Age (day) Value: 7
  misc_feature: MA Experiment 20000184 PARAMETER Experiment Name: At_Shoots__P Parameter: Tissue Value: Shoots vs. Whole Plant
  misc_feature: MA Experiment ID: 20000185 Result: Up-regulated in Transcription
  misc_feature: MA Experiment 20000185 PARAMETER Experiment Name: At_Roots__P Parameter: Age (day) Value: 7 vs. 21
  misc_feature: MA Experiment 20000185 PARAMETER Experiment Name: At_Roots__P Parameter: Organism Value: A. thaliana
  misc_feature: MA Experiment 20000185 PARAMETER Experiment Name: At_Roots__P Parameter: Tissue Value: Roots vs. Whole Plant
  misc_feature: MA Experiment ID: 20000214 Result: Down-regulated in Transcription
  misc_feature: MA Experiment 20000214 PARAMETER Experiment Name: At_4deg_Cold_P Parameter: Timepoint (hr) Value: 6
  misc_feature: MA Experiment ID: 20000234 Result: Up-regulated in Transcription
  misc_feature: MA Experiment 20000234 PARAMETER Experiment Name: At_Siliques_P Parameter: Age (day) Value: 21
  misc_feature: MA Experiment 20000234 PARAMETER Experiment Name: At_Siliques_P Parameter: Organism Value: A. thaliana
  misc_feature: MA Experiment 20000234 PARAMETER Experiment Name: At_Siliques_P Parameter: Plant Line Value: WS
  misc_feature: MA Experiment 20000234 PARAMETER Experiment Name: At_Siliques_P Parameter: Tissue Value: Less Than 5mm Siliques vs. Whole Plant
  misc_feature: MA Experiment ID: 20000265 Result: Up-regulated in Transcription
  misc_feature: MA Experiment 20000265 PARAMETER Experiment Name: At_Open_Flower_P Parameter: Age (day) Value: 21
  misc_feature: MA Experiment 20000265 PARAMETER Experiment Name: At_Open_Flower_P Parameter: Plant Line Value: WS
  misc_feature: MA Experiment 20000265 PARAMETER Experiment Name: At_Open_Flower_P Parameter: Tissue Value: Closed Flower vs. Whole Plant
  misc_feature: MA Experiment ID: 20000794 Result: Down-regulated in Transcription
  misc_feature: MA Experiment 20000794 PARAMETER Experiment Name: At_Petals_P Parameter: Age (day) Value: 23-25 days
  misc_feature: MA Experiment 20000794 PARAMETER Experiment Name: At_Petals_P Parameter: Plant Line Value: WS
  misc_feature: MA Experiment 20000794 PARAMETER Experiment Name: At_Petals_P Parameter: Tissue Value: Petals vs. Whole plant
  misc_feature: MA Experiment ID: 20001560 Result: Up-regulated in Transcription
  misc_feature: MA Experiment 20001560 PARAMETER Experiment Name: At_Drought_Soil_Dry_P Parameter: Age (day) Value: 28
  misc_feature: MA Experiment 20001560 PARAMETER Experiment Name: At_Drought_Soil_Dry_P Parameter: Organism Value: A. thaliana
  misc_feature: MA Experiment 20001560 PARAMETER Experiment Name: At_Drought_Soil_Dry_P Parameter: Plant Line Value: WS
  misc_feature: MA Experiment 20001560 PARAMETER Experiment Name: At_Drought_Soil_Dry_P Parameter: Post Timepoint (hr) Value: None
  misc_feature: MA Experiment 20001560 PARAMETER Experiment Name: At_Drought_Soil_Dry_P Parameter: Post-Treatment Value: None
  misc_feature: MA Experiment 20001560 PARAMETER Experiment Name: At_Drought_Soil_Dry_P Parameter: Timepoint (day) Value: 14
  misc_feature: MA Experiment 20001560 PARAMETER Experiment Name: At_Drought_Soil_Dry_P Parameter: Treatment Value: Drought vs. No Drought
  misc_feature: MA Experiment ID: 20001911 Result: Down-regulated in Transcription
  misc_feature: MA Experiment 20001911 PARAMETER Experiment Name: At_Drought_Reproduction_P Parameter: Age (day) Value: 40
  misc_feature: MA Experiment 20001911 PARAMETER Experiment Name: At_Drought_Reproduction_P Parameter: Organism Value: A. thaliana
  misc_feature: MA Experiment 20001911 PARAMETER Experiment Name: At_Drought_Reproduction_P Parameter: Plant Line Value: WS
  misc_feature: MA Experiment 20001911 PARAMETER Experiment Name: At_Drought_Reproduction_P Parameter: Timepoint (day) Value: 10
  misc_feature: MA Experiment 20001911 PARAMETER Experiment Name: At_Drought_Reproduction_P Parameter: Tissue Value: Flowers
  misc_feature: MA Experiment 20001911 PARAMETER Experiment Name: At_Drought_Reproduction_P Parameter: Treatment Value: Drought vs. No Drought
aacctcgtcttctccgtccacttcactctctctaaactctctctcagatctctctctctctgtgattcaacaatggcggtttcttcttcttcgtttctatcgacagcttcactaaccaattccaaatccaacatttcattcgcttcctcagtatccccatccctccgcagcgtcgttttccgctccacgactccggcgacttctcaccgtcgttcaatgacggtccgatctaagattcgtgaaattttcatgccggcgttatcatcaaccatgacggaaggcaaaatcgtgtcatggatcaaaacagaaggcgagaaactcgccaagggagagagtgttgtggttgttgaatctgataaagccgatatggatgtagaaacgttttacgatggttatcttgctgcgattgtcgtcggagaaggtgaaacagctccggttggtgctgcgattggattgttagctgagactgaagctgagatcgaagaagctaagagtaaagccgcttcgaaatcttcttcttctgtggctgaggctgtcgttccatctcctcctccggttacttcttctcctgctccggcgattgctcaaccggctccggtgacggcagtatcagatggtccgaggaagactgttgcgacgccgtatgctaagaagcttgctaaacaacacaaggttgatattgaatccgttgctggaactggaccattcggtaggattacggcttctgatgtggagacggcggctggaattgctccgtccaaatcctccatcgcaccaccgcctcctcctccacctccggtgacggctaaagcaaccaccactaatttgcctcctctgttacctgattcaagcattgttcctttcacagcaatgcaatctgcagtatctaagaacatgattgagagtctctctgttcctacattccgtgttggttatcctgtgaacactgacgctcttgatgcactttacgagaaggtgaagccaaagggtgtaacaatgacagctttattagctaaagctgcagggatggccttggctcagcatcctgtggtgaacgctagctgcaaagacgggaagagttttagttacaatagtagcattaacattgcagtggcggttgctatcaatggtggcctgattacgcctgttctacaagatgcagataagttggatttgtacttgttatctcaaaaatggaaagagctggtggggaaagctagaagcaagcaacttcaaccccatgaatacaactctggaacttttactttatcgaatctcggtatgtttggagtggatagatttgacgctattcttccgccaggacagggtgctattatggctgttggagcgtcaaagccaactgtagttgctgataaggatggattcttcagtgtaaaaaacacaatgctggtgaatgtgactgcagatcatcgcattgtgtatggagctgacttggctgcttttctccaaacctttgcaaagatcattgagaatccagatagtttgaccttataagacgccaagcgaagacgagaagtcaaaaacagtttccaaaattcctgagccaaatttttcccaagtaaattttttaatcttcattgttcttggtcttgctctacttcttttgcatctttttcttcacttgtgttgtatctgtatttttgttttcaagaatcatcattttgggttttaaacaaataatttcctatc

SEQ ID NO: 44105 - protein, 504 aa, Arabidopsis thaliana
  peptide (1)..(504): Ceres Seq. ID no. 12488450
  misc_feature (280)..(504): Pfam Name: 2-oxoacid dehydrogenases acyltransferase Pfam Description: 2-oxoacid dehydrogenases acyltransferase
  misc_feature (280)..(504): Pfam Name: 2-oxoacid dehydrogenases acyltransferase Pfam Description: 2-oxoacid dehydrogenases acyltransferase
  misc_feature (79)..(504): Homolog of NCBI NO: 17231098 NR Description: dihydrolipoamide S-acetyltransferase [Nostoc sp.
  misc_feature (79)..(504): Homolog of NCBI NO: 22298842 NR Description: dihydrolipoamide S-acetyltransferase
  misc_feature (79)..(504): Homolog of NCBI NO: 23123757 NR Description: hypothetical protein [Nostoc punctiforme]
  misc_feature (79)..(504): Homolog of NCBI NO: 16331208 NR Description: dihydrolipoamide acetyltransferase component (E2)
  misc_feature (53)..(503): Homolog of NCBI NO: 25286434 NR Description: protein F12K21.24 [imported] - Arabidopsis
  misc_feature (79)..(504): Homolog of NCBI NO: 17231098 NR Description: dihydrolipoamide S-acetyltransferase [Nostoc sp.
  misc_feature (79)..(504): Homolog of NCBI NO: 23123757 NR Description: hypothetical protein [Nostoc punctiforme]
  misc_feature (53)..(503): Homolog of NCBI NO: 25286434 NR Description: protein F12K21.24 [imported] - Arabidopsis
  misc_feature (25)..(504): Homolog of NCBI NO: 15230922 NR Description: dihydrolipoamide S-acetyltransferase
  misc_feature (73)..(504): Homolog of NCBI NO: 9279589 NR Description: dihydrolipoamide S-acetyltransferase [Arabidopsis
  misc_feature (136)..(504): Homolog of NCBI NO: 21954074 NR Description: putative dihydrolipoamide S-acetyltransferase
  misc_feature (53)..(503): Homolog of NCBI NO: 15218630 NR Description: dihydrolipoamide S-acetyltransferase, putative
  misc_feature (53)..(503): Homolog of NCBI NO: 21536525 NR Description: dihydrolipoamide S-acetyltransferase, putative
  misc_feature (79)..(504): Homolog of NCBI NO: 16331208 NR Description: dihydrolipoamide acetyltransferase component (E2)
  misc_feature (79)..(504): Homolog of NCBI NO: 22298842 NR Description: dihydrolipoamide S-acetyltransferase
  misc_feature (53)..(503): Homolog of NCBI NO: 21536525 NR Description: dihydrolipoamide S-acetyltransferase, putative
  misc_feature (53)..(503): Homolog of NCBI NO: 15218630 NR Description: dihydrolipoamide S-acetyltransferase, putative
  misc_feature (136)..(504): Homolog of NCBI NO: 21954074 NR Description: putative dihydrolipoamide S-acetyltransferase
  misc_feature (73)..(504): Homolog of NCBI NO: 9279589 NR Description: dihydrolipoamide S-acetyltransferase [Arabidopsis
  misc_feature (25)..(504): Homolog of NCBI NO: 15230922 NR Description: dihydrolipoamide S-acetyltransferase
NLVFSVHFTLSKLSLRSLSLCDSTMAVSSSSFLSTASLTNSKSNISFASSVSPSLRSVVFRSTTPATSHRRSMTVRSKIREIFMPALSSTMTEGKIVSWIKTEGEKLAKGESVVVVESDKADMDVETFYDGYLAAIVVGEGETAPVGAAIGLLAETEAEIEEAKSKAASKSSSSVAEAVVPSPPPVTSSPAPAIAQPAPVTAVSDGPRKTVATPYAKKLAKQHKVDIESVAGTGPFGRITASDVETAAGIAPSKSSIAPPPPPPPPVTAKATTTNLPPLLPDSSIVPFTAMQSAVSKNMIESLSVPTFRVGYPVNTDALDALYEKVKPKGVTMTALLAKAAGMALAQHPVVNASCKDGKSFSYNSSINIAVAVAINGGLITPVLQDADKLDLYLLSQKWKELVGKARSKQLQPHEYNSGTFTLSNLGMFGVDRFDAILPPGQGAIMAVGASKPTVVADKDGFFSVKNTMLVNVTADHRIVYGADLAAFLQTFAKIIENPDSLTL

SEQ ID NO: 44106 - protein, 480 aa, Arabidopsis thaliana
  peptide (1)..(480): Ceres Seq. ID no. 12488451
  misc_feature (256)..(480): Pfam Name: 2-oxoacid dehydrogenases acyltransferase Pfam Description: 2-oxoacid dehydrogenases acyltransferase
  misc_feature (256)..(480): Pfam Name: 2-oxoacid dehydrogenases acyltransferase Pfam Description: 2-oxoacid dehydrogenases acyltransferase
  misc_feature (55)..(480): Homolog of NCBI NO: 17231098 NR Description: dihydrolipoamide S-acetyltransferase [Nostoc sp.
  misc_feature (55)..(480): Homolog of NCBI NO: 22298842 NR Description: dihydrolipoamide S-acetyltransferase
  misc_feature (55)..(480): Homolog of NCBI NO: 23123757 NR Description: hypothetical protein [Nostoc punctiforme]
  misc_feature (55)..(480): Homolog of NCBI NO: 16331208 NR Description: dihydrolipoamide acetyltransferase component (E2)
  misc_feature (29)..(479): Homolog of NCBI NO: 25286434 NR Description: protein F12K21.24 [imported] - Arabidopsis
  misc_feature (55)..(480): Homolog of NCBI NO: 17231098 NR Description: dihydrolipoamide S-acetyltransferase [Nostoc sp.
  misc_feature (55)..(480): Homolog of NCBI NO: 23123757 NR Description: hypothetical protein [Nostoc punctiforme]
  misc_feature (29)..(479): Homolog of NCBI NO: 25286434 NR Description: protein F12K21.24 [imported] - Arabidopsis
  misc_feature (1)..(480): Homolog of NCBI NO: 15230922 NR Description: dihydrolipoamide S-acetyltransferase
  misc_feature (49)..(480): Homolog of NCBI NO: 9279589 NR Description: dihydrolipoamide S-acetyltransferase [Arabidopsis
  misc_feature (112)..(480): Homolog of NCBI NO: 21954074 NR Description: putative dihydrolipoamide S-acetyltransferase
  misc_feature (29)..(479): Homolog of NCBI NO: 15218630 NR Description: dihydrolipoamide S-acetyltransferase, putative
  misc_feature (29)..(479): Homolog of NCBI NO: 21536525 NR Description: dihydrolipoamide S-acetyltransferase, putative
  misc_feature (55)..(480): Homolog of NCBI NO: 16331208 NR Description: dihydrolipoamide acetyltransferase component (E2)
  misc_feature (55)..(480): Homolog of NCBI NO: 22298842 NR Description: dihydrolipoamide S-acetyltransferase
  misc_feature (29)..(479): Homolog of NCBI NO: 21536525 NR Description: dihydrolipoamide S-acetyltransferase, putative
  misc_feature (29)..(479): Homolog of NCBI NO: 15218630 NR Description: dihydrolipoamide S-acetyltransferase, putative
  misc_feature (112)..(480): Homolog of NCBI NO: 21954074 NR Description: putative dihydrolipoamide S-acetyltransferase
  misc_feature (49)..(480): Homolog of NCBI NO: 9279589 NR Description: dihydrolipoamide S-acetyltransferase [Arabidopsis
  misc_feature (1)..(480): Homolog of NCBI NO: 15230922 NR Description: dihydrolipoamide S-acetyltransferase
MAVSSSSFLSTASLTNSKSNISFASSVSPSLRSVVFRSTTPATSHRRSMTVRSKIREIFMPALSSTMTEGKIVSWIKTEGEKLAKGESVVVVESDKADMDVETFYDGYLAAIVVGEGETAPVGAAIGLLAETEAEIEEAKSKAASKSSSSVAEAVVPSPPPVTSSPAPAIAQPAPVTAVSDGPRKTVATPYAKKLAKQHKVDIESVAGTGPFGRITASDVETAAGIAPSKSSIAPPPPPPPPVTAKATTTNLPPLLPDSSIVPFTAMQSAVSKNMIESLSVPTFRVGYPVNTDALDALYEKVKPKGVTMTALLAKAAGMALAQHPVVNASCKDGKSFSYNSSINIAVAVAINGGLITPVLQDADKLDLYLLSQKWKELVGKARSKQLQPHEYNSGTFTLSNLGMFGVDRFDAILPPGQGAIMAVGASKPTVVADKDGFFSVKNTMLVNVTADHRIVYGADLAAFLQTFAKIIENPDSLTL

SEQ ID NO: 44107 - protein, 432 aa, Arabidopsis thaliana
  peptide (1)..(432): Ceres Seq. ID no. 12488452
  misc_feature (208)..(432): Pfam Name: 2-oxoacid dehydrogenases acyltransferase Pfam Description: 2-oxoacid dehydrogenases acyltransferase
  misc_feature (208)..(432): Pfam Name: 2-oxoacid dehydrogenases acyltransferase Pfam Description: 2-oxoacid dehydrogenases acyltransferase
  misc_feature (7)..(432): Homolog of NCBI NO: 17231098 NR Description: dihydrolipoamide S-acetyltransferase [Nostoc sp.
  misc_feature (7)..(432): Homolog of NCBI NO: 22298842 NR Description: dihydrolipoamide S-acetyltransferase
  misc_feature (7)..(432): Homolog of NCBI NO: 23123757 NR Description: hypothetical protein [Nostoc punctiforme]
  misc_feature (7)..(432): Homolog of NCBI NO: 16331208 NR Description: dihydrolipoamide acetyltransferase component (E2)
  misc_feature (1)..(431): Homolog of NCBI NO: 25286434 NR Description: protein F12K21.24 [imported] - Arabidopsis
  misc_feature (7)..(432): Homolog of NCBI NO: 17231098 NR Description: dihydrolipoamide S-acetyltransferase [Nostoc sp.
  misc_feature (7)..(432): Homolog of NCBI NO: 23123757 NR Description: hypothetical protein [Nostoc punctiforme]
  misc_feature (1)..(431): Homolog of NCBI NO: 25286434 NR Description: protein F12K21.24 [imported] - Arabidopsis
  misc_feature (1)..(432): Homolog of NCBI NO: 15230922 NR Description: dihydrolipoamide S-acetyltransferase
  misc_feature (1)..(432): Homolog of NCBI NO: 9279589 NR Description: dihydrolipoamide S-acetyltransferase [Arabidopsis
  misc_feature (64)..(432): Homolog of NCBI NO: 21954074 NR Description: putative dihydrolipoamide S-acetyltransferase
  misc_feature (1)..(431): Homolog of NCBI NO: 15218630 NR Description: dihydrolipoamide S-acetyltransferase, putative
  misc_feature (1)..(431): Homolog of NCBI NO: 21536525 NR Description: dihydrolipoamide S-acetyltransferase, putative
  misc_feature (7)..(432): Homolog of NCBI NO: 16331208 NR Description: dihydrolipoamide acetyltransferase component (E2)
  misc_feature (7)..(432): Homolog of NCBI NO: 22298842 NR Description: dihydrolipoamide S-acetyltransferase
  misc_feature (1)..(431): Homolog of NCBI NO: 21536525 NR Description: dihydrolipoamide S-acetyltransferase, putative
  misc_feature (1)..(431): Homolog of NCBI NO: 15218630 NR Description: dihydrolipoamide S-acetyltransferase, putative
  misc_feature (64)..(432): Homolog of NCBI NO: 21954074 NR Description: putative dihydrolipoamide S-acetyltransferase
  misc_feature (1)..(432): Homolog of NCBI NO: 9279589 NR Description: dihydrolipoamide S-acetyltransferase [Arabidopsis
  misc_feature (1)..(432): Homolog of NCBI NO: 15230922 NR Description: dihydrolipoamide S-acetyltransferase
MTVRSKIREIFMPALSSTMTEGKIVSWIKTEGEKLAKGESVVVVESDKADMDVETFYDGYLAAIVVGEGETAPVGAAIGLLAETEAEIEEAKSKAASKSSSSVAEAVVPSPPPVTSSPAPAIAQPAPVTAVSDGPRKTVATPYAKKLAKQHKVDIESVAGTGPFGRITASDVETAAGIAPSKSSIAPPPPPPPPVTAKATTTNLPPLLPDSSIVPFTAMQSAVSKNMIESLSVPTFRVGYPVNTDALDALYEKVKPKGVTMTALLAKAAGMALAQHPVVNASCKDGKSFSYNSSINIAVAVAINGGLITPVLQDADKLDLYLLSQKWKELVGKARSKQLQPHEYNSGTFTLSNLGMFGVDRFDAILPPGQGAIMAVGASKPTVVADKDGFFSVKNTMLVNVTADHRIVYGADLAAFLQTFAKIIENPDSLTL

SEQ ID NO: 44108 - DNA, 1031 bp, Arabidopsis thaliana
  misc_feature (1)..(1031): Ceres Seq. ID no. 12462215
  misc_feature: MA Experiment ID: 108434 Result: Up-regulated in Transcription
  misc_feature: MA Experiment 108434 PARAMETER Experiment Name: At_Root_Tips_cDNA_P Parameter: Tissue Value: Root Tips
  misc_feature: MA Experiment ID: 108462 Result: Down-regulated in Transcription
  misc_feature: MA Experiment 108462 PARAMETER Experiment Name: At_Germinating_Seeds_cDNA_P Parameter: Age (day) Value: 2 vs. 0
  misc_feature: MA Experiment 108462 PARAMETER Experiment Name: At_Germinating_Seeds_cDNA_P Parameter: Tissue Value: Germinating Seeds
  misc_feature: MA Experiment ID: 108463 Result: Down-regulated in Transcription
  misc_feature: MA Experiment 108463 PARAMETER Experiment Name: At_Germinating_Seeds_cDNA_P Parameter: Age (day) Value: 3 vs. 0
  misc_feature: MA Experiment 108463 PARAMETER Experiment Name: At_Germinating_Seeds_cDNA_P Parameter: Tissue Value: Germinating Seeds
  misc_feature: MA Experiment ID: 108464 Result: Down-regulated in Transcription
  misc_feature: MA Experiment 108464 PARAMETER Experiment Name: At_Germinating_Seeds_cDNA_P Parameter: Age (day) Value: 4 vs. 0
  misc_feature: MA Experiment 108464 PARAMETER Experiment Name: At_Germinating_Seeds_cDNA_P Parameter: Tissue Value: Germinating Seeds
  misc_feature: MA Experiment ID: 108585 Result: Up-regulated in Transcription
  misc_feature: MA Experiment 108585 PARAMETER Experiment Name: At_5mM_NaNP_cDNA_P Parameter: Timepoint (hr) Value: 6
  misc_feature: MA Experiment 108585 PARAMETER Experiment Name: At_5mM_NaNP_cDNA_P Parameter: Tissue Value: Aerial
  misc_feature: MA Experiment 108585 PARAMETER Experiment Name: At_5mM_NaNP_cDNA_P Parameter: Treatment Value: null
  misc_feature: MA Experiment ID: 108594 Result: Down-regulated in Transcription
  misc_feature: MA Experiment 108594 PARAMETER Experiment Name: At_Ler-rhl_Root_cDNA_P Parameter: Plant Line Value: null
  misc_feature: MA Experiment ID: 108595 Result: Down-regulated in Transcription
  misc_feature: MA Experiment 108595 PARAMETER Experiment Name: At_Ler-pi_Ovule_cDNA_P Parameter: Plant Line Value: null
  misc_feature: MA Experiment ID: 20001451 Result: Down-regulated in Transcription
  misc_feature: MA Experiment 20001451 PARAMETER Experiment Name: At_Far-red-induction_P Parameter: Age (day) Value: 7
  misc_feature: MA Experiment 20001451 PARAMETER Experiment Name: At_Far-red-induction_P Parameter: Light Value: Far-red vs. White
  misc_feature: MA Experiment 20001451 PARAMETER Experiment Name: At_Far-red-induction_P Parameter: Organism Value: A. thaliana
  misc_feature: MA Experiment 20001451 PARAMETER Experiment Name: At_Far-red-induction_P Parameter: Plant Line Value: Columbia
  misc_feature: MA Experiment 20001451 PARAMETER Experiment Name: At_Far-red-induction_P Parameter: Timepoint (hr) Value: 24
  misc_feature: MA Experiment 20001451 PARAMETER Experiment Name: At_Far-red-induction_P Parameter: Tissue Value: Whole Plant
agtgaggtaaacaaaaccaaaaccatcagatcttaagaagaagaacctaaagctcactacgatatttttcgagaatatgacgactttttctgttccgattgataacggagattctatgaagatcgcagaagaagaatcacaaagaacactgtacccatatgttactggaacttcaattgttgcaatcaagtacaaagatggggttttgatggcttctgatatgggaggttcatatggatcaaccttaagatacaagaacatcgagagagtgaaggctattggtaagcattctcttcttggtgccagcggagaaatcagcgactttcaggagattctccgttatcttgatgagctcaccctgaatgataacatgtgggatgatggtaactctttgggaccaaaagagattcacaactatctgacccgtgtgatgtacaaccgtcgcaacaagtttaaccctctgtggaacactctcgtccttggaggcgtcaaaaatgggaaaagttaccttggaatggtgtcaatgattggtgttagttttgaggacgatcatgttgccactggatttggaaaccaccttgctaggccaattcttcgtgatgagtggcatgcagacctgagttttgaagatggtgtcaagctacttgagaaatgtatgcgtgtgcttctttaccgtgacagatctgctattaacaagcttcagatagcgaagatcacggaagagggcgtgacggtctcacagccatactcattgaagacatactgggaattctcgtcattccacaacccaactgctggtgctgcaggctcctggtaagaagccaagcaaccacatcggctggcgatcttttaaggaagcttttattttattttatgtgatgttgttaaacactttgtactgtagttgttttactattaaacttggtggtttctttctgacagtccagagtttagatcaatgaggatttataaaaagtactggatatctttgggtagtaatccatacctttgttcattgttgatcgttctcc

SEQ ID NO: 44109 - protein, 246 aa, Arabidopsis thaliana
  peptide (1)..(246): Ceres Seq. ID no. 12462216
  misc_feature (28)..(213): Pfam Name: Proteasome A-type and B-type Pfam Description: Proteasome A-type and B-type
  misc_feature (23)..(233): Homolog of NCBI NO: 22538467 NR Description: proteasome beta 4 subunit
  misc_feature (22)..(230): Homolog of NCBI NO: 28828772 NR Description: similar to Arabidopsis thaliana (Mouse-ear
  misc_feature (29)..(233): Homolog of NCBI NO: 104166 NR Description: C 3.4.25.1 proteasome endopeptidase complex ()
  misc_feature (22)..(233): Homolog of NCBI NO: 33417170 NR Description: Unknown (protein for MGC:69145) [Xenopus laevis]
  misc_feature (22)..(233): Homolog of NCBI NO: 3915809 NR Description: Proteasome subunit beta type 4 precursor beta chain) (Macropain beta chain) (Multicatalytic endopeptidase
  misc_feature (50)..(178): Homolog of NCBI NO: 14594935 NR Description: putative beta7 proteasome subunit [Nicotiana
  misc_feature (126)..(246): Homolog of NCBI NO: 2511598 NR Description: multicatalytic endopeptidase complex, proteasome
  misc_feature (21)..(246): Homolog of NCBI NO: 8671512 NR Description: beta 7 subunit of 20S proteasome
  misc_feature (1)..(246): Homolog of NCBI NO: 25290071 NR Description: C 3.4.25.1 proteasome endopeptidase complex ()
  misc_feature (1)..(246): Homolog of NCBI NO: 15223537 NR Description: 20S proteasome beta subunit G1 (PBG1)
MTTFSVPIDNGDSMKIAEEESQRTLYPYVTGTSIVAIKYKDGVLMASDMGGSYGSTLRYKNIERVKAIGKHSLLGASGEISDFQEILRYLDELTLNDNMWDDGNSLGPKEIHNYLTRVMYNRRNKFNPLWNTLVLGGVKNGKSYLGMVSMIGVSFEDDHVATGFGNHLARPILRDEWHADLSFEDGVKLLEKCMRVLLYRDRSAINKLQIAKITEEGVTVSQPYSLKTYWEFSSFHNPTAGAAGSW

SEQ ID NO: 44110 - protein, 233 aa, Arabidopsis thaliana
  peptide (1)..(233): Ceres Seq. ID no. 12462217
  misc_feature (15)..(200): Pfam Name: Proteasome A-type and B-type Pfam Description: Proteasome A-type and B-type
  misc_feature (10)..(220): Homolog of NCBI NO: 22538467 NR Description: proteasome beta 4 subunit
  misc_feature (9)..(217): Homolog of NCBI NO: 28828772 NR Description: similar to Arabidopsis thaliana (Mouse-ear
  misc_feature (16)..(220): Homolog of NCBI NO: 104166 NR Description: C 3.4.25.1 proteasome endopeptidase complex ()
  misc_feature (9)..(220): Homolog of NCBI NO: 33417170 NR Description: Unknown (protein for MGC:69145) [Xenopus laevis]
  misc_feature (9)..(220): Homolog of NCBI NO: 3915809 NR Description: Proteasome subunit beta type 4 precursor beta chain) (Macropain beta chain) (Multicatalytic endopeptidase
  misc_feature (37)..(165): Homolog of NCBI NO: 14594935 NR Description: putative beta7 proteasome subunit [Nicotiana
  misc_feature (113)..(233): Homolog of NCBI NO: 2511598 NR Description: multicatalytic endopeptidase complex, proteasome
  misc_feature (8)..(233): Homolog of NCBI NO: 8671512 NR Description: beta 7 subunit of 20S proteasome
  misc_feature (1)..(233): Homolog of NCBI NO: 25290071 NR Description: C 3.4.25.1 proteasome endopeptidase complex ()
  misc_feature (1)..(233): Homolog of NCBI NO: 15223537 NR Description: 20S proteasome beta subunit G1 (PBG1)
MKIAEEESQRTLYPYVTGTSIVAIKYKDGVLMASDMGGSYGSTLRYKNIERVKAIGKHSLLGASGEISDFQEILRYLDELTLNDNMWDDGNSLGPKEIHNYLTRVMYNRRNKFNPLWNTLVLGGVKNGKSYLGMVSMIGVSFEDDHVATGFGNHLARPILRDEWHADLSFEDGVKLLEKCMRVLLYRDRSAINKLQIAKITEEGVTVSQPYSLKTYWEFSSFHNPTAGAAGSW

SEQ ID NO: 44111 - protein, 202 aa, Arabidopsis thaliana
  peptide (1)..(202): Ceres Seq. ID no. 12462218
  misc_feature (1)..(169): Pfam Name: Proteasome A-type and B-type Pfam Description: Proteasome A-type and B-type
  misc_feature (1)..(189): Homolog of NCBI NO: 22538467 NR Description: proteasome beta 4 subunit
  misc_feature (1)..(186): Homolog of NCBI NO: 28828772 NR Description: similar to Arabidopsis thaliana (Mouse-ear
  misc_feature (1)..(189): Homolog of NCBI NO: 104166 NR Description: C 3.4.25.1 proteasome endopeptidase complex ()
  misc_feature (1)..(189): Homolog of NCBI NO: 33417170 NR Description: Unknown (protein for MGC:69145) [Xenopus laevis]
  misc_feature (1)..(189): Homolog of NCBI NO: 3915809 NR Description: Proteasome subunit beta type 4 precursor beta chain) (Macropain beta chain) (Multicatalytic endopeptidase
  misc_feature (6)..(134): Homolog of NCBI NO: 14594935 NR Description: putative beta7 proteasome subunit [Nicotiana
  misc_feature (82)..(202): Homolog of NCBI NO: 2511598 NR Description: multicatalytic endopeptidase complex, proteasome
  misc_feature (1)..(202): Homolog of NCBI NO: 8671512 NR Description: beta 7 subunit of 20S proteasome
  misc_feature (1)..(202): Homolog of NCBI NO: 25290071 NR Description: C 3.4.25.1 proteasome endopeptidase complex ()
  misc_feature (1)..(202): Homolog of NCBI NO: 15223537 NR Description: 20S proteasome beta subunit G1 (PBG1)
MASDMGGSYGSTLRYKNIERVKAIGKHSLLGASGEISDFQEILRYLDELTLNDNMWDDGNSLGPKEIHNYLTRVMYNRRNKFNPLWNTLVLGGVKNGKSYLGMVSMIGVSFEDDHVATGFGNHLARPILRDEWHADLSFEDGVKLLEKCMRVLLYRDRSAINKLQIAKITEEGVTVSQPYSLKTYWEFSSFHNPTAGAAGSW

SEQ ID NO: 44112 - DNA, 1247 bp, Arabidopsis thaliana
  misc_feature (1)..(1247): Ceres Seq. ID no. 13509667
  misc_feature: MA Experiment ID: 20000794 Result: Down-regulated in Transcription
  misc_feature: MA Experiment 20000794 PARAMETER Experiment Name: At_Petals_P Parameter: Age (day) Value: 23-25 days
  misc_feature: MA Experiment 20000794 PARAMETER Experiment Name: At_Petals_P Parameter: Plant Line Value: WS
  misc_feature: MA Experiment 20000794 PARAMETER Experiment Name: At_Petals_P Parameter: Tissue Value: Petals vs. Whole plant
  misc_feature: MA Experiment ID: 20001557 Result: Up-regulated in Transcription
  misc_feature: MA Experiment 20001557 PARAMETER Experiment Name: At_Drought_Soil_Dry_P Parameter: Age (day) Value: 27
  misc_feature: MA Experiment 20001557 PARAMETER Experiment Name: At_Drought_Soil_Dry_P Parameter: Organism Value: A. thaliana
  misc_feature: MA Experiment 20001557 PARAMETER Experiment Name: At_Drought_Soil_Dry_P Parameter: Plant Line Value: WS
  misc_feature: MA Experiment 20001557 PARAMETER Experiment Name: At_Drought_Soil_Dry_P Parameter: Post Timepoint (hr) Value: 3
  misc_feature: MA Experiment 20001557 PARAMETER Experiment Name: At_Drought_Soil_Dry_P Parameter: Post-Treatment Value: Re-Water vs. No Drought
  misc_feature: MA Experiment 20001557 PARAMETER Experiment Name: At_Drought_Soil_Dry_P Parameter: Timepoint (day) Value: 13
  misc_feature: MA Experiment 20001557 PARAMETER Experiment Name: At_Drought_Soil_Dry_P Parameter: Treatment Value: Drought vs. No Drought
gatttcctgtgttgcgaaacccccaaattctcttctctctatctctctcgcgtacgccgcaccgtagcgaccaattgaatccacgaggaaatctcagtaaatactatggcgaccaacgaacccgagcacgagcacagagacgaggaagaggccggagctaacgaggatgaggacaccggagctcaggtcgctccgatcgttaggcttgaggaggttgccgtcactaccggcgaggaagacgaagatgccgtccttgatctgaaatcgaagctttatcgattcgataaggatgcgaatcagtggaaggagagaggagctggtactgtgaagttcttaaagcataagaacactgggaagattcgtctcgttatgaggcaatctaaaactttgaagatctgtgctaatcacttcgttaaatcgggcatgagtgttcaggaacacgttgggaatgaaaagtcatgtgtgtggcacgctcgtgactttgctgatggtgaactcaaggatgagcttttctgtatccgatttgcttctattgagaattgcaaaacatttatgcaaaagttcaaggaagttgctgagtctgaagaagagaaagaagagagcaaagatgccgctgacactgctggccttcttgagaaattgactgtggaagagacaaaaacggaggagaaaaccgaagcgaaagctgtggagacggcaaagactgaagtgaaagcagaagaaaagaaagagagcgaggcagagaaatctggtgaagcaaagaaaacagaagaaagtggtccctcaacataagaagcgtcatcatttaagttgccaaatcctggcgaggtaattaagcctcgaaatgttttgatgcatcatgagtctaccattgtcttggcactatctatctatacatgttttgtcgagtcatatcaagtggttgggggatcgcttggggtcgggttttactgaatgctgagtcgttatgggtctaatagtttttgagtctaaagtgtcgggtgatatgagagatttgggtgaaatattttttcatgttggttatctgaaagagtacattggtttcattgttttaagttttctcatggatcctttttggatggtcttattttgaggatacaaatgtgtttgtccatggacaagaatcagaagtctccattttttttttttcaaaatttaatgcatgtgattttttaatcttaaggtaattgccaattgtttgacaaaaaaaaggtaattgccaatct

SEQ ID NO: 44113 - protein, 228 aa, Arabidopsis thaliana
  peptide (1)..(228): Ceres Seq. ID no. 13509668
  misc_feature (38)..(159): Pfam Name: RanBP1 domain Pfam Description: RanBP1 domain
  misc_feature (3)..(208): Homolog of NCBI NO: 1877412 NR Description: Ran binding protein 1 [Xenopus laevis]
  misc_feature (3)..(214): Homolog of NCBI NO: 14091665 NR Description: Ran binding protein-1 [Lycopersicon esculentum]
  misc_feature (1)..(224): Homolog of NCBI NO: 30697102 NR Description: Ran binding protein 1 homolog - like [Arabidopsis
  misc_feature (1)..(224): Homolog of NCBI NO: 8843780 NR Description: contains similarity to small GTPase Ran binding
  misc_feature (3)..(227): Homolog of NCBI NO: 2058284 NR Description: atranbp1b [Arabidopsis thaliana]
  misc_feature (3)..(227): Homolog of NCBI NO: 20260400 NR Description: Ran binding protein [Arabidopsis thaliana]
  misc_feature (3)..(227): Homolog of NCBI NO: 15227700 NR Description: Ran binding protein (AtRanBP1b) [Arabidopsis
  misc_feature (1)..(225): Homolog of NCBI NO: 5106769 NR Description: Ran-binding protein siRanBP [Arabidopsis thaliana]
  misc_feature (1)..(225): Homolog of NCBI NO: 2058282 NR Description: atranbp1a [Arabidopsis thaliana]
  misc_feature (1)..(228): Homolog of NCBI NO: 15222310 NR Description: Ran-binding protein (atranbp1a) [Arabidopsis
MATNEPEHEHRDEEEAGANEDEDTGAQVAPIVRLEEVAVTTGEEDEDAVLDLKSKLYRFDKDANQWKERGAGTVKFLKHKNTGKIRLVMRQSKTLKICANHFVKSGMSVQEHVGNEKSCVWHARDFADGELKDELFCIRFASIENCKTFMQKFKEVAESEEEKEESKDAADTAGLLEKLTVEETKTEEKTEAKAVETAKTEVKAEEKKESEAEKSGEAKKTEESGPST

SEQ ID NO: 44114 - protein, 140 aa, Arabidopsis thaliana
  peptide (1)..(140): Ceres Seq. ID no. 13509669
  misc_feature (1)..(71): Pfam Name: RanBP1 domain Pfam Description: RanBP1 domain
  misc_feature (1)..(120): Homolog of NCBI NO: 1877412 NR Description: Ran binding protein 1 [Xenopus laevis]
  misc_feature (1)..(126): Homolog of NCBI NO: 14091665 NR Description: Ran binding protein-1 [Lycopersicon esculentum]
  misc_feature (1)..(136): Homolog of NCBI NO: 30697102 NR Description: Ran binding protein 1 homolog - like [Arabidopsis
  misc_feature (1)..(136): Homolog of NCBI NO: 8843780 NR Description: contains similarity to small GTPase Ran binding
  misc_feature (1)..(139): Homolog of NCBI NO: 2058284 NR Description: atranbp1b [Arabidopsis thaliana]
  misc_feature (1)..(139): Homolog of NCBI NO: 20260400 NR Description: Ran binding protein [Arabidopsis thaliana]
  misc_feature (1)..(139): Homolog of NCBI NO: 15227700 NR Description: Ran binding protein (AtRanBP1b) [Arabidopsis
  misc_feature (1)..(137): Homolog of NCBI NO: 5106769 NR Description: Ran-binding protein siRanBP [Arabidopsis thaliana]
  misc_feature (1)..(137): Homolog of NCBI NO: 2058282 NR Description: atranbp1a [Arabidopsis thaliana]
  misc_feature (1)..(140): Homolog of NCBI NO: 15222310 NR Description: Ran-binding protein (atranbp1a) [Arabidopsis
MRQSKTLKICANHFVKSGMSVQEHVGNEKSCVWHARDFADGELKDELFCIRFASIENCKTFMQKFKEVAESEEEKEESKDAADTAGLLEKLTVEETKTEEKTEAKAVETAKTEVKAEEKKESEAEKSGEAKKTEESGPST

SEQ ID NO: 44115 - protein, 122 aa, Arabidopsis thaliana
  peptide (1)..(122): Ceres Seq. ID no. 13509670
  misc_feature (1)..(53): Pfam Name: RanBP1 domain Pfam Description: RanBP1 domain
  misc_feature (1)..(102): Homolog of NCBI NO: 1877412 NR Description: Ran binding protein 1 [Xenopus laevis]
  misc_feature (1)..(108): Homolog of NCBI NO: 14091665 NR Description: Ran binding protein-1 [Lycopersicon esculentum]
  misc_feature (1)..(118): Homolog of NCBI NO: 30697102 NR Description: Ran binding protein 1 homolog - like [Arabidopsis
  misc_feature (1)..(118): Homolog of NCBI NO: 8843780 NR Description: contains similarity to small GTPase Ran binding
  misc_feature (1)..(121): Homolog of NCBI NO: 2058284 NR Description: atranbp1b [Arabidopsis thaliana]
  misc_feature (1)..(121): Homolog of NCBI NO: 20260400 NR Description: Ran binding protein [Arabidopsis thaliana]
  misc_feature (1)..(121): Homolog of NCBI NO: 15227700 NR Description: Ran binding protein (AtRanBP1b) [Arabidopsis
  misc_feature (1)..(119): Homolog of NCBI NO: 5106769 NR Description: Ran-binding protein siRanBP [Arabidopsis thaliana]
  misc_feature (1)..(119): Homolog of NCBI NO: 2058282 NR Description: atranbp1a [Arabidopsis thaliana]
  misc_feature (1)..(122): Homolog of NCBI NO: 15222310 NR Description: Ran-binding protein (atranbp1a) [Arabidopsis
MSVQEHVGNEKSCVWHARDFADGELKDELFCIRFASIENCKTFMQKFKEVAESEEEKEESKDAADTAGLLEKLTVEETKTEEKTEAKAVETAKTEVKAEEKKESEAEKSGEAKKTEESGPST

SEQ ID NO: 44116 - DNA, 951 bp, Arabidopsis thaliana
  misc_feature (1)..(951): Ceres Seq. ID no. 13503085
  misc_feature: MA Experiment ID: 108462 Result: Up-regulated in Transcription
  misc_feature: MA Experiment 108462 PARAMETER Experiment Name: At_Germinating_Seeds_cDNA_P Parameter: Age (day) Value: 2 vs. 0
  misc_feature: MA Experiment 108462 PARAMETER Experiment Name: At_Germinating_Seeds_cDNA_P Parameter: Tissue Value: Germinating Seeds
  misc_feature: MA Experiment ID: 108463 Result: Up-regulated in Transcription
  misc_feature: MA Experiment 108463 PARAMETER Experiment Name: At_Germinating_Seeds_cDNA_P Parameter: Age (day) Value: 3 vs. 0
  misc_feature: MA Experiment 108463 PARAMETER Experiment Name: At_Germinating_Seeds_cDNA_P Parameter: Tissue Value: Germinating Seeds
  misc_feature: MA Experiment ID: 108464 Result: Up-regulated in Transcription
  misc_feature: MA Experiment 108464 PARAMETER Experiment Name: At_Germinating_Seeds_cDNA_P Parameter: Age (day) Value: 4 vs. 0
  misc_feature: MA Experiment 108464 PARAMETER Experiment Name: At_Germinating_Seeds_cDNA_P Parameter: Tissue Value: Germinating Seeds
  misc_feature: MA Experiment ID: 108488 Result: Down-regulated in Transcription
  misc_feature: MA Experiment ID: 108573 Result: Up-regulated in Transcription
  misc_feature: MA Experiment 108573 PARAMETER Experiment Name: At_Drought_cDNA_P Parameter: Timepoint (hr) Value: 6
  misc_feature: MA Experiment 108573 PARAMETER Experiment Name: At_Drought_cDNA_P Parameter: Tissue Value: Aerial
  misc_feature: MA Experiment 108573 PARAMETER Experiment Name: At_Drought_cDNA_P Parameter: Treatment Value: Drought vs. No Drought
  misc_feature: MA Experiment ID: 108585 Result: Up-regulated in Transcription
  misc_feature: MA Experiment 108585 PARAMETER Experiment Name: At_5mM_NaNP_cDNA_P Parameter: Timepoint (hr) Value: 6
  misc_feature: MA Experiment 108585 PARAMETER Experiment Name: At_5mM_NaNP_cDNA_P Parameter: Tissue Value: Aerial
  misc_feature: MA Experiment 108585 PARAMETER Experiment Name: At_5mM_NaNP_cDNA_P Parameter: Treatment Value: null
  misc_feature: MA Experiment ID: 108595 Result: Down-regulated in Transcription
  misc_feature: MA Experiment 108595 PARAMETER Experiment Name: At_Ler-pi_Ovule_cDNA_P Parameter: Plant Line Value: null
  misc_feature: MA Experiment ID: 108607 Result: Up-regulated in Transcription
  misc_feature: MA Experiment 108607 PARAMETER Experiment Name: At_100uM_ABA_cDNA_P Parameter: Timepoint (hr) Value: 4
  misc_feature: MA Experiment 108607 PARAMETER Experiment Name: At_100uM_ABA_cDNA_P Parameter: Tissue Value: Aerial
  misc_feature: MA Experiment 108607 PARAMETER Experiment Name: At_100uM_ABA_cDNA_P Parameter: Treatment Value: 100uM ABA vs. No Treatment
  misc_feature: MA Experiment ID: 108668 Result: Up-regulated in Transcription
  misc_feature: MA Experiment 108668 PARAMETER Experiment Name: At_2mM_SA_cDNA_P Parameter: Plant Line Value: WS
  misc_feature: MA Experiment 108668 PARAMETER Experiment Name: At_2mM_SA_cDNA_P Parameter: Timepoint (hr) Value: 6
  misc_feature: MA Experiment 108668 PARAMETER Experiment Name: At_2mM_SA_cDNA_P Parameter: Treatment Value: 2mM SA vs. No Treatment
  misc_feature: MA Experiment ID: 20000347 Result: Up-regulated in Transcription
  misc_feature: MA Experiment 20000347 PARAMETER Experiment Name: At_2mM_SA_Sub_P Parameter: Age (day) Value: 14
  misc_feature: MA Experiment 20000347 PARAMETER Experiment Name: At_2mM_SA_Sub_P Parameter: Organism Value: A. thaliana
  misc_feature: MA Experiment 20000347 PARAMETER Experiment Name: At_2mM_SA_Sub_P Parameter: Plant Line Value: WS
  misc_feature: MA Experiment 20000347 PARAMETER Experiment Name: At_2mM_SA_Sub_P Parameter: Timepoint (hr) Value: 6
  misc_feature: MA Experiment 20000347 PARAMETER Experiment Name: At_2mM_SA_Sub_P Parameter: Tissue Value: Aerial
  misc_feature: MA Experiment 20000347 PARAMETER Experiment Name: At_2mM_SA_Sub_P Parameter: Treatment Value: 2mM SA vs. No Treatment
  misc_feature: MA Experiment ID: 20000440 Result: Up-regulated in Transcription
  misc_feature: MA Experiment 20000440 PARAMETER Experiment Name: At_Closed-Flower__Sub_P Parameter: Tissue Value: Closed Flower vs. Whole Plant
tttctcatttcttaaccacgtcgtcgacacaacaaaccgatcgtgttacgtctctctctctctcagtctctcatcaccgacgaagatcacggctcttttctctgtttaatcggcggaatctctcttcttattttatttttcttccggtagatcgatccagctccgagatcaatcatgaatcctgaatatgactatttgttcaagcttttgctcattggtgattctggtgttggaaagtcgtgcttgcttctaaggtttgctgatgattcctacctggatagctacatcagcaccattggtgtcgactttaaaatccgaacagtcgaacaagatggaaagaccatcaaactccagatttgggatacggcaggccaggaacgtttcagaacgattactagcagttactacagaggagctcatggaattattgtgacttatgatgtaacagatctagaaagcttcaacaacgtcaagcaatggctaaatgaaatcgaccgctatgcaagtgagaatgttaacaagctactggttgggaacaagtgtgatctcacatcacagaaagttgtatccactgagacagctaaggctttcgctgatgaacttgggatcccattcttggaaacaagtgctaagaatgctaccaatgtcgaagaagctttcatggccatgactgctgcaatcaagaccagaatggcgagccaacctgcaggaggatctaagccaccaacggtccagatccgaggacaacctgttaaccagcaatcaggctgctgctcctcttaattcgctttggtaacacttaaccatattatgtcattcgtttgcatgtaagaaatctaaacaacgttgcttcttaaatcttttgtatttggtttttcaatttttcacttgtgtccaaaagcttttaaattctttgtaatggtacttggattattaataaacttctttagt

SEQ ID NO: 44117 - protein, 202 aa, Arabidopsis thaliana
  peptide (1)..(202): Ceres Seq. ID no. 13503086
  misc_feature (10)..(171): Pfam Name: Ras family Pfam Description: Ras family
  misc_feature (1)..(202): Homolog of NCBI NO: 14140133 NR Description: putative GTP-binding protein [Oryza sativa]
  misc_feature (1)..(202): Homolog of NCBI NO: 1053063 NR Description: small GTP-binding protein
  misc_feature (1)..(202): Homolog of NCBI NO: 1616614 NR Description: small GTP-binding protein [Nicotiana
  misc_feature (1)..(202): Homolog of NCBI NO: 303750 NR Description: GTP-binding protein [Pisum sativum]
  misc_feature (1)..(202): Homolog of NCBI NO: 4586580 NR Description: rab-type small GTP-binding protein [Cicer
  misc_feature (1)..(202): Homolog of NCBI NO: 1370166 NR Description: RAB1C [Lotus japonicus]
  misc_feature (6)..(202): Homolog of NCBI NO: 7438375 NR Description: GTP-binding protein - Arabidopsis thaliana
  misc_feature (1)..(202): Homolog of NCBI NO: 18422766 NR Description: GTP-binding protein, putative [Arabidopsis
  misc_feature (1)..(202): Homolog of NCBI NO: 16974365 NR Description: AT4g17530/dl4800c [Arabidopsis thaliana]
  misc_feature (1)..(202): Homolog of NCBI NO: 15236555 NR Description: ras-related small GTP-binding protein RAB1c
MNPEYDYLFKLLLIGDSGVGKSCLLLRFADDSYLDSYISTIGVDFKIRTVEQDGKTIKLQIWDTAGQERFRTITSSYYRGAHGIIVTYDVTDLESFNNVKQWLNEIDRYASENVNKLLVGNKCDLTSQKVVSTETAKAFADELGIPFLETSAKNATNVEEAFMAMTAAIKTRMASQPAGGSKPPTVQIRGQPVNQQSGCCSS

SEQ ID NO: 44118 - DNA, 1034 bp, Arabidopsis thaliana
  misc_feature (1)..(1034): Ceres Seq. ID no. 12455416
  misc_feature: MA Experiment ID: 20000306 Result: Down-regulated in Transcription
  misc_feature: MA Experiment 20000306 PARAMETER Experiment Name: At_Germinating_Seeds_Sub_P Parameter: Age (hr) Value: 6 vs. 0
  misc_feature: MA Experiment 20000306 PARAMETER Experiment Name: At_Germinating_Seeds_Sub_P Parameter: Organism Value: A. thaliana
  misc_feature: MA Experiment 20000306 PARAMETER Experiment Name: At_Germinating_Seeds_Sub_P Parameter: Plant Line Value: WS
  misc_feature: MA Experiment 20000306 PARAMETER Experiment Name: At_Germinating_Seeds_Sub_P Parameter: Tissue Value: Germinating Seeds
  misc_feature: MA Experiment ID: 20000307 Result: Down-regulated in Transcription
  misc_feature: MA Experiment 20000307 PARAMETER Experiment Name: At_Germinating_Seeds_Sub_P Parameter: Age (hr) Value: 24 vs. 0
  misc_feature: MA Experiment 20000307 PARAMETER Experiment Name: At_Germinating_Seeds_Sub_P Parameter: Organism Value: A. thaliana
  misc_feature: MA Experiment 20000307 PARAMETER Experiment Name: At_Germinating_Seeds_Sub_P Parameter: Plant Line Value: WS
  misc_feature: MA Experiment 20000307 PARAMETER Experiment Name: At_Germinating_Seeds_Sub_P Parameter: Tissue Value: Germinating Seeds
  misc_feature: MA Experiment ID: 20000314 Result: Up-regulated in Transcription
  misc_feature: MA Experiment 20000314 PARAMETER Experiment Name: At_14day_Shoots-Roots_Sub_P Parameter: Age (day) Value: 14
  misc_feature: MA Experiment 20000314 PARAMETER Experiment Name: At_14day_Shoots-Roots_Sub_P Parameter: Organism Value: A. thaliana
  misc_feature: MA Experiment 20000314 PARAMETER Experiment Name: At_14day_Shoots-Roots_Sub_P Parameter: Plant Line Value: WS
  misc_feature: MA Experiment 20000314 PARAMETER Experiment Name: At_14day_Shoots-Roots_Sub_P Parameter: Tissue Value: Roots vs. Whole Plant
  misc_feature: MA Experiment ID: 20000315 Result: Up-regulated in Transcription
  misc_feature: MA Experiment 20000315 PARAMETER Experiment Name: At_14day_Shoots-Roots_Sub_P Parameter: Age (day) Value: 14
  misc_feature: MA Experiment 20000315 PARAMETER Experiment Name: At_14day_Shoots-Roots_Sub_P Parameter: Organism Value: A. thaliana
  misc_feature: MA Experiment 20000315 PARAMETER Experiment Name: At_14day_Shoots-Roots_Sub_P Parameter: Plant Line Value: WS
  misc_feature: MA Experiment 20000315 PARAMETER Experiment Name: At_14day_Shoots-Roots_Sub_P Parameter: Tissue Value: Shoots vs. Whole Plant
  misc_feature: MA Experiment ID: 20000328 Result: Down-regulated in Transcription
  misc_feature: MA Experiment 20000328 PARAMETER Experiment Name: At_42deg_Heat_Sub_P Parameter: Age (day) Value: 14
  misc_feature: MA Experiment 20000328 PARAMETER Experiment Name: At_42deg_Heat_Sub_P Parameter: Organism Value: A. thaliana
  misc_feature: MA Experiment 20000328 PARAMETER Experiment Name: At_42deg_Heat_Sub_P Parameter: Plant Line Value: WS
  misc_feature: MA Experiment 20000328 PARAMETER Experiment Name: At_42deg_Heat_Sub_P Parameter: Temperature (deg C) Value: 42 vs. 22
  misc_feature: MA Experiment 20000328 PARAMETER Experiment Name: At_42deg_Heat_Sub_P Parameter: Timepoint (hr) Value: 6
  misc_feature: MA Experiment 20000328 PARAMETER Experiment Name: At_42deg_Heat_Sub_P Parameter: Tissue Value: Aerial
  misc_feature: MA Experiment ID: 20000332 Result: Up-regulated in Transcription
  misc_feature: MA Experiment 20000332 PARAMETER Experiment Name: At_4deg_Cold_Sub_P Parameter: Age (day) Value: 14
  misc_feature: MA Experiment 20000332 PARAMETER Experiment Name: At_4deg_Cold_Sub_P Parameter: Organism Value: A. thaliana
  misc_feature: MA Experiment 20000332 PARAMETER Experiment Name: At_4deg_Cold_Sub_P Parameter: Plant Line Value: WS
  misc_feature: MA Experiment 20000332 PARAMETER Experiment Name: At_4deg_Cold_Sub_P Parameter: Temperature (deg C) Value: 4 vs. 22
  misc_feature: MA Experiment 20000332 PARAMETER Experiment Name: At_4deg_Cold_Sub_P Parameter: Timepoint (hr) Value: 2
  misc_feature: MA Experiment 20000332 PARAMETER Experiment Name: At_4deg_Cold_Sub_P Parameter: Tissue Value: Aerial
  misc_feature: MA Experiment ID: 20000346 Result: Up-regulated in Transcription
  misc_feature: MA Experiment 20000346 PARAMETER Experiment Name: At_2mM_SA_Sub_P Parameter: Age (day) Value: 14
  misc_feature: MA Experiment 20000346 PARAMETER Experiment Name: At_2mM_SA_Sub_P Parameter: Organism Value: A. thaliana
  misc_feature: MA Experiment 20000346 PARAMETER Experiment Name: At_2mM_SA_Sub_P Parameter: Plant Line Value: WS
  misc_feature: MA Experiment 20000346 PARAMETER Experiment Name: At_2mM_SA_Sub_P Parameter: Timepoint (hr) Value: 1
  misc_feature: MA Experiment 20000346 PARAMETER Experiment Name: At_2mM_SA_Sub_P Parameter: Tissue Value: Aerial
  misc_feature: MA Experiment 20000346 PARAMETER Experiment Name: At_2mM_SA_Sub_P Parameter: Treatment Value: 2mM SA vs. No Treatment
  misc_feature: MA Experiment ID: 20000440 Result: Down-regulated in Transcription
  misc_feature: MA Experiment 20000440 PARAMETER Experiment Name: At_Closed-Flower__Sub_P Parameter: Tissue Value: Closed Flower vs. Whole Plant
  misc_feature: MA Experiment ID: 20000634 Result: Up-regulated in Transcription
  misc_feature: MA Experiment 20000634 PARAMETER Experiment Name: At_10percent_PEG_Sub_P Parameter: Age (day) Value: 12
  misc_feature: MA Experiment 20000634 PARAMETER Experiment Name: At_10percent_PEG_Sub_P Parameter: Organism Value: A. thaliana
  misc_feature: MA Experiment 20000634 PARAMETER Experiment Name: At_10percent_PEG_Sub_P Parameter: Plant Line Value: WS
  misc_feature: MA Experiment 20000634 PARAMETER Experiment Name: At_10percent_PEG_Sub_P Parameter: Timepoint (day) Value: 12
  misc_feature: MA Experiment 20000634 PARAMETER Experiment Name: At_10percent_PEG_Sub_P Parameter: Tissue Value: Whole Plant
  misc_feature: MA Experiment 20000634 PARAMETER Experiment Name: At_10percent_PEG_Sub_P Parameter: Treatment Value: 10% PEG vs. No Treatment
atcaacaatatacatctgagatatcaaaactcctagagagatctaataaaaatgaagtcttttacgttcttgattctctttctctttgcagcacaatctatcagcgtctatgcaggcagcttccacaaagacgttaagatacattggggtgatggtcgtggaaagattcacgataatcaagggaaacttctatctctctcgcttgacaaatcctctggttcaggtttccaatctaatcaagagtttctctatggtaaagccgaagttcaaatgaaacttgtccctggtaactctgctggaaccgtcacaacattctatcttaaatctccgggaactacatgggatgagattgatttcgagtttttggggaacataagtggtcatccatatactctccatactaatgtttacacaaaaggctcaggagacaaagaacaacaatttcatctatggtttgacccaaccgctaactttcacacttattgcatcacatggaatccacaaagaattatttttaccgttgatgggattccaattagagagtttatgaatgccgagtcacgtggagtcccattcccaacaaagcaaccaatgaggctatatgcgagtctatgggaagcagagcattgggctacaaggggaggattagagaaaacagattggtcaaaagctcctttcaccgcttattacagaaactacaatgtcgagggatgtgtatgggttaatggaaagtcagtttgtcccgcaaattcccaatggttcactcaaaaactcgattcgaatggccagacaagaatgaaaggggtacagagtaaatacatggtttacaactattgctccgataaaaaaaggtttcctcgaggtgttcctccagagtgcagctaaatgattgattctttgattcataaataagttacttgacgttgtctttgtaactcaatggttcttcttatctataatttttcaattcatttgttaccaaatatatgcgtgtttgtgtaagatcttttttacaatgaacaatgagttcttcc

SEQ ID NO: 44119 - protein, 277 aa, Arabidopsis thaliana
  peptide (1)..(277): Ceres Seq. ID no. 12455417
  misc_feature (24)..(206): Pfam Name: Glycosyl hydrolases family 16 Pfam Description: Glycosyl hydrolases family 16
  misc_feature (7)..(277): Homolog of NCBI NO: 3901012 NR Description: xyloglucan endotransglycosylase 1 [Fagus
  misc_feature (1)..(276): Homolog of NCBI NO: 17064792 NR Description: xyloglucan endo-1, 4-beta-D-glucanase (XTR-6)
  misc_feature (1)..(277): Homolog of NCBI NO: 29500891 NR Description: putative xyloglucan endotransglycosylase [Cucumis
  misc_feature (1)..(276): Homolog of NCBI NO: 15235997 NR Description: xyloglucan endotransglycosylase (XTR-6)
  misc_feature (3)..(276): Homolog of NCBI NO: 15242781 NR Description: xyloglucan endotransglycosylase (TCH4)
  misc_feature (2)..(277): Homolog of NCBI NO: 15238891 NR Description: xyloglucan endotransglycosylase, putative
  misc_feature (3)..(277): Homolog of NCBI NO: 15218642 NR Description: xyloglucan endotransglycosylase, putative
  misc_feature (3)..(277): Homolog of NCBI NO: 15234681 NR Description: xyloglucan endotransglycosylase, putative
  misc_feature (1)..(277): Homolog of NCBI NO: 15215690 NR Description: AT4g30290/F17I23_370 [Arabidopsis thaliana]
  misc_feature (1)..(277): Homolog of NCBI NO: 15234701 NR Description: xyloglucan endotransglycosylase, putative
MKSFTFLILFLFAAQSISVYAGSFHKDVKIHWGDGRGKIHDNQGKLLSLSLDKSSGSGFQSNQEFLYGKAEVQMKLVPGNSAGTVTTFYLKSPGTTWDEIDFEFLGNISGHPYTLHTNVYTKGSGDKEQQFHLWFDPTANFHTYCITWNPQRIIFTVDGIPIREFMNAESRGVPFPTKQPMRLYASLWEAEHWATRGGLEKTDWSKAPFTAYYRNYNVEGCVWVNGKSVCPANSQWFTQKLDSNGQTRMKGVQSKYMVYNYCSDKKRFPRGVPPECS

SEQ ID NO: 44120 - protein, 204 aa, Arabidopsis thaliana
  peptide (1)..(204): Ceres Seq. ID no. 12455418
  misc_feature (1)..(133): Pfam Name: Glycosyl hydrolases family 16 Pfam Description: Glycosyl hydrolases family 16
  misc_feature (1)..(204): Homolog of NCBI NO: 3901012 NR Description: xyloglucan endotransglycosylase 1 [Fagus
  misc_feature (1)..(203): Homolog of NCBI NO: 17064792 NR Description: xyloglucan endo-1, 4-beta-D-glucanase (XTR-6)
  misc_feature (1)..(204): Homolog of NCBI NO: 29500891 NR Description: putative xyloglucan endotransglycosylase [Cucumis
  misc_feature (1)..(203): Homolog of NCBI NO: 15235997 NR Description: xyloglucan endotransglycosylase (XTR-6)
  misc_feature (1)..(203): Homolog of NCBI NO: 15242781 NR Description: xyloglucan endotransglycosylase (TCH4)
  misc_feature (1)..(204): Homolog of NCBI NO: 15238891 NR Description: xyloglucan endotransglycosylase, putative
  misc_feature (1)..(204): Homolog of NCBI NO: 15218642 NR Description: xyloglucan endotransglycosylase, putative
  misc_feature (1)..(204): Homolog of NCBI NO: 15234681 NR Description: xyloglucan endotransglycosylase, putative
  misc_feature (1)..(204): Homolog of NCBI NO: 15215690 NR Description: AT4g30290/F17I23_370 [Arabidopsis thaliana]
  misc_feature (1)..(204): Homolog of NCBI NO: 15234701 NR Description: xyloglucan endotransglycosylase, putative
MKLVPGNSAGTVTTFYLKSPGTTWDEIDFEFLGNISGHPYTLHTNVYTKGSGDKEQQFHLWFDPTANFHTYCITWNPQRIIFTVDGIPIREFMNAESRGVPFPTKQPMRLYASLWEAEHWATRGGLEKTDWSKAPFTAYYRNYNVEGCVWVNGKSVCPANSQWFTQKLDSNGQTRMKGVQSKYMVYNYCSDKKRFPRGVPPECS

SEQ ID NO: 44121 - DNA, 689 bp, Arabidopsis thaliana
  misc_feature (1)..(689): Ceres Seq. ID no. 12466272
  misc_feature: MA Experiment ID: 20000171 Result: Up-regulated in Transcription
  misc_feature: MA Experiment 20000171 PARAMETER Experiment Name: At_42deg_Heat_P Parameter: Age (day) Value: 14
  misc_feature: MA Experiment 20000171 PARAMETER Experiment Name: At_42deg_Heat_P Parameter: Organism Value: A. thaliana
  misc_feature: MA Experiment 20000171 PARAMETER Experiment Name: At_42deg_Heat_P Parameter: Plant Line Value: WS
  misc_feature: MA Experiment 20000171 PARAMETER Experiment Name: At_42deg_Heat_P Parameter: Temperature (deg C) Value: 42 vs. 22
  misc_feature: MA Experiment 20000171 PARAMETER Experiment Name: At_42deg_Heat_P Parameter: Timepoint (hr) Value: 1
  misc_feature: MA Experiment 20000171 PARAMETER Experiment Name: At_42deg_Heat_P Parameter: Tissue Value: Aerial
  misc_feature: MA Experiment ID: 20000173 Result: Up-regulated in Transcription
  misc_feature: MA Experiment 20000173 PARAMETER Experiment Name: At_42deg_Heat_P Parameter: Age (day) Value: 14
  misc_feature: MA Experiment 20000173 PARAMETER Experiment Name: At_42deg_Heat_P Parameter: Organism Value: A. thaliana
  misc_feature: MA Experiment 20000173 PARAMETER Experiment Name: At_42deg_Heat_P Parameter: Plant Line Value: WS
  misc_feature: MA Experiment 20000173 PARAMETER Experiment Name: At_42deg_Heat_P Parameter: Temperature (deg C) Value: 42 vs. 22
  misc_feature: MA Experiment 20000173 PARAMETER Experiment Name: At_42deg_Heat_P Parameter: Timepoint (hr) Value: 6
  misc_feature: MA Experiment 20000173 PARAMETER Experiment Name: At_42deg_Heat_P Parameter: Tissue Value: Aerial
  misc_feature: MA Experiment ID: 20000182 Result: Up-regulated in Transcription
  misc_feature: MA Experiment 20000182 PARAMETER Experiment Name: At_2mM_SA_P Parameter: Age (day) Value: 14
  misc_feature: MA Experiment 20000182 PARAMETER Experiment Name: At_2mM_SA_P Parameter: Organism Value: A. thaliana
  misc_feature: MA Experiment 20000182 PARAMETER Experiment Name: At_2mM_SA_P Parameter: Plant Line Value: WS
  misc_feature: MA Experiment 20000182 PARAMETER Experiment Name: At_2mM_SA_P Parameter: Timepoint (hr) Value: 6
  misc_feature: MA Experiment 20000182 PARAMETER Experiment Name: At_2mM_SA_P Parameter: Tissue Value: Aerial
  misc_feature: MA Experiment 20000182 PARAMETER Experiment Name: At_2mM_SA_P Parameter: Treatment Value: 2mM SA vs. No Treatment
  misc_feature: MA Experiment ID: 20000437 Result: Up-regulated in Transcription
  misc_feature: MA Experiment 20000437 PARAMETER Experiment Name: At_Drought_P Parameter: Age (day) Value: 8
  misc_feature: MA Experiment 20000437 PARAMETER Experiment Name: At_Drought_P Parameter: Organism Value: A. thaliana
  misc_feature: MA Experiment 20000437 PARAMETER Experiment Name: At_Drought_P Parameter: Plant Line Value: WS
  misc_feature: MA Experiment 20000437 PARAMETER Experiment Name: At_Drought_P Parameter: Timepoint (hr) Value: 24
  misc_feature: MA Experiment 20000437 PARAMETER Experiment Name: At_Drought_P Parameter: Tissue Value: Whole Plant
  misc_feature: MA Experiment 20000437 PARAMETER Experiment Name: At_Drought_P Parameter: Treatment Value: Drought vs. No Drought
  misc_feature: MA Experiment ID: 20000443 Result: Up-regulated in Transcription
  misc_feature: MA Experiment 20000443 PARAMETER Experiment Name: At_1uM_BR-BRZ__P Parameter: Tissue Value: Shoot Apices
  misc_feature: MA Experiment 20000443 PARAMETER Experiment Name: At_1uM_BR-BRZ__P Parameter: Treatment Value: 1uM BRZ vs. No Treatment
  misc_feature: MA Experiment ID: 20000709 Result: Up-regulated in Transcription
  misc_feature: MA Experiment 20000709 PARAMETER Experiment Name: At_15mM_NH4NO3_L-to-H_P Parameter: Age (hr) Value: 14
  misc_feature: MA Experiment 20000709 PARAMETER Experiment Name: At_15mM_NH4NO3_L-to-H_P Parameter: Organism Value: A. thaliana
  misc_feature: MA Experiment 20000709 PARAMETER Experiment Name: At_15mM_NH4NO3_L-to-H_P Parameter: Plant Line Value: WS
  misc_feature: MA Experiment 20000709 PARAMETER Experiment Name: At_15mM_NH4NO3_L-to-H_P Parameter: Timepoint (hr) Value: 4
  misc_feature: MA Experiment 20000709 PARAMETER Experiment Name: At_15mM_NH4NO3_L-to-H_P Parameter: Tissue Value: Aerial
  misc_feature: MA Experiment 20000709 PARAMETER Experiment Name: At_15mM_NH4NO3_L-to-H_P Parameter: Treatment Value: 15mM NH4NO3 vs. 30mM Mannitol
  misc_feature: MA Experiment ID: 20001248 Result: Down-regulated in Transcription
  misc_feature: MA Experiment 20001248 PARAMETER Experiment Name: At_Far-red-induction_P Parameter: Age (day) Value: 7
  misc_feature: MA Experiment 20001248 PARAMETER Experiment Name: At_Far-red-induction_P Parameter: Light Value: Far-red vs. White
  misc_feature: MA Experiment 20001248 PARAMETER Experiment Name: At_Far-red-induction_P Parameter: Organism Value: A. thaliana
  misc_feature: MA Experiment 20001248 PARAMETER Experiment Name: At_Far-red-induction_P Parameter: Plant Line Value: Columbia
  misc_feature: MA Experiment 20001248 PARAMETER Experiment Name: At_Far-red-induction_P Parameter: Timepoint (hr) Value: 4
  misc_feature: MA Experiment 20001248 PARAMETER Experiment Name: At_Far-red-induction_P Parameter: Tissue Value: Whole Plant
  misc_feature: MA Experiment ID: 20001555 Result: Up-regulated in Transcription
  misc_feature: MA Experiment 20001555 PARAMETER Experiment Name: At_Drought_Soil_Dry_P Parameter: Age (day) Value: 24
  misc_feature: MA Experiment 20001555 PARAMETER Experiment Name: At_Drought_Soil_Dry_P Parameter: Organism Value: A. thaliana
  misc_feature: MA Experiment 20001555 PARAMETER Experiment Name: At_Drought_Soil_Dry_P Parameter: Plant Line Value: WS
  misc_feature: MA Experiment 20001555 PARAMETER Experiment Name: At_Drought_Soil_Dry_P Parameter: Post Timepoint (hr) Value: None
  misc_feature: MA Experiment 20001555 PARAMETER Experiment Name: At_Drought_Soil_Dry_P Parameter: Post-Treatment Value: None
  misc_feature: MA Experiment 20001555 PARAMETER Experiment Name: At_Drought_Soil_Dry_P Parameter: Timepoint (day) Value: 10
  misc_feature: MA Experiment 20001555 PARAMETER Experiment Name: At_Drought_Soil_Dry_P Parameter: Treatment Value: Drought vs. No Drought
  misc_feature: MA Experiment ID: 20001556 Result: Up-regulated in Transcription
  misc_feature: MA Experiment 20001556 PARAMETER Experiment Name: At_Drought_Soil_Dry_P Parameter: Age (day) Value: 26
  misc_feature: MA Experiment 20001556 PARAMETER Experiment Name: At_Drought_Soil_Dry_P Parameter: Organism Value: A. thaliana
  misc_feature: MA Experiment 20001556 PARAMETER Experiment Name: At_Drought_Soil_Dry_P Parameter: Plant Line Value: WS
  misc_feature: MA Experiment 20001556 PARAMETER Experiment Name: At_Drought_Soil_Dry_P Parameter: Post Timepoint (hr) Value: None
  misc_feature: MA Experiment 20001556 PARAMETER Experiment Name: At_Drought_Soil_Dry_P Parameter: Post-Treatment Value: None
  misc_feature: MA Experiment 20001556 PARAMETER Experiment Name: At_Drought_Soil_Dry_P Parameter: Timepoint (day) Value: 12
  misc_feature: MA Experiment 20001556 PARAMETER Experiment Name: At_Drought_Soil_Dry_P Parameter: Treatment Value: Drought vs. No Drought
  misc_feature: MA Experiment ID: 20001558 Result: Up-regulated in Transcription
  misc_feature: MA Experiment 20001558 PARAMETER Experiment Name: At_Drought_Soil_Dry_P Parameter: Age (day) Value: 27
  misc_feature: MA Experiment 20001558 PARAMETER Experiment Name: At_Drought_Soil_Dry_P Parameter: Organism Value: A. thaliana
  misc_feature: MA Experiment 20001558 PARAMETER Experiment Name: At_Drought_Soil_Dry_P Parameter: Plant Line Value: WS
  misc_feature: MA Experiment 20001558 PARAMETER Experiment Name: At_Drought_Soil_Dry_P Parameter: Post Timepoint (hr) Value: 6
  misc_feature: MA Experiment 20001558 PARAMETER Experiment Name: At_Drought_Soil_Dry_P Parameter: Post-Treatment Value: Re-Water vs. No Drought
  misc_feature: MA Experiment 20001558 PARAMETER Experiment Name: At_Drought_Soil_Dry_P Parameter: Timepoint (day) Value: 13
  misc_feature: MA Experiment 20001558 PARAMETER Experiment Name: At_Drought_Soil_Dry_P Parameter: Treatment Value: Drought vs. No Drought
  misc_feature: MA Experiment ID: 20001772 Result: Up-regulated in Transcription
  misc_feature: MA Experiment 20001772 PARAMETER Experiment Name: At_Far-red-enriched-adult_P Parameter: Age (day) Value: 29
  misc_feature: MA Experiment 20001772 PARAMETER Experiment Name: At_Far-red-enriched-adult_P Parameter: Light Value: Far-red enriched vs. White
  misc_feature: MA Experiment 20001772 PARAMETER Experiment Name: At_Far-red-enriched-adult_P Parameter: Organism Value: A. thaliana
  misc_feature: MA Experiment 20001772 PARAMETER Experiment Name: At_Far-red-enriched-adult_P Parameter: Plant Line Value: Columbia
  misc_feature: MA Experiment 20001772 PARAMETER Experiment Name: At_Far-red-enriched-adult_P Parameter: Timepoint (hr) Value: 24
  misc_feature: MA Experiment 20001772 PARAMETER Experiment Name: At_Far-red-enriched-adult_P Parameter: Tissue Value: Aerial
  misc_feature: MA Experiment ID: 20001773 Result: Up-regulated in Transcription
  misc_feature: MA Experiment 20001773 PARAMETER Experiment Name: At_Far-red-enriched-adult_P Parameter: Age (day) Value: 30
  misc_feature: MA Experiment 20001773 PARAMETER Experiment Name: At_Far-red-enriched-adult_P Parameter: Light Value: Far-red enriched vs. White
  misc_feature: MA Experiment 20001773 PARAMETER Experiment Name: At_Far-red-enriched-adult_P Parameter: Organism Value: A. thaliana
  misc_feature: MA Experiment 20001773 PARAMETER Experiment Name: At_Far-red-enriched-adult_P Parameter: Plant Line Value: Columbia
  misc_feature: MA Experiment 20001773 PARAMETER Experiment Name: At_Far-red-enriched-adult_P Parameter: Timepoint (hr) Value: 48
  misc_feature: MA Experiment 20001773 PARAMETER Experiment Name: At_Far-red-enriched-adult_P Parameter: Tissue Value: Aerial
  misc_feature: MA Experiment ID: 20001774 Result: Up-regulated in Transcription
  misc_feature: MA Experiment 20001774 PARAMETER Experiment Name: At_Far-red-enriched-adult_P Parameter: Age (day) Value: 31
  misc_feature: MA Experiment 20001774 PARAMETER Experiment Name: At_Far-red-enriched-adult_P Parameter: Light Value: Far-red enriched vs. White
  misc_feature: MA Experiment 20001774 PARAMETER Experiment Name: At_Far-red-enriched-adult_P Parameter: Organism Value: A. thaliana
  misc_feature: MA Experiment 20001774 PARAMETER Experiment Name: At_Far-red-enriched-adult_P Parameter: Plant Line Value: Columbia
  misc_feature: MA Experiment 20001774 PARAMETER Experiment Name: At_Far-red-enriched-adult_P Parameter: Timepoint (hr) Value: 72
  misc_feature: MA Experiment 20001774 PARAMETER Experiment Name: At_Far-red-enriched-adult_P Parameter: Tissue Value: Aerial
  misc_feature: MA Experiment ID: 20001904 Result: Up-regulated in Transcription
  misc_feature: MA Experiment 20001904 PARAMETER Experiment Name: At_Drought_Reproduction_P Parameter: Age (day) Value: 37
  misc_feature: MA Experiment 20001904 PARAMETER Experiment Name: At_Drought_Reproduction_P Parameter: Organism Value: A. thaliana
  misc_feature: MA Experiment 20001904 PARAMETER Experiment Name: At_Drought_Reproduction_P Parameter: Plant Line Value: WS
  misc_feature: MA Experiment 20001904 PARAMETER Experiment Name: At_Drought_Reproduction_P Parameter: Timepoint (day) Value: 7
  misc_feature: MA Experiment 20001904 PARAMETER Experiment Name: At_Drought_Reproduction_P Parameter: Tissue Value: Rosettes
  misc_feature: MA Experiment 20001904 PARAMETER Experiment Name: At_Drought_Reproduction_P Parameter: Treatment Value: Drought vs. No Drought
  misc_feature: Phenotype: ROSETTE LEAVES Disorganized Rosette-Disorganized Rosette
  misc_feature: Phenotype: ROSETTE LEAVES Shape-Lanceolate
  misc_feature: Phenotype: ROSETTE LEAVES Shape-Lanceolate
  misc_feature: Phenotype: ROSETTE LEAVES Shape-Serrate
  misc_feature: Phenotype: ROSETTE LEAVES Other
  misc_feature: Phenotype: CAULINE LEAVES Size-Large
  misc_feature: Phenotype: INFLORESCENCE Flowering Time-Late Flowering
  misc_feature: Phenotype: INFLORESCENCE Flowering Time-Late Flowering
  misc_feature: Phenotype: INFLORESCENCE Height-Short
  misc_feature: Phenotype: INFLORESCENCE Strength-Strong
  misc_feature: Phenotype: ROSETTE LEAVES Shape-Lanceolate
  misc_feature: Phenotype: WHOLE PLANT Size-Small
  misc_feature: Phenotype: INFLORESCENCE Height-Short
  misc_feature: Phenotype: INFLORESCENCE Other
  misc_feature: Phenotype: FERTILITY Fertility-Sterile
  misc_feature: Phenotype: ROSETTE LEAVES Shape-Lanceolate
  misc_feature: Phenotype: WHOLE PLANT Size-Small
  misc_feature: Phenotype: INFLORESCENCE Height-Short
  misc_feature: Phenotype: INFLORESCENCE Other
  misc_feature: Phenotype: FERTILITY Fertility-Sterile
  misc_feature: Phenotype: ROSETTE LEAVES Shape-Serrate
  misc_feature: Phenotype: WHOLE PLANT Color-Dark Green
aacaaggagcaaagagttcatagcaaagcaaagcttcaaaacagagcaaacgcaaagagtagcaatcacaagaggaagtgaaacgatgtctctaattccaagcatcttcggaggaagaagaacaaacgttttcgatccgttctcgctggatgttttcgatccgttcgaaggtttcttgacgccgtcaggattggcaaacgcacccgctatggatgtggcagcgttcacaaacgctaaagtggattggagggagacacctgaggcgcacgtgttcaaggcggatttaccgggactgaggaaggaagaggtgaaagtggaggttgaggatggcaacatacttcagataagtggagagaggagcaatgagaatgaagagaagaatgacaagtggcaccgtgtggagcggtcgagtgggaagttcacgaggaggtttaggctgccggagaatgctaagatggaggaaatcaaagccagtatggaaaatggtgtgttgtcggttaccgtgcccaaggtgccagagaaaaagccagaggttaagtccattgatatctctggttaaagggaattgtttaagaccaaaaatgtgtgatggtagtgaaataattggtgtgtgatgtgtttttcttgtaatcatgaatctcgttgtatcattatcataaaatcttaataagagtgtgctttgtctcgtg

SEQ ID NO: 44122 - protein, 185 aa, Arabidopsis thaliana
  peptide (1)..(185): Ceres Seq. ID no. 12466273
  misc_feature (29)..(185): Homolog of NCBI NO: 11276924 NR Description: heat-shock protein, low molecular weight
  misc_feature (29)..(185): Homolog of NCBI NO: 15238509 NR Description: heat shock protein 18
  misc_feature (29)..(185): Homolog of NCBI NO: 21618106 NR Description: heat shock protein 18 [Arabidopsis thaliana]
  misc_feature (29)..(185): Homolog of NCBI NO: 8250119 NR Description: HSP17.7-a protein [Brassica oleracea]
  misc_feature (29)..(185): Homolog of NCBI NO: 15294150 NR Description: AT3g46230/F12M12_200 [Arabidopsis thaliana]
  misc_feature (29)..(185): Homolog of NCBI NO: 15231372 NR Description: heat shock protein 17
  misc_feature (29)..(185): Homolog of NCBI NO: 7441319 NR Description: heat-shock protein 17.6, low molecular weight -
  misc_feature (29)..(185): Homolog of NCBI NO: 81639 NR Description: heat shock protein 17 - Arabidopsis thaliana
  misc_feature (29)..(185): Homolog of NCBI NO: 15220832 NR Description: 17.6 kDa heat shock protein (AA 1-156); protein
  misc_feature (1)..(185): Homolog of NCBI NO: 8671873 NR Description: Contains similarity to 17.6 KD class I heat shock from Arabidopsis thaliana gi|P13853 and contains Hsp20/alpha PF|00011 and signal peptidase I PF|00461 domains. ESTs
TRSKEFIAKQSFKTEQTQRVAITRGSETMSLIPSIFGGRRTNVFDPFSLDVFDPFEGFLTPSGLANAPAMDVAAFTNAKVDWRETPEAHVFKADLPGLRKEEVKVEVEDGNILQISGERSNENEEKNDKWHRVERSSGKFTRRFRLPENAKMEEIKASMENGVLSVTVPKVPEKKPEVKSIDISG

SEQ ID NO: 44123 - protein, 157 aa, Arabidopsis thaliana
  peptide (1)..(157): Ceres Seq. ID no. 12466274
  misc_feature (1)..(157): Homolog of NCBI NO: 11276924 NR Description: heat-shock protein, low molecular weight
  misc_feature (1)..(157): Homolog of NCBI NO: 15238509 NR Description: heat shock protein 18
  misc_feature (1)..(157): Homolog of NCBI NO: 21618106 NR Description: heat shock protein 18 [Arabidopsis thaliana]
  misc_feature (1)..(157): Homolog of NCBI NO: 8250119 NR Description: HSP17.7-a protein [Brassica oleracea]
  misc_feature (1)..(157): Homolog of NCBI NO: 15294150 NR Description: AT3g46230/F12M12_200 [Arabidopsis thaliana]
  misc_feature (1)..(157): Homolog of NCBI NO: 15231372 NR Description: heat shock protein 17
  misc_feature (1)..(157): Homolog of NCBI NO: 7441319 NR Description: heat-shock protein 17.6, low molecular weight -
  misc_feature (1)..(157): Homolog of NCBI NO: 81639 NR Description: heat shock protein 17 - Arabidopsis thaliana
  misc_feature (1)..(157): Homolog of NCBI NO: 15220832 NR Description: 17.6 kDa heat shock protein (AA 1-156); protein
  misc_feature (1)..(157): Homolog of NCBI NO: 8671873 NR Description: Contains similarity to 17.6 KD class I heat shock from Arabidopsis thaliana gi|P13853 and contains Hsp20/alpha PF|00011 and signal peptidase I PF|00461 domains. ESTs
MSLIPSIFGGRRTNVFDPFSLDVFDPFEGFLTPSGLANAPAMDVAAFTNAKVDWRETPEAHVFKADLPGLRKEEVKVEVEDGNILQISGERSNENEEKNDKWHRVERSSGKFTRRFRLPENAKMEEIKASMENGVLSVTVPKVPEKKPEVKSIDISG

SEQ ID NO: 44124 - protein, 116 aa, Arabidopsis thaliana
  peptide (1)..(116): Ceres Seq. ID no. 12466275
  misc_feature (1)..(116): Homolog of NCBI NO: 11276924 NR Description: heat-shock protein, low molecular weight
  misc_feature (1)..(116): Homolog of NCBI NO: 15238509 NR Description: heat shock protein 18
  misc_feature (1)..(116): Homolog of NCBI NO: 21618106 NR Description: heat shock protein 18 [Arabidopsis thaliana]
  misc_feature (1)..(116): Homolog of NCBI NO: 8250119 NR Description: HSP17.7-a protein [Brassica oleracea]
  misc_feature (1)..(116): Homolog of NCBI NO: 15294150 NR Description: AT3g46230/F12M12_200 [Arabidopsis thaliana]
  misc_feature (1)..(116): Homolog of NCBI NO: 15231372 NR Description: heat shock protein 17
  misc_feature (1)..(116): Homolog of NCBI NO: 7441319 NR Description: heat-shock protein 17.6, low molecular weight -
  misc_feature (1)..(116): Homolog of NCBI NO: 81639 NR Description: heat shock protein 17 - Arabidopsis thaliana
  misc_feature (1)..(116): Homolog of NCBI NO: 15220832 NR Description: 17.6 kDa heat shock protein (AA 1-156); protein
  misc_feature (1)..(116): Homolog of NCBI NO: 8671873 NR Description: Contains similarity to 17.6 KD class I heat shock from Arabidopsis thaliana gi|P13853 and contains Hsp20/alpha PF|00011 and signal peptidase I PF|00461 domains. ESTs
MDVAAFTNAKVDWRETPEAHVFKADLPGLRKEEVKVEVEDGNILQISGERSNENEEKNDKWHRVERSSGKFTRRFRLPENAKMEEIKASMENGVLSVTVPKVPEKKPEVKSIDISG

SEQ ID NO: 44125 - DNA, 1267 bp, Arabidopsis thaliana; identical to SEQ ID NO: 26325
  misc_feature (1)..(1267): Ceres Seq. ID no. 12488498
  misc_feature: MA Experiment ID: 20000179 Result: Up-regulated in Transcription
  misc_feature: MA Experiment 20000179 PARAMETER Experiment Name: At_Germinating_Seeds_P Parameter: Age (hr) Value: 6 vs. 0
  misc_feature: MA Experiment 20000179 PARAMETER Experiment Name: At_Germinating_Seeds_P Parameter: Tissue Value: Germinating Seeds
  misc_feature: MA Experiment ID: 20000180 Result: Up-regulated in Transcription
  misc_feature: MA Experiment 20000180 PARAMETER Experiment Name: At_Germinating_Seeds_P Parameter: Age (hr) Value: 24 vs. 0
  misc_feature: MA Experiment 20000180 PARAMETER Experiment Name: At_Germinating_Seeds_P Parameter: Tissue Value: Germinating Seeds
  misc_feature: MA Experiment ID: 20000185 Result: Down-regulated in Transcription
  misc_feature: MA Experiment 20000185 PARAMETER Experiment Name: At_Roots__P Parameter: Age (day) Value: 7 vs. 21
  misc_feature: MA Experiment 20000185 PARAMETER Experiment Name: At_Roots__P Parameter: Organism Value: A. thaliana
  misc_feature: MA Experiment 20000185 PARAMETER Experiment Name: At_Roots__P Parameter: Tissue Value: Roots vs. Whole Plant
  misc_feature: MA Experiment ID: 20000227 Result: Down-regulated in Transcription
  misc_feature: MA Experiment 20000227 PARAMETER Experiment Name: At_Root-Tips-vs-Tops_P Parameter: Tissue Value: Root Tips vs. Root Tops
  misc_feature: MA Experiment ID: 20000264 Result: Down-regulated in Transcription
  misc_feature: MA Experiment 20000264 PARAMETER Experiment Name: At_Open_Flower_P Parameter: Age (day) Value: 21
  misc_feature: MA Experiment 20000264 PARAMETER Experiment Name: At_Open_Flower_P Parameter: Plant Line Value: WS
  misc_feature: MA Experiment 20000264 PARAMETER Experiment Name: At_Open_Flower_P Parameter: Tissue Value: Open Flower vs. Whole Plant
  misc_feature: MA Experiment ID: 20000269 Result: Down-regulated in Transcription
  misc_feature: MA Experiment 20000269 PARAMETER Experiment Name: At_1mM_KNO3_L-vs-H_Roots_P Parameter: Age (day) Value: 7,10,12
  misc_feature: MA Experiment 20000269 PARAMETER Experiment Name: At_1mM_KNO3_L-vs-H_Roots_P Parameter: Organism Value: A. thaliana
  misc_feature: MA Experiment 20000269 PARAMETER Experiment Name: At_1mM_KNO3_L-vs-H_Roots_P Parameter: Plant Line Value: WS
  misc_feature: MA Experiment 20000269 PARAMETER Experiment Name: At_1mM_KNO3_L-vs-H_Roots_P Parameter: Timepoint (day) Value: 7,10,12
  misc_feature: MA Experiment 20000269 PARAMETER Experiment Name: At_1mM_KNO3_L-vs-H_Roots_P Parameter: Tissue Value: Roots
  misc_feature: MA Experiment 20000269 PARAMETER Experiment Name: At_1mM_KNO3_L-vs-H_Roots_P Parameter: Treatment Value: 1mM KNO3 vs. 50mM KNO3
  misc_feature: MA Experiment ID: 20000286 Result: Down-regulated in Transcription
  misc_feature: MA Experiment 20000286 PARAMETER Experiment Name: At_Open_Flower_P Parameter: Age (day) Value: 21
  misc_feature: MA Experiment 20000286 PARAMETER Experiment Name: At_Open_Flower_P Parameter: Plant Line Value: WS
  misc_feature: MA Experiment 20000286 PARAMETER Experiment Name: At_Open_Flower_P Parameter: Tissue Value: Half Open vs. Whole Plant
  misc_feature: MA Experiment ID: 20000439 Result: Down-regulated in Transcription
  misc_feature: MA Experiment 20000439 PARAMETER Experiment Name: At_Roots__P Parameter: Age (day) Value: 14 vs. 21
  misc_feature: MA Experiment 20000439 PARAMETER Experiment Name: At_Roots__P Parameter: Organism Value: A. thaliana
  misc_feature: MA Experiment 20000439 PARAMETER Experiment Name: At_Roots__P Parameter: Tissue Value: Roots vs. Whole Plant
  misc_feature: MA Experiment ID: 20000441 Result: Up-regulated in Transcription
  misc_feature: MA Experiment 20000441 PARAMETER Experiment Name: At_1uM_BR-BRZ__P Parameter: Tissue Value: Shoot Apices
  misc_feature: MA Experiment 20000441 PARAMETER Experiment Name: At_1uM_BR-BRZ__P Parameter: Treatment Value: 1uM BR vs. No Treatment
  misc_feature: MA Experiment ID: 20000578 Result: Down-regulated in Transcription
  misc_feature: MA Experiment 20000578 PARAMETER Experiment Name: At_CS3726__P Parameter: Organism Value: A. thaliana
  misc_feature: MA Experiment 20000578 PARAMETER Experiment Name: At_CS3726__P Parameter: Plant Line Value: CS3726
  misc_feature: MA Experiment 20000578 PARAMETER Experiment Name: At_CS3726__P Parameter: Tissue Value: Whole Plant
  misc_feature: MA Experiment ID: 20000794 Result: Down-regulated in Transcription
  misc_feature: MA Experiment 20000794 PARAMETER Experiment Name: At_Petals_P Parameter: Age (day) Value: 23-25 days
  misc_feature: MA Experiment 20000794 PARAMETER Experiment Name: At_Petals_P Parameter: Plant Line Value: WS
  misc_feature: MA Experiment 20000794 PARAMETER Experiment Name: At_Petals_P Parameter: Tissue Value: Petals vs. Whole plant
  misc_feature: MA Experiment ID: 20001557 Result: Down-regulated in Transcription
  misc_feature: MA Experiment 20001557 PARAMETER Experiment Name: At_Drought_Soil_Dry_P Parameter: Age (day) Value: 27
  misc_feature: MA Experiment 20001557 PARAMETER Experiment Name: At_Drought_Soil_Dry_P Parameter: Organism Value: A. thaliana
  misc_feature: MA Experiment 20001557 PARAMETER Experiment Name: At_Drought_Soil_Dry_P Parameter: Plant Line Value: WS
  misc_feature: MA Experiment 20001557 PARAMETER Experiment Name: At_Drought_Soil_Dry_P Parameter: Post Timepoint (hr) Value: 3
  misc_feature: MA Experiment 20001557 PARAMETER Experiment Name: At_Drought_Soil_Dry_P Parameter: Post-Treatment Value: Re-Water vs. No Drought
  misc_feature: MA Experiment 20001557 PARAMETER Experiment Name: At_Drought_Soil_Dry_P Parameter: Timepoint (day) Value: 13
  misc_feature: MA Experiment 20001557 PARAMETER Experiment Name: At_Drought_Soil_Dry_P Parameter: Treatment Value: Drought vs. No Drought
  misc_feature: MA Experiment ID: 20001906 Result: Down-regulated in Transcription
  misc_feature: MA Experiment 20001906 PARAMETER Experiment Name: At_Drought_Reproduction_P Parameter: Age (day) Value: 35
  misc_feature: MA Experiment 20001906 PARAMETER Experiment Name: At_Drought_Reproduction_P Parameter: Organism Value: A. thaliana
  misc_feature: MA Experiment 20001906 PARAMETER Experiment Name: At_Drought_Reproduction_P Parameter: Plant Line Value: WS
  misc_feature: MA Experiment 20001906 PARAMETER Experiment Name: At_Drought_Reproduction_P Parameter: Timepoint (day) Value: 5
  misc_feature: MA Experiment 20001906 PARAMETER Experiment Name: At_Drought_Reproduction_P Parameter: Tissue Value: Siliques
  misc_feature: MA Experiment 20001906 PARAMETER Experiment Name: At_Drought_Reproduction_P Parameter: Treatment Value: Drought vs. No Drought

SEQ ID NO: 44126 - protein, 251 aa, Arabidopsis thaliana; identical to SEQ ID NO: 26326
  peptide (1)..(251): Ceres Seq. ID no. 12488499
  misc_feature (62)..(224): Pfam Name: Chlorophyll A-B binding protein Pfam Description: Chlorophyll A-B binding protein
  misc_feature (62)..(224): Pfam Name: Chlorophyll A-B binding protein Pfam Description: Chlorophyll A-B binding protein
  misc_feature (62)..(224): Pfam Name: Chlorophyll A-B binding protein Pfam Description: Chlorophyll A-B binding protein
  misc_feature (18)..(251): Homolog of NCBI NO: 9624495 NR Description: chlorophyll a/b-binding protein precursor
  misc_feature (53)..(249): Homolog of NCBI NO: 1076630 NR Description: light-harvesting chlorophyll a - common tobacco
  misc_feature (1)..(249): Homolog of NCBI NO: 20218813 NR Description: putative chlorophyll a/b-binding protein type 4
  misc_feature (8)..(249): Homolog of NCBI NO: 322393 NR Description: chlorophyll a/b-binding protein type 4,
  misc_feature (1)..(249): Homolog of NCBI NO: 322392 NR Description: chlorophyll a/b-binding protein type 4,
  misc_feature (18)..(251): Homolog of NCBI NO: 9624495 NR Description: chlorophyll a/b-binding protein precursor
  misc_feature (1)..(249): Homolog of NCBI NO: 20218813 NR Description: putative chlorophyll a/b-binding protein type 4
  misc_feature (1)..(249): Homolog of NCBI NO: 322392 NR Description: chlorophyll a/b-binding protein type 4,
  misc_feature (8)..(249): Homolog of NCBI NO: 322393 NR Description: chlorophyll a/b-binding protein type 4,
  misc_feature (1)..(249): Homolog of NCBI NO: 20218813 NR Description: putative chlorophyll a/b-binding protein type 4
  misc_feature (53)..(249): Homolog of NCBI NO: 1076630 NR Description: light-harvesting chlorophyll a - common tobacco
  misc_feature (18)..(251): Homolog of NCBI NO: 9624495 NR Description: chlorophyll a/b-binding protein precursor
  misc_feature (1)..(251): Homolog of NCBI NO: 30692874 NR Description: light-harvesting chlorophyll a/b binding protein
  misc_feature (1)..(251): Homolog of NCBI NO: 100196 NR Description: chlorophyll a/b-binding protein (cab-11) - tomato
  misc_feature (1)..(249): Homolog of NCBI NO: 11277626 NR Description: chlorophyll a/b-binding protein [imported] -
  misc_feature (1)..(251): Homolog of NCBI NO: 100197 NR Description: chlorophyll a/b-binding protein (cab-12) - tomato
  misc_feature (1)..(250): Homolog of NCBI NO: 13385204 NR Description: cDNA sequence BC002118; hypothetical protein,
  misc_feature (1)..(251): Homolog of NCBI NO: 30692874 NR Description: light-harvesting chlorophyll a/b binding protein
  misc_feature (1)..(251): Homolog of NCBI NO: 100196 NR Description: chlorophyll a/b-binding protein (cab-11) - tomato
  misc_feature (1)..(249): Homolog of NCBI NO: 11277626 NR Description: chlorophyll a/b-binding protein [imported] -
  misc_feature (1)..(251): Homolog of NCBI NO: 100197 NR Description: chlorophyll a/b-binding protein (cab-12) - tomato
  misc_feature (1)..(250): Homolog of NCBI NO: 13385204 NR Description: cDNA sequence BC002118; hypothetical protein,
  misc_feature (1)..(249): Homolog of NCBI NO: 322392 NR Description: chlorophyll a/b-binding protein type 4,
  misc_feature (8)..(249): Homolog of NCBI NO: 322393 NR Description: chlorophyll a/b-binding protein type 4,
  misc_feature (53)..(249): Homolog of NCBI NO: 1076630 NR Description: light-harvesting chlorophyll a - common tobacco
  misc_feature (1)..(250): Homolog of NCBI NO: 13385204 NR Description: cDNA sequence BC002118; hypothetical protein,
  misc_feature (1)..(251): Homolog of NCBI NO: 100197 NR Description: chlorophyll a/b-binding protein (cab-12) - tomato
  misc_feature (1)..(249): Homolog of NCBI NO: 11277626 NR Description: chlorophyll a/b-binding protein [imported] -
  misc_feature (1)..(251): Homolog of NCBI NO: 100196 NR Description: chlorophyll a/b-binding protein (cab-11) - tomato
  misc_feature (1)..(251): Homolog of NCBI NO: 30692874 NR Description: light-harvesting chlorophyll a/b binding protein

SEQ ID NO: 44127 - protein, 148 aa, Arabidopsis thaliana; identical to SEQ ID NO: 26327
  peptide (1)..(148): Ceres Seq. ID no. 12488500
  misc_feature (1)..(121): Pfam Name: Chlorophyll A-B binding protein Pfam Description: Chlorophyll A-B binding protein
  misc_feature (1)..(121): Pfam Name: Chlorophyll A-B binding protein Pfam Description: Chlorophyll A-B binding protein
  misc_feature (1)..(121): Pfam Name: Chlorophyll A-B binding protein Pfam Description: Chlorophyll A-B binding protein
  misc_feature (1)..(148): Homolog of NCBI NO: 9624495 NR Description: chlorophyll a/b-binding protein precursor
  misc_feature (1)..(146): Homolog of NCBI NO: 1076630 NR Description: light-harvesting chlorophyll a - common tobacco
  misc_feature (1)..(146): Homolog of NCBI NO: 20218813 NR Description: putative chlorophyll a/b-binding protein type 4
  misc_feature (1)..(146): Homolog of NCBI NO: 322393 NR Description: chlorophyll a/b-binding protein type 4,
  misc_feature (1)..(146): Homolog of NCBI NO: 322392 NR Description: chlorophyll a/b-binding protein type 4,
  misc_feature (1)..(148): Homolog of NCBI NO: 9624495 NR Description: chlorophyll a/b-binding protein precursor
  misc_feature (1)..(146): Homolog of NCBI NO: 20218813 NR Description: putative chlorophyll a/b-binding protein type 4
  misc_feature (1)..(146): Homolog of NCBI NO: 322392 NR Description: chlorophyll a/b-binding protein type 4,
  misc_feature (1)..(146): Homolog of NCBI NO: 322393 NR Description: chlorophyll a/b-binding protein type 4,
  misc_feature (1)..(146): Homolog of NCBI NO: 20218813 NR Description: putative chlorophyll a/b-binding protein type 4
  misc_feature (1)..(146): Homolog of NCBI NO: 1076630 NR Description: light-harvesting chlorophyll a - common tobacco
  misc_feature (1)..(148): Homolog of NCBI NO: 9624495 NR Description: chlorophyll a/b-binding protein precursor
  misc_feature (1)..(148): Homolog of NCBI NO: 30692874 NR Description: light-harvesting chlorophyll a/b binding protein
  misc_feature (1)..(148): Homolog of NCBI NO: 100196 NR Description: chlorophyll a/b-binding protein (cab-11) - tomato
  misc_feature (1)..(146): Homolog of NCBI NO: 11277626 NR Description: chlorophyll a/b-binding protein [imported] -
  misc_feature (1)..(148): Homolog of NCBI NO: 100197 NR Description: chlorophyll a/b-binding protein (cab-12) - tomato
  misc_feature (1)..(147): Homolog of NCBI NO: 13385204 NR Description: cDNA sequence BC002118; hypothetical protein,
  misc_feature (1)..(148): Homolog of NCBI NO: 30692874 NR Description: light-harvesting chlorophyll a/b binding protein
  misc_feature (1)..(148): Homolog of NCBI NO: 100196 NR Description: chlorophyll a/b-binding protein (cab-11) - tomato
  misc_feature (1)..(146): Homolog of NCBI NO: 11277626 NR Description: chlorophyll a/b-binding protein [imported] -
  misc_feature (1)..(148): Homolog of NCBI NO: 100197 NR Description: chlorophyll a/b-binding protein (cab-12) - tomato
  misc_feature (1)..(147): Homolog of NCBI NO: 13385204 NR Description: cDNA sequence BC002118; hypothetical protein,
  misc_feature (1)..(146): Homolog of NCBI NO: 322392 NR Description: chlorophyll a/b-binding protein type 4,
  misc_feature (1)..(146): Homolog of NCBI NO: 322393 NR Description: chlorophyll a/b-binding protein type 4,
  misc_feature (1)..(146): Homolog of NCBI NO: 1076630 NR Description: light-harvesting chlorophyll a - common tobacco
  misc_feature (1)..(147): Homolog of NCBI NO: 13385204 NR Description: cDNA sequence BC002118; hypothetical protein,
  misc_feature (1)..(148): Homolog of NCBI NO: 100197 NR Description: chlorophyll a/b-binding protein (cab-12) - tomato
  misc_feature (1)..(146): Homolog of NCBI NO: 11277626 NR Description: chlorophyll a/b-binding protein [imported] -
  misc_feature (1)..(148): Homolog of NCBI NO: 100196 NR Description: chlorophyll a/b-binding protein (cab-11) - tomato
  misc_feature (1)..(148): Homolog of NCBI NO: 30692874 NR Description: light-harvesting chlorophyll a/b binding protein

SEQ ID NO: 44128 - protein, 142 aa, Arabidopsis thaliana; identical to SEQ ID NO: 26328
  peptide (1)..(142): Ceres Seq. ID no. 12488501
  misc_feature (1)..(115): Pfam Name: Chlorophyll A-B binding protein Pfam Description: Chlorophyll A-B binding protein
  misc_feature (1)..(115): Pfam Name: Chlorophyll A-B binding protein Pfam Description: Chlorophyll A-B binding protein
  misc_feature (1)..(115): Pfam Name: Chlorophyll A-B binding protein Pfam Description: Chlorophyll A-B binding protein
  misc_feature (1)..(142): Homolog of NCBI NO: 9624495 NR Description: chlorophyll a/b-binding protein precursor
  misc_feature (1)..(140): Homolog of NCBI NO: 1076630 NR Description: light-harvesting chlorophyll a - common tobacco
  misc_feature (1)..(140): Homolog of NCBI NO: 20218813 NR Description: putative chlorophyll a/b-binding protein type 4
  misc_feature (1)..(140): Homolog of NCBI NO: 322393 NR Description: chlorophyll a/b-binding protein type 4,
  misc_feature (1)..(140): Homolog of NCBI NO: 322392 NR Description: chlorophyll a/b-binding protein type 4,
  misc_feature (1)..(142): Homolog of NCBI NO: 9624495 NR Description: chlorophyll a/b-binding protein precursor
  misc_feature (1)..(140): Homolog of NCBI NO: 20218813 NR Description: putative chlorophyll a/b-binding protein type 4
  misc_feature (1)..(140): Homolog of NCBI NO: 322392 NR Description: chlorophyll a/b-binding protein type 4,
  misc_feature (1)..(140): Homolog of NCBI NO: 322393 NR Description: chlorophyll a/b-binding protein type 4,
  misc_feature (1)..(140): Homolog of NCBI NO: 20218813 NR Description: putative chlorophyll a/b-binding protein type 4
  misc_feature (1)..(140): Homolog of NCBI NO: 1076630 NR Description: light-harvesting chlorophyll a - common tobacco
  misc_feature (1)..(142): Homolog of NCBI NO: 9624495 NR Description: chlorophyll a/b-binding protein precursor
  misc_feature (1)..(142): Homolog of NCBI NO: 30692874 NR Description: light-harvesting chlorophyll a/b binding protein
  misc_feature (1)..(142): Homolog of NCBI NO: 100196 NR Description: chlorophyll a/b-binding protein (cab-11) - tomato
  misc_feature (1)..(140): Homolog of NCBI NO: 11277626 NR Description: chlorophyll a/b-binding protein [imported] -
  misc_feature (1)..(142): Homolog of NCBI NO: 100197 NR Description: chlorophyll a/b-binding protein (cab-12) - tomato
  misc_feature (1)..(141): Homolog of NCBI NO: 13385204 NR Description: cDNA sequence BC002118; hypothetical protein,
  misc_feature (1)..(142): Homolog of NCBI NO: 30692874 NR Description: light-harvesting chlorophyll a/b binding protein
  misc_feature (1)..(142): Homolog of NCBI NO: 100196 NR Description: chlorophyll a/b-binding protein (cab-11) - tomato
  misc_feature (1)..(140): Homolog of NCBI NO: 11277626 NR Description: chlorophyll a/b-binding protein [imported] -
  misc_feature (1)..(142): Homolog of NCBI NO: 100197 NR Description: chlorophyll a/b-binding protein (cab-12) - tomato
  misc_feature (1)..(141): Homolog of NCBI NO: 13385204 NR Description: cDNA sequence BC002118; hypothetical protein,
  misc_feature (1)..(140): Homolog of NCBI NO: 322392 NR Description: chlorophyll a/b-binding protein type 4,
  misc_feature (1)..(140): Homolog of NCBI NO: 322393 NR Description: chlorophyll a/b-binding protein type 4,
  misc_feature (1)..(140): Homolog of NCBI NO: 1076630 NR Description: light-harvesting chlorophyll a - common tobacco
  misc_feature (1)..(141): Homolog of NCBI NO: 13385204 NR Description: cDNA sequence BC002118; hypothetical protein,
  misc_feature (1)..(142): Homolog of NCBI NO: 100197 NR Description: chlorophyll a/b-binding protein (cab-12) - tomato
  misc_feature (1)..(140): Homolog of NCBI NO: 11277626 NR Description: chlorophyll a/b-binding protein [imported] -
  misc_feature (1)..(142): Homolog of NCBI NO: 100196 NR Description: chlorophyll a/b-binding protein (cab-11) - tomato
  misc_feature (1)..(142): Homolog of NCBI NO: 30692874 NR Description: light-harvesting chlorophyll a/b binding protein

SEQ ID NO: 44129 - DNA, 2045 bp, Arabidopsis thaliana
  misc_feature (1)..(2045): Ceres Seq. ID no. 13504748
  misc_feature: MA Experiment ID: 20000069 Result: Down-regulated in Transcription
  misc_feature: MA Experiment 20000069 PARAMETER Experiment Name: At_100uM_ABA_Mutants_cDNA_P Parameter: Plant Line Value: CS23
  misc_feature: MA Experiment 20000069 PARAMETER Experiment Name: At_100uM_ABA_Mutants_cDNA_P Parameter: Timepoint (hr) Value: 6
  misc_feature: MA Experiment 20000069 PARAMETER Experiment Name: At_100uM_ABA_Mutants_cDNA_P Parameter: Tissue Value: Aerial
  misc_feature: MA Experiment 20000069 PARAMETER Experiment Name: At_100uM_ABA_Mutants_cDNA_P Parameter: Treatment Value: 100uM ABA vs. No Treatment
  misc_feature: MA Experiment ID: 20000070 Result: Down-regulated in Transcription
  misc_feature: MA Experiment 20000070 PARAMETER Experiment Name: At_100uM_ABA_Mutants_cDNA_P Parameter: Plant Line Value: CS24
  misc_feature: MA Experiment 20000070 PARAMETER Experiment Name: At_100uM_ABA_Mutants_cDNA_P Parameter: Timepoint (hr) Value: 6
  misc_feature: MA Experiment 20000070 PARAMETER Experiment Name: At_100uM_ABA_Mutants_cDNA_P Parameter: Tissue Value: Aerial
  misc_feature: MA Experiment 20000070 PARAMETER Experiment Name: At_100uM_ABA_Mutants_cDNA_P Parameter: Treatment Value: 100uM ABA vs. No Treatment
  misc_feature: MA Experiment ID: 20000071 Result: Down-regulated in Transcription
  misc_feature: MA Experiment 20000071 PARAMETER Experiment Name: At_100uM_ABA_Mutants_cDNA_P Parameter: Plant Line Value: CS8104
  misc_feature: MA Experiment 20000071 PARAMETER Experiment Name: At_100uM_ABA_Mutants_cDNA_P Parameter: Timepoint (hr) Value: 6
  misc_feature: MA Experiment 20000071 PARAMETER Experiment Name: At_100uM_ABA_Mutants_cDNA_P Parameter: Tissue Value: Aerial
  misc_feature: MA Experiment 20000071 PARAMETER Experiment Name: At_100uM_ABA_Mutants_cDNA_P Parameter: Treatment Value: 100uM ABA vs. No Treatment
  misc_feature: MA Experiment ID: 20000086 Result: Down-regulated in Transcription
  misc_feature: MA Experiment 20000086 PARAMETER Experiment Name: At_100uM_ABA_Mutants_cDNA_P Parameter: Plant Line Value: CS22
  misc_feature: MA Experiment 20000086 PARAMETER Experiment Name: At_100uM_ABA_Mutants_cDNA_P Parameter: Timepoint (hr) Value: 6
  misc_feature: MA Experiment 20000086 PARAMETER Experiment Name: At_100uM_ABA_Mutants_cDNA_P Parameter: Tissue Value: Aerial
  misc_feature: MA Experiment 20000086 PARAMETER Experiment Name: At_100uM_ABA_Mutants_cDNA_P Parameter: Treatment Value: 100uM ABA vs. No Treatment
  misc_feature: MA Experiment ID: 20000089 Result: Down-regulated in Transcription
  misc_feature: MA Experiment ID: 20000090 Result: Down-regulated in Transcription
  misc_feature: MA Experiment ID: 20000117 Result: Down-regulated in Transcription
  misc_feature: MA Experiment 20000117 PARAMETER Experiment Name: At_100uM_ABA_Mutants_cDNA_P Parameter: Plant Line Value: Columbia
  misc_feature: MA Experiment 20000117 PARAMETER Experiment Name: At_100uM_ABA_Mutants_cDNA_P Parameter: Timepoint (hr) Value: 6
  misc_feature: MA Experiment 20000117 PARAMETER Experiment Name: At_100uM_ABA_Mutants_cDNA_P Parameter: Tissue Value: Aerial
  misc_feature: MA Experiment 20000117 PARAMETER Experiment Name: At_100uM_ABA_Mutants_cDNA_P Parameter: Treatment Value: 100uM ABA vs. No Treatment
  misc_feature: MA Experiment ID: 20000438 Result: Up-regulated in Transcription
  misc_feature: MA Experiment 20000438 PARAMETER Experiment Name: At_Shoots__P Parameter: Age (day) Value: 14
  misc_feature: MA Experiment 20000438 PARAMETER Experiment Name: At_Shoots__P Parameter: Tissue Value: Shoots vs. Whole Plant
  misc_feature: MA Experiment ID: 20001911 Result: Up-regulated in Transcription
  misc_feature: MA Experiment 20001911 PARAMETER Experiment Name: At_Drought_Reproduction_P Parameter: Age (day) Value: 40
  misc_feature: MA Experiment 20001911 PARAMETER Experiment Name: At_Drought_Reproduction_P Parameter: Organism Value: A. thaliana
  misc_feature: MA Experiment 20001911 PARAMETER Experiment Name: At_Drought_Reproduction_P Parameter: Plant Line Value: WS
  misc_feature: MA Experiment 20001911 PARAMETER Experiment Name: At_Drought_Reproduction_P Parameter: Timepoint (day) Value: 10
  misc_feature: MA Experiment 20001911 PARAMETER Experiment Name: At_Drought_Reproduction_P Parameter: Tissue Value: Flowers
  misc_feature: MA Experiment 20001911 PARAMETER Experiment Name: At_Drought_Reproduction_P Parameter: Treatment Value: Drought vs. No Drought
cggagaaaaagaaagagagagagagaagaagaatcgtggagatggcttcgaccccgaagcttaccagtacaatttcatcatcttctccatctcttcaattcctctgcaaaaaactcccaatcgcaattcatctaccatcatcttcttcctctagctttctctcgcttcctaaaaccctaacctctctctattctctccgtccccgtatcgccctactctcaaaccaccgctattaccactctcgccggttttctgtttgtgccagtaccgataatggagctgaatcagaccgccactacgattttgatctcttcactatcggtgccggaagcggcggcgtccgcgcctctcgcttcgccactagcttcggtgcatccgccgccgtttgcgagcttcctttttccactatctcttccgatactgctggaggcgttggaggaacgtgtgtattgagaggatgtgtaccaaagaagttacttgtgtatgcatccaaatacagtcatgagtttgaagacagtcatggatttggttggaagtatgagactgagccttctcatgattggactactttgattgctaacaagaatgctgagttacagcggttgactggtatttataagaatatactgagcaaagctaatgtcaagttgattgaaggtcgtggaaaggttatagacccacacactgttgatgtagatgggaaaatctatactacgaggaatattctgattgcagttggtggacgtcctttcattcctgacattccaggaaaagagtttgctattgattctgatgccgcgcttgatttgccttccaagcctaagaaaattgcaatagttggtggtggctacatagccctggagtttgcggggatcttcaatggtcttaactgtgaagttcatgtatttataaggcaaaagaaggtgctgaggggatttgatgaagatgtcagggatttcgttggagagcagatgtctttaagaggtattgagtttcacactgaagaatcccctgaagccatcatcaaagctggagatggctcgttctctctgaagaccagcaagggaactgttgagggattttcgcatgttatgtttgcaactggtcgcaagcccaacacaaagaacttagggttggagaatgttggcgttaaaatggcgaaaaatggagcaatagaggttgacgaatattcacagacatctgttccatccatctgggctgttggggatgttactgaccgaatcaatttgactccagttgctttgatggagggaggtgcattggctaaaactttgtttcaaaatgagccaacaaagcctgattatagagctgttccctgcgccgttttctcccagccacctattggaacagttggtctaactgaagagcaggccatagaacaatatggtgatgtggatgtttacacatcgaactttaggccattaaaggctaccctttcaggacttccagaccgagtatttatgaaactcattgtctgtgcaaacaccaataaagttctcggtgttcacatgtgtggagaagattcaccagaaatcatccagggatttggggttgcagttaaagctggtttaactaaggccgactttgatgctacagtgggtgttcaccccacagcagctgaggagtttgtcactatgagggctccaaccaggaaattccgcaaagactcctctgagggaaaggcaagtcctgaagctaaaacagctgctggggtgtagagaaggttgcaaaaaagattgtatttacggcattggagccccctgataaggagaacattgtgtctgtgaagaagaagcttttcttttggcagagaatattttttcataatgtcgtgtgaagatatgatcgctgtcctgcaatacttttgatcgtttgacacacgaccaaattcctcgagagagagaggttgtaactattccgaaagagctctaaaactgaagctttcagttcttgtgacatcataatgaaggctgtatagatataacagtttcgagttttatttggatttgtagtatttttgtttt

SEQ ID NO: 44130 - protein, 578 aa, Arabidopsis thaliana
  peptide (1)..(578): Ceres Seq. ID no. 13504749
  misc_feature (102)..(419): Pfam Name: Pyridine nucleotide-disulphide oxidoreductase Pfam Description: Pyridine nucleotide-disulphide oxidoreductase
  misc_feature (102)..(419): Pfam Name: Pyridine nucleotide-disulphide oxidoreductase Pfam Description: Pyridine nucleotide-disulphide oxidoreductase
  misc_feature (102)..(419): Pfam Name: Pyridine nucleotide-disulphide oxidoreductase Pfam Description: Pyridine nucleotide-disulphide oxidoreductase
  misc_feature (16)..(578): Homolog of NCBI NO: 1708059 NR Description: Glutathione reductase, chloroplast precursor (GR)
  misc_feature (16)..(578): Homolog of NCBI NO: 2425107 NR Description: glutathione reductase (NADPH) [Vitis vinifera]
  misc_feature (14)..(575): Homolog of NCBI NO: 4704611 NR Description: glutathione reductase [Brassica juncea]
  misc_feature (16)..(578): Homolog of NCBI NO: 1708059 NR Description: Glutathione reductase, chloroplast precursor (GR)
  misc_feature (14)..(575): Homolog of NCBI NO: 4704611 NR Description: glutathione reductase [Brassica juncea]
  misc_feature (14)..(578): Homolog of NCBI NO: 15451194 NR Description: Gluthatione reductase, chloroplast precursor
  misc_feature (16)..(578): Homolog of NCBI NO: 2425107 NR Description: glutathione reductase (NADPH) [Vitis vinifera]
  misc_feature (14)..(578): Homolog of NCBI NO: 15232559 NR Description: gluthatione reductase, chloroplast [Arabidopsis
  misc_feature (14)..(578): Homolog of NCBI NO: 15451194 NR Description: Gluthatione reductase, chloroplast precursor
  misc_feature (14)..(575): Homolog of NCBI NO: 13448672 NR Description: glutathione reductase [Brassica juncea]
  misc_feature (14)..(575): Homolog of NCBI NO: 4704611 NR Description: glutathione reductase [Brassica juncea]
  misc_feature (16)..(578): Homolog of NCBI NO: 1708059 NR Description: Glutathione reductase, chloroplast precursor (GR)
  misc_feature (14)..(578): Homolog of NCBI NO: 15232559 NR Description: gluthatione reductase, chloroplast [Arabidopsis
  misc_feature (14)..(575): Homolog of NCBI NO: 13448672 NR Description: glutathione reductase [Brassica juncea]
  misc_feature (16)..(578): Homolog of NCBI NO: 2425107 NR Description: glutathione reductase (NADPH) [Vitis vinifera]
  misc_feature (14)..(575): Homolog of NCBI NO: 13448672 NR Description: glutathione reductase [Brassica juncea]
  misc_feature (14)..(578): Homolog of NCBI NO: 15451194 NR Description: Gluthatione reductase, chloroplast precursor
  misc_feature (14)..(578): Homolog of NCBI NO: 15232559 NR Description: gluthatione reductase, chloroplast [Arabidopsis
EKKKERERRRIVEMASTPKLTSTISSSSPSLQFLCKKLPIAIHLPSSSSSSFLSLPKTLTSLYSLRPRIALLSNHRYYHSRRFSVCASTDNGAESDRHYDFDLFTIGAGSGGVRASRFATSFGASAAVCELPFSTISSDTAGGVGGTCVLRGCVPKKLLVYASKYSHEFEDSHGFGWKYETEPSHDWTTLIANKNAELQRLTGIYKNILSKANVKLIEGRGKVIDPHTVDVDGKIYTTRNILIAVGGRPFIPDIPGKEFAIDSDAALDLPSKPKKIAIVGGGYIALEFAGIFNGLNCEVHVFIRQKKVLRGFDEDVRDFVGEQMSLRGIEFHTEESPEAIIKAGDGSFSLKTSKGTVEGFSHVMFATGRKPNTKNLGLENVGVKMAKNGAIEVDEYSQTSVPSIWAVGDVTDRINLTPVALMEGGALAKTLFQNEPTKPDYRAVPCAVFSQPPIGTVGLTEEQAIEQYGDVDVYTSNFRPLKATLSGLPDRVFMKLIVCANTNKVLGVHMCGEDSPEIIQGFGVAVKAGLTKADFDATVGVHPTAAEEFVTMRAPTRKFRKDSSEGKASPEAKTAAGV

SEQ ID NO: 44131 - protein, 565 aa, Arabidopsis thaliana
  peptide (1)..(565): Ceres Seq. ID no. 13504750
  misc_feature (89)..(406): Pfam Name: Pyridine nucleotide-disulphide oxidoreductase Pfam Description: Pyridine nucleotide-disulphide oxidoreductase
  misc_feature (89)..(406): Pfam Name: Pyridine nucleotide-disulphide oxidoreductase Pfam Description: Pyridine nucleotide-disulphide oxidoreductase
  misc_feature (89)..(406): Pfam Name: Pyridine nucleotide-disulphide oxidoreductase Pfam Description: Pyridine nucleotide-disulphide oxidoreductase
  misc_feature (3)..(565): Homolog of NCBI NO: 1708059 NR Description: Glutathione reductase, chloroplast precursor (GR)
  misc_feature (3)..(565): Homolog of NCBI NO: 2425107 NR Description: glutathione reductase (NADPH) [Vitis vinifera]
  misc_feature (1)..(562): Homolog of NCBI NO: 4704611 NR Description: glutathione reductase [Brassica juncea]
  misc_feature (3)..(565): Homolog of NCBI NO: 1708059 NR Description: Glutathione reductase, chloroplast precursor (GR)
  misc_feature (1)..(562): Homolog of NCBI NO: 4704611 NR Description: glutathione reductase [Brassica juncea]
  misc_feature (1)..(565): Homolog of NCBI NO: 15451194 NR Description: Gluthatione reductase, chloroplast precursor
  misc_feature (3)..(565): Homolog of NCBI NO: 2425107 NR Description: glutathione reductase (NADPH) [Vitis vinifera]
  misc_feature (1)..(565): Homolog of NCBI NO: 15232559 NR Description: gluthatione reductase, chloroplast [Arabidopsis
  misc_feature (1)..(565): Homolog of NCBI NO: 15451194 NR Description: Gluthatione reductase, chloroplast precursor
  misc_feature (1)..(562): Homolog of NCBI NO: 13448672 NR Description: glutathione reductase [Brassica juncea]
  misc_feature (1)..(562): Homolog of NCBI NO: 4704611 NR Description: glutathione reductase [Brassica juncea]
  misc_feature (3)..(565): Homolog of NCBI NO: 1708059 NR Description: Glutathione reductase, chloroplast precursor (GR)
  misc_feature (1)..(565): Homolog of NCBI NO: 15232559 NR Description: gluthatione reductase, chloroplast [Arabidopsis
  misc_feature (1)..(562): Homolog of NCBI NO: 13448672 NR Description: glutathione reductase [Brassica juncea]
  misc_feature (3)..(565): Homolog of NCBI NO: 2425107 NR Description: glutathione reductase (NADPH) [Vitis vinifera]
  misc_feature (1)..(562): Homolog of NCBI NO: 13448672 NR Description: glutathione reductase [Brassica juncea]
  misc_feature (1)..(565): Homolog of NCBI NO: 15451194 NR Description: Gluthatione reductase, chloroplast precursor
  misc_feature (1)..(565): Homolog of NCBI NO: 15232559 NR Description: gluthatione reductase, chloroplast [Arabidopsis
MASTPKLTSTISSSSPSLQFLCKKLPIAIHLPSSSSSSFLSLPKTLTSLYSLRPRIALLSNHRYYHSRRFSVCASTDNGAESDRHYDFDLFTIGAGSGGVRASRFATSFGASAAVCELPFSTISSDTAGGVGGTCVLRGCVPKKLLVYASKYSHEFEDSHGFGWKYETEPSHDWTTLIANKNAELQRLTGIYKNILSKANVKLIEGRGKVIDPHTVDVDGKIYTTRNILIAVGGRPFIPDIPGKEFAIDSDAALDLPSKPKKIAIVGGGYIALEFAGIFNGLNCEVHVFIRQKKVLRGFDEDVRDFVGEQMSLRGIEFHTEESPEAIIKAGDGSFSLKTSKGTVEGFSHVMFATGRKPNTKNLGLENVGVKMAKNGAIEVDEYSQTSVPSIWAVGDVTDRINLTPVALMEGGALAKTLFQNEPTKPDYRAVPCAVFSQPPIGTVGLTEEQAIEQYGDVDVYTSNFRPLKATLSGLPDRVFMKLIVCANTNKVLGVHMCGEDSPEIIQGFGVAVKAGLTKADFDATVGVHPTAAEEFVTMRAPTRKFRKDSSEGKASPEAKTAAGV

SEQ ID NO: 44132 - DNA, 1420 bp, Arabidopsis thaliana
  misc_feature (1)..(1420): Ceres Seq. ID no. 13503804
  misc_feature: MA Experiment ID: 20000314 Result: Down-regulated in Transcription
  misc_feature: MA Experiment 20000314 PARAMETER Experiment Name: At_14day_Shoots-Roots_Sub_P Parameter: Age (day) Value: 14
  misc_feature: MA Experiment 20000314 PARAMETER Experiment Name: At_14day_Shoots-Roots_Sub_P Parameter: Organism Value: A. thaliana
  misc_feature: MA Experiment 20000314 PARAMETER Experiment Name: At_14day_Shoots-Roots_Sub_P Parameter: Plant Line Value: WS
  misc_feature: MA Experiment 20000314 PARAMETER Experiment Name: At_14day_Shoots-Roots_Sub_P Parameter: Tissue Value: Roots vs. Whole Plant
  misc_feature: MA Experiment ID: 20000315 Result: Down-regulated in Transcription
  misc_feature: MA Experiment 20000315 PARAMETER Experiment Name: At_14day_Shoots-Roots_Sub_P Parameter: Age (day) Value: 14
  misc_feature: MA Experiment 20000315 PARAMETER Experiment Name: At_14day_Shoots-Roots_Sub_P Parameter: Organism Value: A. thaliana
  misc_feature: MA Experiment 20000315 PARAMETER Experiment Name: At_14day_Shoots-Roots_Sub_P Parameter: Plant Line Value: WS
  misc_feature: MA Experiment 20000315 PARAMETER Experiment Name: At_14day_Shoots-Roots_Sub_P Parameter: Tissue Value: Shoots vs. Whole Plant
  misc_feature: MA Experiment ID: 20000329 Result: Down-regulated in Transcription
  misc_feature: MA Experiment 20000329 PARAMETER Experiment Name: At_4deg_Cold_Sub_P Parameter: Age (day) Value: 14
  misc_feature: MA Experiment 20000329 PARAMETER Experiment Name: At_4deg_Cold_Sub_P Parameter: Organism Value: A. thaliana
  misc_feature: MA Experiment 20000329 PARAMETER Experiment Name: At_4deg_Cold_Sub_P Parameter: Plant Line Value: WS
  misc_feature: MA Experiment 20000329 PARAMETER Experiment Name: At_4deg_Cold_Sub_P Parameter: Temperature (deg C) Value: 4 vs. 22
  misc_feature: MA Experiment 20000329 PARAMETER Experiment Name: At_4deg_Cold_Sub_P Parameter: Timepoint (hr) Value: 6
  misc_feature: MA Experiment 20000329 PARAMETER Experiment Name: At_4deg_Cold_Sub_P Parameter: Tissue Value: Aerial
  misc_feature: MA Experiment ID: 20000332 Result: Down-regulated in Transcription
  misc_feature: MA Experiment 20000332 PARAMETER Experiment Name: At_4deg_Cold_Sub_P Parameter: Age (day) Value: 14
  misc_feature: MA Experiment 20000332 PARAMETER Experiment Name: At_4deg_Cold_Sub_P Parameter: Organism Value: A. thaliana
  misc_feature: MA Experiment 20000332 PARAMETER Experiment Name: At_4deg_Cold_Sub_P Parameter: Plant Line Value: WS
  misc_feature: MA Experiment 20000332 PARAMETER Experiment Name: At_4deg_Cold_Sub_P Parameter: Temperature (deg C) Value: 4 vs. 22
  misc_feature: MA Experiment 20000332 PARAMETER Experiment Name: At_4deg_Cold_Sub_P Parameter: Timepoint (hr) Value: 2
  misc_feature: MA Experiment 20000332 PARAMETER Experiment Name: At_4deg_Cold_Sub_P Parameter: Tissue Value: Aerial
  misc_feature: MA Experiment ID: 20000355 Result: Down-regulated in Transcription
  misc_feature: MA Experiment 20000355 PARAMETER Experiment Name: At_Siliques_Sub_P Parameter: Age (day) Value: 21
  misc_feature: MA Experiment 20000355 PARAMETER Experiment Name: At_Siliques_Sub_P Parameter: Organism Value: A. thaliana
  misc_feature: MA Experiment 20000355 PARAMETER Experiment Name: At_Siliques_Sub_P Parameter: Plant Line Value: WS
  misc_feature: MA Experiment 20000355 PARAMETER Experiment Name: At_Siliques_Sub_P Parameter: Tissue Value: Less Than 5mm Siliques vs. Whole Plant
tgccactcatttttcctatttttcgctttgcgtgccttcttatcaacttgtaaacaaagctacaaatatctttaaataaggacccaactctttttcaattcctcccatcaatcttcttcatttgttcttctgttggtggtggtgatctagttttcaaagaatcgattttgccaagtgggttcttcttgataacctttcttcttctttgaaatgggttcttctgtggagcagaacattcttgttactggtggtgctggctttatcgggacgcatactgttgttcaacttctcaaagatggttttaaggtttcgatcatcgataattttgataactctgttatcgaagctgttgatagagttagggagcttgttggtcctgatctctccaagaagctcgacttcaatctgggtgatctaagaaacaaaggggacattgagaaactattctccaagcagagatttgatgctgtgattcattttgcgggtcttaaagctgtgggtgagagtgttgaaaaccctcgccgctactttgacaataacttggttggaacaatcaatctatatgagaccatggcaaagtacaactgcaaaatgatggtgttttcatcttctgccactgtttatggacaacctgaaaagattccatgcatggaagactttgaattaaaggctatgaatccttatggtcgtactaagctctttcttgaagaaatagctagagatattcaaaaggcagaaccggaatggagaattattctgctgaggtacttcaatcctgtaggagcacatgagagtggcagtattggtgaggatccaaaaggcatccccaataacctcatgccttacatccaacaagtggccgttggacgtttaccggaactcaatgtctatggacatgactatcccaccgaggatggtagtgcggtaagagactacatccatgtgatggatttagcagatggccatatcgctgcgctcaggaagctatttgctgatccaaagattggttgtactgcttacaatctagggactggtcaaggaacgtctgtgttagaaatggttgcagcttttgaaaaagcttccggcaagaaaatcccgattaagctctgtccgagaaggtcaggagatgcaacagcagtttatgcttcaacagagaaggctgagaaagaacttggctggaaggcaaaatatggagtggatgagatgtgcagagatcagtggaaatgggcaaacaataatccatggggttaccagaataagctttgaatttacttcttttgtttggagttaccatttctaattactcaaatctaaaagaaagaaatatacatacatatgatgatatagttgtgctttatattccacatgtatcgaactgatctcttacttcgatgaataaaatggaaagttgatttgattg

SEQ ID NO: 44133 - protein, 351 aa, Arabidopsis thaliana
  peptide (1)..(351): Ceres Seq. ID no. 13503805
  misc_feature (9)..(344): Pfam Name: NAD dependent epimerase/dehydratase family Pfam Description: NAD dependent epimerase/dehydratase family
  misc_feature (9)..(344): Pfam Name: NAD dependent epimerase/dehydratase family Pfam Description: NAD dependent epimerase/dehydratase family
  misc_feature (7)..(349): Homolog of NCBI NO: 12643850 NR Description: Probable UDP-glucose 4-epimerase At4g10960
  misc_feature (7)..(350): Homolog of NCBI NO: 21553659 NR Description: UDP-galactose 4-epimerase-like protein
  misc_feature (7)..(347): Homolog of NCBI NO: 11386775 NR Description: UDP-glucose 4-epimerase GEPI48 (Galactowaldenase)
  misc_feature (8)..(347): Homolog of NCBI NO: 26106014 NR Description: putative UDP-glucose 4-epimerase
  misc_feature (7)..(350): Homolog of NCBI NO: 11386774 NR Description: UDP-glucose 4-epimerase GEPI42 (Galactowaldenase)
  misc_feature (7)..(349): Homolog of NCBI NO: 12643850 NR Description: Probable UDP-glucose 4-epimerase At4g10960
  misc_feature (7)..(347): Homolog of NCBI NO: 11386775 NR Description: UDP-glucose 4-epimerase GEPI48 (Galactowaldenase)
  misc_feature (7)..(350): Homolog of NCBI NO: 11386774 NR Description: UDP-glucose 4-epimerase GEPI42 (Galactowaldenase)
  misc_feature (1)..(351): Homolog of NCBI NO: 15222072 NR Description: UDP-glucose 4-epimerase (UDP-galactose
  misc_feature (1)..(351): Homolog of NCBI NO: 2129759 NR Description: UDPglucose 4-epimerase (EC 5.1.3.2) - Arabidopsis
  misc_feature (1)..(350): Homolog of NCBI NO: 18407751 NR Description: UDP-glucose 4-epimerase (UDP-galactose
  misc_feature (1)..(350): Homolog of NCBI NO: 25292327 NR Description: hypothetical protein F16M19.8 [imported] -
  misc_feature (7)..(350): Homolog of NCBI NO: 11386762 NR Description: UDP-glucose 4-epimerase (Galactowaldenase)
  misc_feature (8)..(347): Homolog of NCBI NO: 26106014 NR Description: putative UDP-glucose 4-epimerase
  misc_feature (7)..(350): Homolog of NCBI NO: 21553659 NR Description: UDP-galactose 4-epimerase-like protein
  misc_feature (7)..(350): Homolog of NCBI NO: 11386762 NR Description: UDP-glucose 4-epimerase (Galactowaldenase)
  misc_feature (1)..(350): Homolog of NCBI NO: 25292327 NR Description: hypothetical protein F16M19.8 [imported] -
  misc_feature (1)..(350): Homolog of NCBI NO: 18407751 NR Description: UDP-glucose 4-epimerase (UDP-galactose
  misc_feature (1)..(351): Homolog of NCBI NO: 2129759 NR Description: UDPglucose 4-epimerase (EC 5.1.3.2) - Arabidopsis
  misc_feature (1)..(351): Homolog of NCBI NO: 15222072 NR Description: UDP-glucose 4-epimerase (UDP-galactose
MGSSVEQNILVTGGAGFIGTHTVVQLLKDGFKVSIIDNFDNSVIEAVDRVRELVGPDLSKKLDFNLGDLRNKGDIEKLFSKQRFDAVIHFAGLKAVGESVENPRRYFDNNLVGTINLYETMAKYNCKMMVFSSSATVYGQPEKIPCMEDFELKAMNPYGRTKLFLEEIARDIQKAEPEWRIILLRYFNPVGAHESGSIGEDPKGIPNNLMPYIQQVAVGRLPELNVYGHDYPTEDGSAVRDYIHVMDLADGHIAALRKLFADPKIGCTAYNLGTGQGTSVLEMVAAFEKASGKKIPIKLCPRRSGDATAVYASTEKAEKELGWKAKYGVDEMCRDQWKWANNNPWGYQNKL

SEQ ID NO: 44134 - protein, 231 aa, Arabidopsis thaliana
  peptide (1)..(231): Ceres Seq. ID no. 13503806
  misc_feature (1)..(224): Pfam Name: NAD dependent epimerase/dehydratase family Pfam Description: NAD dependent epimerase/dehydratase family
  misc_feature (1)..(224): Pfam Name: NAD dependent epimerase/dehydratase family Pfam Description: NAD dependent epimerase/dehydratase family
  misc_feature (1)..(229): Homolog of NCBI NO: 12643850 NR Description: Probable UDP-glucose 4-epimerase At4g10960
  misc_feature (1)..(230): Homolog of NCBI NO: 21553659 NR Description: UDP-galactose 4-epimerase-like protein
  misc_feature (1)..(227): Homolog of NCBI NO: 11386775 NR Description: UDP-glucose 4-epimerase GEPI48 (Galactowaldenase)
  misc_feature (1)..(227): Homolog of NCBI NO: 26106014 NR Description: putative UDP-glucose 4-epimerase
  misc_feature (1)..(230): Homolog of NCBI NO: 11386774 NR Description: UDP-glucose 4-epimerase GEPI42 (Galactowaldenase)
  misc_feature (1)..(229): Homolog of NCBI NO: 12643850 NR Description: Probable UDP-glucose 4-epimerase At4g10960
  misc_feature (1)..(227): Homolog of NCBI NO: 11386775 NR Description: UDP-glucose 4-epimerase GEPI48 (Galactowaldenase)
  misc_feature (1)..(230): Homolog of NCBI NO: 11386774 NR Description: UDP-glucose 4-epimerase GEPI42 (Galactowaldenase)
  misc_feature (1)..(231): Homolog of NCBI NO: 15222072 NR Description: UDP-glucose 4-epimerase (UDP-galactose
  misc_feature (1)..(231): Homolog of NCBI NO: 2129759 NR Description: UDPglucose 4-epimerase (EC 5.1.3.2) - Arabidopsis
  misc_feature (1)..(230): Homolog of NCBI NO: 18407751 NR Description: UDP-glucose 4-epimerase (UDP-galactose
  misc_feature (1)..(230): Homolog of NCBI NO: 25292327 NR Description: hypothetical protein F16M19.8 [imported] -
  misc_feature (1)..(230): Homolog of NCBI NO: 11386762 NR Description: UDP-glucose 4-epimerase (Galactowaldenase)
  misc_feature (1)..(227): Homolog of NCBI NO: 26106014 NR Description: putative UDP-glucose 4-epimerase
  misc_feature (1)..(230): Homolog of NCBI NO: 21553659 NR Description: UDP-galactose 4-epimerase-like protein
  misc_feature (1)..(230): Homolog of NCBI NO: 11386762 NR Description: UDP-glucose 4-epimerase (Galactowaldenase)
  misc_feature (1)..(230): Homolog of NCBI NO: 25292327 NR Description: hypothetical protein F16M19.8 [imported] -
  misc_feature (1)..(230): Homolog of NCBI NO: 18407751 NR Description: UDP-glucose 4-epimerase (UDP-galactose
  misc_feature (1)..(231): Homolog of NCBI NO: 2129759 NR Description: UDPglucose 4-epimerase (EC 5.1.3.2) - Arabidopsis
  misc_feature (1)..(231): Homolog of NCBI NO: 15222072 NR Description: UDP-glucose 4-epimerase (UDP-galactose
MAKYNCKMMVFSSSATVYGQPEKIPCMEDFELKAMNPYGRTKLFLEEIARDIQKAEPEWRIILLRYFNPVGAHESGSIGEDPKGIPNNLMPYIQQVAVGRLPELNVYGHDYPTEDGSAVRDYIHVMDLADGHIAALRKLFADPKIGCTAYNLGTGQGTSVLEMVAAFEKASGKKIPIKLCPRRSGDATAVYASTEKAEKELGWKAKYGVDEMCRDQWKWANNNPWGYQNKL

SEQ ID NO: 44135 - protein, 224 aa, Arabidopsis thaliana
  peptide (1)..(224): Ceres Seq. ID no. 13503807
  misc_feature (1)..(217): Pfam Name: NAD dependent epimerase/dehydratase family Pfam Description: NAD dependent epimerase/dehydratase family
  misc_feature (1)..(217): Pfam Name: NAD dependent epimerase/dehydratase family Pfam Description: NAD dependent epimerase/dehydratase family
  misc_feature (1)..(222): Homolog of NCBI NO: 12643850 NR Description: Probable UDP-glucose 4-epimerase At4g10960
  misc_feature (1)..(223): Homolog of NCBI NO: 21553659 NR Description: UDP-galactose 4-epimerase-like protein
  misc_feature (1)..(220): Homolog of NCBI NO: 11386775 NR Description: UDP-glucose 4-epimerase GEPI48 (Galactowaldenase)
  misc_feature (1)..(220): Homolog of NCBI NO: 26106014 NR Description: putative UDP-glucose 4-epimerase
  misc_feature (1)..(223): Homolog of NCBI NO: 11386774 NR Description: UDP-glucose 4-epimerase GEPI42 (Galactowaldenase)
  misc_feature (1)..(222): Homolog of NCBI NO: 12643850 NR Description: Probable UDP-glucose 4-epimerase At4g10960
  misc_feature (1)..(220): Homolog of NCBI NO: 11386775 NR Description: UDP-glucose 4-epimerase GEPI48 (Galactowaldenase)
  misc_feature (1)..(223): Homolog of NCBI NO: 11386774 NR Description: UDP-glucose 4-epimerase GEPI42 (Galactowaldenase)
  misc_feature (1)..(224): Homolog of NCBI NO: 15222072 NR Description: UDP-glucose 4-epimerase (UDP-galactose
  misc_feature (1)..(224): Homolog of NCBI NO: 2129759 NR Description: UDPglucose 4-epimerase (EC 5.1.3.2) - Arabidopsis
  misc_feature (1)..(223): Homolog of NCBI NO: 18407751 NR Description: UDP-glucose 4-epimerase (UDP-galactose
  misc_feature (1)..(223): Homolog of NCBI NO: 25292327 NR Description: hypothetical protein F16M19.8 [imported] -
  misc_feature (1)..(223): Homolog of NCBI NO: 11386762 NR Description: UDP-glucose 4-epimerase (Galactowaldenase)
  misc_feature (1)..(220): Homolog of NCBI NO: 26106014 NR Description: putative UDP-glucose 4-epimerase
  misc_feature (1)..(223): Homolog of NCBI NO: 21553659 NR Description: UDP-galactose 4-epimerase-like protein
  misc_feature (1)..(223): Homolog of NCBI NO: 11386762 NR Description: UDP-glucose 4-epimerase (Galactowaldenase)
  misc_feature (1)..(223): Homolog of NCBI NO: 25292327 NR Description: hypothetical protein F16M19.8 [imported] -
  misc_feature (1)..(223): Homolog of NCBI NO: 18407751 NR Description: UDP-glucose 4-epimerase (UDP-galactose
  misc_feature (1)..(224): Homolog of NCBI NO: 2129759 NR Description: UDPglucose 4-epimerase (EC 5.1.3.2) - Arabidopsis
  misc_feature (1)..(224): Homolog of NCBI NO: 15222072 NR Description: UDP-glucose 4-epimerase (UDP-galactose
MMVFSSSATVYGQPEKIPCMEDFELKAMNPYGRTKLFLEEIARDIQKAEPEWRIILLRYFNPVGAHESGSIGEDPKGIPNNLMPYIQQVAVGRLPELNVYGHDYPTEDGSAVRDYIHVMDLADGHIAALRKLFADPKIGCTAYNLGTGQGTSVLEMVAAFEKASGKKIPIKLCPRRSGDATAVYASTEKAEKELGWKAKYGVDEMCRDQWKWANNNPWGYQNKL

SEQ ID NO: 44136 - DNA, 1387 bp, Arabidopsis thaliana; identical to SEQ ID NO: 34756
  misc_feature (1)..(1387): Ceres Seq. ID no. 13509801
  misc_feature: MA Experiment ID: 108461 Result: Up-regulated in Transcription
  misc_feature: MA Experiment 108461 PARAMETER Experiment Name: At_Germinating_Seeds_cDNA_P Parameter: Age (day) Value: 1 vs. 0
  misc_feature: MA Experiment 108461 PARAMETER Experiment Name: At_Germinating_Seeds_cDNA_P Parameter: Tissue Value: Germinating Seeds
  misc_feature: MA Experiment ID: 108462 Result: Up-regulated in Transcription
  misc_feature: MA Experiment 108462 PARAMETER Experiment Name: At_Germinating_Seeds_cDNA_P Parameter: Age (day) Value: 2 vs. 0
  misc_feature: MA Experiment 108462 PARAMETER Experiment Name: At_Germinating_Seeds_cDNA_P Parameter: Tissue Value: Germinating Seeds
  misc_feature: MA Experiment ID: 108463 Result: Up-regulated in Transcription
  misc_feature: MA Experiment 108463 PARAMETER Experiment Name: At_Germinating_Seeds_cDNA_P Parameter: Age (day) Value: 3 vs. 0
  misc_feature: MA Experiment 108463 PARAMETER Experiment Name: At_Germinating_Seeds_cDNA_P Parameter: Tissue Value: Germinating Seeds
  misc_feature: MA Experiment ID: 108464 Result: Up-regulated in Transcription
  misc_feature: MA Experiment 108464 PARAMETER Experiment Name: At_Germinating_Seeds_cDNA_P Parameter: Age (day) Value: 4 vs. 0
  misc_feature: MA Experiment 108464 PARAMETER Experiment Name: At_Germinating_Seeds_cDNA_P Parameter: Tissue Value: Germinating Seeds
  misc_feature: MA Experiment ID: 108488 Result: Up-regulated in Transcription
  misc_feature: MA Experiment ID: 108577 Result: Down-regulated in Transcription
  misc_feature: MA Experiment 108577 PARAMETER Experiment Name: At_42deg_Heat_cDNA_P Parameter: Temperature (deg C) Value: 42 vs. 22
  misc_feature: MA Experiment 108577 PARAMETER Experiment Name: At_42deg_Heat_cDNA_P Parameter: Timepoint (hr) Value: 6
  misc_feature: MA Experiment 108577 PARAMETER Experiment Name: At_42deg_Heat_cDNA_P Parameter: Tissue Value: Aerial
  misc_feature: MA Experiment ID: 108594 Result: Down-regulated in Transcription
  misc_feature: MA Experiment 108594 PARAMETER Experiment Name: At_Ler-rhl_Root_cDNA_P Parameter: Plant Line Value: null
  misc_feature: MA Experiment ID: 108609 Result: Up-regulated in Transcription
  misc_feature: MA Experiment 108609 PARAMETER Experiment Name: At_100uM_ABA_cDNA_P Parameter: Timepoint (hr) Value: 24
  misc_feature: MA Experiment 108609 PARAMETER Experiment Name: At_100uM_ABA_cDNA_P Parameter: Tissue Value: Aerial
  misc_feature: MA Experiment 108609 PARAMETER Experiment Name: At_100uM_ABA_cDNA_P Parameter: Treatment Value: 100uM ABA vs. No Treatment
  misc_feature: MA Experiment ID: 20000070 Result: Up-regulated in Transcription
  misc_feature: MA Experiment 20000070 PARAMETER Experiment Name: At_100uM_ABA_Mutants_cDNA_P Parameter: Plant Line Value: CS24
  misc_feature: MA Experiment 20000070 PARAMETER Experiment Name: At_100uM_ABA_Mutants_cDNA_P Parameter: Timepoint (hr) Value: 6
  misc_feature: MA Experiment 20000070 PARAMETER Experiment Name: At_100uM_ABA_Mutants_cDNA_P Parameter: Tissue Value: Aerial
  misc_feature: MA Experiment 20000070 PARAMETER Experiment Name: At_100uM_ABA_Mutants_cDNA_P Parameter: Treatment Value: 100uM ABA vs. No Treatment
  misc_feature: MA Experiment ID: 20000112 Result: Down-regulated in Transcription
  misc_feature: MA Experiment 20000112 PARAMETER Experiment Name: At_42deg_Heat_cDNA_P Parameter: Temperature (deg C) Value: 42 vs. 22
  misc_feature: MA Experiment 20000112 PARAMETER Experiment Name: At_42deg_Heat_cDNA_P Parameter: Timepoint (hr) Value: 2
  misc_feature: MA Experiment 20000112 PARAMETER Experiment Name: At_42deg_Heat_cDNA_P Parameter: Tissue Value: Aerial
  misc_feature: MA Experiment ID: 20000113 Result: Down-regulated in Transcription
  misc_feature: MA Experiment 20000113 PARAMETER Experiment Name: At_42deg_Heat_cDNA_P Parameter: Temperature (deg C) Value: 42 vs. 22
  misc_feature: MA Experiment 20000113 PARAMETER Experiment Name: At_42deg_Heat_cDNA_P Parameter: Timepoint (hr) Value: 8
  misc_feature: MA Experiment 20000113 PARAMETER Experiment Name: At_42deg_Heat_cDNA_P Parameter: Tissue Value: Aerial
  misc_feature: MA Experiment ID: 20000173 Result: Down-regulated in Transcription
  misc_feature: MA Experiment 20000173 PARAMETER Experiment Name: At_42deg_Heat_P Parameter: Age (day) Value: 14
  misc_feature: MA Experiment 20000173 PARAMETER Experiment Name: At_42deg_Heat_P Parameter: Organism Value: A. thaliana
  misc_feature: MA Experiment 20000173 PARAMETER Experiment Name: At_42deg_Heat_P Parameter: Plant Line Value: WS
  misc_feature: MA Experiment 20000173 PARAMETER Experiment Name: At_42deg_Heat_P Parameter: Temperature (deg C) Value: 42 vs. 22
  misc_feature: MA Experiment 20000173 PARAMETER Experiment Name: At_42deg_Heat_P Parameter: Timepoint (hr) Value: 6
  misc_feature: MA Experiment 20000173 PARAMETER Experiment Name: At_42deg_Heat_P Parameter: Tissue Value: Aerial
  misc_feature: MA Experiment ID: 20000180 Result: Up-regulated in Transcription
  misc_feature: MA Experiment 20000180 PARAMETER Experiment Name: At_Germinating_Seeds_P Parameter: Age (hr) Value: 24 vs. 0
  misc_feature: MA Experiment 20000180 PARAMETER Experiment Name: At_Germinating_Seeds_P Parameter: Tissue Value: Germinating Seeds
  misc_feature: MA Experiment ID: 20000224 Result: Up-regulated in Transcription
  misc_feature: MA Experiment ID: 20000264 Result: Down-regulated in Transcription
  misc_feature: MA Experiment 20000264 PARAMETER Experiment Name: At_Open_Flower_P Parameter: Age (day) Value: 21
  misc_feature: MA Experiment 20000264 PARAMETER Experiment Name: At_Open_Flower_P Parameter: Plant Line Value: WS
  misc_feature: MA Experiment 20000264 PARAMETER Experiment Name: At_Open_Flower_P Parameter: Tissue Value: Open Flower vs. Whole Plant
  misc_feature: MA Experiment ID: 20000265 Result: Down-regulated in Transcription
  misc_feature: MA Experiment 20000265 PARAMETER Experiment Name: At_Open_Flower_P Parameter: Age (day) Value: 21
  misc_feature: MA Experiment 20000265 PARAMETER Experiment Name: At_Open_Flower_P Parameter: Plant Line Value: WS
  misc_feature: MA Experiment 20000265 PARAMETER Experiment Name: At_Open_Flower_P Parameter: Tissue Value: Closed Flower vs. Whole Plant
  misc_feature: MA Experiment ID: 20000286 Result: Down-regulated in Transcription
  misc_feature: MA Experiment 20000286 PARAMETER Experiment Name: At_Open_Flower_P Parameter: Age (day) Value: 21
  misc_feature: MA Experiment 20000286 PARAMETER Experiment Name: At_Open_Flower_P Parameter: Plant Line Value: WS
  misc_feature: MA Experiment 20000286 PARAMETER Experiment Name: At_Open_Flower_P Parameter: Tissue Value: Half Open vs. Whole Plant
  misc_feature: MA Experiment ID: 20000452 Result: Up-regulated in Transcription
  misc_feature: MA Experiment 20000452 PARAMETER Experiment Name: At_CS6879_Shoots-Roots_P Parameter: Age (day) Value: 14
  misc_feature: MA Experiment 20000452 PARAMETER Experiment Name: At_CS6879_Shoots-Roots_P Parameter: Organism Value: A. thaliana
  misc_feature: MA Experiment 20000452 PARAMETER Experiment Name: At_CS6879_Shoots-Roots_P Parameter: Plant Line Value: CS6879 vs. WS
  misc_feature: MA Experiment 20000452 PARAMETER Experiment Name: At_CS6879_Shoots-Roots_P Parameter: Tissue Value: Shoots
  misc_feature: MA Experiment ID: 20000453 Result: Up-regulated in Transcription
  misc_feature: MA Experiment 20000453 PARAMETER Experiment Name: At_100uM_ABA_P Parameter: Age (day) Value: 15
  misc_feature: MA Experiment 20000453 PARAMETER Experiment Name: At_100uM_ABA_P Parameter: Organism Value: A. thaliana
  misc_feature: MA Experiment 20000453 PARAMETER Experiment Name: At_100uM_ABA_P Parameter: Plant Line Value: WS
  misc_feature: MA Experiment 20000453 PARAMETER Experiment Name: At_100uM_ABA_P Parameter: Timepoint (hr) Value: 24
  misc_feature: MA Experiment 20000453 PARAMETER Experiment Name: At_100uM_ABA_P Parameter: Tissue Value: Aerial
  misc_feature: MA Experiment 20000453 PARAMETER Experiment Name: At_100uM_ABA_P Parameter: Treatment Value: 100uM ABA vs. No Treatment
  misc_feature: MA Experiment ID: 20000527 Result: Down-regulated in Transcription
  misc_feature: MA Experiment 20000527 PARAMETER Experiment Name: At_10percent_PEG_P Parameter: Age (day) Value: 20
  misc_feature: MA Experiment 20000527 PARAMETER Experiment Name: At_10percent_PEG_P Parameter: Organism Value: A. thaliana
  misc_feature: MA Experiment 20000527 PARAMETER Experiment Name: At_10percent_PEG_P Parameter: Plant Line Value: WS
  misc_feature: MA Experiment 20000527 PARAMETER Experiment Name: At_10percent_PEG_P Parameter: Timepoint (day) Value: 20
  misc_feature: MA Experiment 20000527 PARAMETER Experiment Name: At_10percent_PEG_P Parameter: Tissue Value: Whole Plant
  misc_feature: MA Experiment 20000527 PARAMETER Experiment Name: At_10percent_PEG_P Parameter: Treatment Value: 10percent PEG vs. No Treatment
  misc_feature: MA Experiment ID: 20000794 Result: Down-regulated in Transcription
  misc_feature: MA Experiment 20000794 PARAMETER Experiment Name: At_Petals_P Parameter: Age (day) Value: 23-25 days
  misc_feature: MA Experiment 20000794 PARAMETER Experiment Name: At_Petals_P Parameter: Plant Line Value: WS
  misc_feature: MA Experiment 20000794 PARAMETER Experiment Name: At_Petals_P Parameter: Tissue Value: Petals vs. Whole plant
  misc_feature: MA Experiment ID: 20001451 Result: Down-regulated in Transcription
  misc_feature: MA Experiment 20001451 PARAMETER Experiment Name: At_Far-red-induction_P Parameter: Age (day) Value: 7
  misc_feature: MA Experiment 20001451 PARAMETER Experiment Name: At_Far-red-induction_P Parameter: Light Value: Far-red vs. White
  misc_feature: MA Experiment 20001451 PARAMETER Experiment Name: At_Far-red-induction_P Parameter: Organism Value: A. thaliana
  misc_feature: MA Experiment 20001451 PARAMETER Experiment Name: At_Far-red-induction_P Parameter: Plant Line Value: Columbia
  misc_feature: MA Experiment 20001451 PARAMETER Experiment Name: At_Far-red-induction_P Parameter: Timepoint (hr) Value: 24
  misc_feature: MA Experiment 20001451 PARAMETER Experiment Name: At_Far-red-induction_P Parameter: Tissue Value: Whole Plant
  misc_feature: MA Experiment ID: 20001557 Result: Down-regulated in Transcription
  misc_feature: MA Experiment 20001557 PARAMETER Experiment Name: At_Drought_Soil_Dry_P Parameter: Age (day) Value: 27
  misc_feature: MA Experiment 20001557 PARAMETER Experiment Name: At_Drought_Soil_Dry_P Parameter: Organism Value: A. thaliana
  misc_feature: MA Experiment 20001557 PARAMETER Experiment Name: At_Drought_Soil_Dry_P Parameter: Plant Line Value: WS
  misc_feature: MA Experiment 20001557 PARAMETER Experiment Name: At_Drought_Soil_Dry_P Parameter: Post Timepoint (hr) Value: 3
  misc_feature: MA Experiment 20001557 PARAMETER Experiment Name: At_Drought_Soil_Dry_P Parameter: Post-Treatment Value: Re-Water vs. No Drought
  misc_feature: MA Experiment 20001557 PARAMETER Experiment Name: At_Drought_Soil_Dry_P Parameter: Timepoint (day) Value: 13
  misc_feature: MA Experiment 20001557 PARAMETER Experiment Name: At_Drought_Soil_Dry_P Parameter: Treatment Value: Drought vs. No Drought
  misc_feature: MA Experiment ID: 20001558 Result: Down-regulated in Transcription
  misc_feature: MA Experiment 20001558 PARAMETER Experiment Name: At_Drought_Soil_Dry_P Parameter: Age (day) Value: 27
  misc_feature: MA Experiment 20001558 PARAMETER Experiment Name: At_Drought_Soil_Dry_P Parameter: Organism Value: A. thaliana
  misc_feature: MA Experiment 20001558 PARAMETER Experiment Name: At_Drought_Soil_Dry_P Parameter: Plant Line Value: WS
  misc_feature: MA Experiment 20001558 PARAMETER Experiment Name: At_Drought_Soil_Dry_P Parameter: Post Timepoint (hr) Value: 6
  misc_feature: MA Experiment 20001558 PARAMETER Experiment Name: At_Drought_Soil_Dry_P Parameter: Post-Treatment Value: Re-Water vs. No Drought
  misc_feature: MA Experiment 20001558 PARAMETER Experiment Name: At_Drought_Soil_Dry_P Parameter: Timepoint (day) Value: 13
  misc_feature: MA Experiment 20001558 PARAMETER Experiment Name: At_Drought_Soil_Dry_P Parameter: Treatment Value: Drought vs. No Drought
  misc_feature: MA Experiment ID: 20001560 Result: Down-regulated in Transcription
  misc_feature: MA Experiment 20001560 PARAMETER Experiment Name: At_Drought_Soil_Dry_P Parameter: Age (day) Value: 28
  misc_feature: MA Experiment 20001560 PARAMETER Experiment Name: At_Drought_Soil_Dry_P Parameter: Organism Value: A. thaliana
  misc_feature: MA Experiment 20001560 PARAMETER Experiment Name: At_Drought_Soil_Dry_P Parameter: Plant Line Value: WS
  misc_feature: MA Experiment 20001560 PARAMETER Experiment Name: At_Drought_Soil_Dry_P Parameter: Post Timepoint (hr) Value: None
  misc_feature: MA Experiment 20001560 PARAMETER Experiment Name: At_Drought_Soil_Dry_P Parameter: Post-Treatment Value: None
  misc_feature: MA Experiment 20001560 PARAMETER Experiment Name: At_Drought_Soil_Dry_P Parameter: Timepoint (day) Value: 14
  misc_feature: MA Experiment 20001560 PARAMETER Experiment Name: At_Drought_Soil_Dry_P Parameter: Treatment Value: Drought vs. No Drought
  misc_feature: MA Experiment ID: 20001904 Result: Down-regulated in Transcription
  misc_feature: MA Experiment 20001904 PARAMETER Experiment Name: At_Drought_Reproduction_P Parameter: Age (day) Value: 37
  misc_feature: MA Experiment 20001904 PARAMETER Experiment Name: At_Drought_Reproduction_P Parameter: Organism Value: A. thaliana
  misc_feature: MA Experiment 20001904 PARAMETER Experiment Name: At_Drought_Reproduction_P Parameter: Plant Line Value: WS
  misc_feature: MA Experiment 20001904 PARAMETER Experiment Name: At_Drought_Reproduction_P Parameter: Timepoint (day) Value: 7
  misc_feature: MA Experiment 20001904 PARAMETER Experiment Name: At_Drought_Reproduction_P Parameter: Tissue Value: Rosettes
  misc_feature: MA Experiment 20001904 PARAMETER Experiment Name: At_Drought_Reproduction_P Parameter: Treatment Value: Drought vs. No Drought
  misc_feature: MA Experiment ID: 20001905 Result: Down-regulated in Transcription
  misc_feature: MA Experiment 20001905 PARAMETER Experiment Name: At_Drought_Reproduction_P Parameter: Age (day) Value: 40
  misc_feature: MA Experiment 20001905 PARAMETER Experiment Name: At_Drought_Reproduction_P Parameter: Organism Value: A. thaliana
  misc_feature: MA Experiment 20001905 PARAMETER Experiment Name: At_Drought_Reproduction_P Parameter: Plant Line Value: WS
  misc_feature: MA Experiment 20001905 PARAMETER Experiment Name: At_Drought_Reproduction_P Parameter: Timepoint (day) Value: 10
  misc_feature: MA Experiment 20001905 PARAMETER Experiment Name: At_Drought_Reproduction_P Parameter: Tissue Value: Rosettes
  misc_feature: MA Experiment 20001905 PARAMETER Experiment Name: At_Drought_Reproduction_P Parameter: Treatment Value: Drought vs. No Drought

SEQ ID NO: 44137 - protein, 330 aa, Arabidopsis thaliana; identical to SEQ ID NO: 34757
  peptide (1)..(330): Ceres Seq. ID no. 13509802
  misc_feature (1)..(330): Homolog of NCBI NO: 7433087 NR Description: peroxidase (EC 1.11.1.7) - upland cotton
  misc_feature (8)..(330): Homolog of NCBI NO: 7433096 NR Description: peroxidase (EC 1.11.1.7) prxr1 - Arabidopsis
  misc_feature (1)..(330): Homolog of NCBI NO: 1403136 NR Description: peroxidase ATP1a [Arabidopsis thaliana]
  misc_feature (1)..(330): Homolog of NCBI NO: 18415810 NR Description: peroxidase, putative [Arabidopsis thaliana]
  misc_feature (1)..(330): Homolog of NCBI NO: 7433087 NR Description: peroxidase (EC 1.11.1.7) - upland cotton
  misc_feature (8)..(330): Homolog of NCBI NO: 7433096 NR Description: peroxidase (EC 1.11.1.7) prxr1 - Arabidopsis
  misc_feature (1)..(330): Homolog of NCBI NO: 1403136 NR Description: peroxidase ATP1a [Arabidopsis thaliana]
  misc_feature (1)..(330): Homolog of NCBI NO: 18415810 NR Description: peroxidase, putative [Arabidopsis thaliana]

SEQ ID NO: 44138 - protein, 324 aa, Arabidopsis thaliana; identical to SEQ ID NO: 34758
  peptide (1)..(324): Ceres Seq. ID no. 13509803
  misc_feature (1)..(324): Homolog of NCBI NO: 7433087 NR Description: peroxidase (EC 1.11.1.7) - upland cotton
  misc_feature (2)..(324): Homolog of NCBI NO: 7433096 NR Description: peroxidase (EC 1.11.1.7) prxr1 - Arabidopsis
  misc_feature (1)..(324): Homolog of NCBI NO: 1403136 NR Description: peroxidase ATP1a [Arabidopsis thaliana]
  misc_feature (1)..(324): Homolog of NCBI NO: 18415810 NR Description: peroxidase, putative [Arabidopsis thaliana]
  misc_feature (1)..(324): Homolog of NCBI NO: 7433087 NR Description: peroxidase (EC 1.11.1.7) - upland cotton
  misc_feature (2)..(324): Homolog of NCBI NO: 7433096 NR Description: peroxidase (EC 1.11.1.7) prxr1 - Arabidopsis
  misc_feature (1)..(324): Homolog of NCBI NO: 1403136 NR Description: peroxidase ATP1a [Arabidopsis thaliana]
  misc_feature (1)..(324): Homolog of NCBI NO: 18415810 NR Description: peroxidase, putative [Arabidopsis thaliana]

SEQ ID NO: 44139 - protein, 323 aa, Arabidopsis thaliana; identical to SEQ ID NO: 34759
  peptide (1)..(323): Ceres Seq. ID no. 13509804
  misc_feature (1)..(323): Homolog of NCBI NO: 7433087 NR Description: peroxidase (EC 1.11.1.7) - upland cotton
  misc_feature (1)..(323): Homolog of NCBI NO: 7433096 NR Description: peroxidase (EC 1.11.1.7) prxr1 - Arabidopsis
  misc_feature (1)..(323): Homolog of NCBI NO: 1403136 NR Description: peroxidase ATP1a [Arabidopsis thaliana]
  misc_feature (1)..(323): Homolog of NCBI NO: 18415810 NR Description: peroxidase, putative [Arabidopsis thaliana]
  misc_feature (1)..(323): Homolog of NCBI NO: 7433087 NR Description: peroxidase (EC 1.11.1.7) - upland cotton
  misc_feature (1)..(323): Homolog of NCBI NO: 7433096 NR Description: peroxidase (EC 1.11.1.7) prxr1 - Arabidopsis
  misc_feature (1)..(323): Homolog of NCBI NO: 1403136 NR Description: peroxidase ATP1a [Arabidopsis thaliana]
  misc_feature (1)..(323): Homolog of NCBI NO: 18415810 NR Description: peroxidase, putative [Arabidopsis thaliana]

SEQ ID NO: 44140 - DNA, 1403 bp, Arabidopsis thaliana
  misc_feature (1)..(1403): Ceres Seq. ID no. 13509717
  misc_feature: MA Experiment ID: 20000173 Result: Down-regulated in Transcription
  misc_feature: MA Experiment 20000173 PARAMETER Experiment Name: At_42deg_Heat_P Parameter: Age (day) Value: 14
  misc_feature: MA Experiment 20000173 PARAMETER Experiment Name: At_42deg_Heat_P Parameter: Organism Value: A. thaliana
  misc_feature: MA Experiment 20000173 PARAMETER Experiment Name: At_42deg_Heat_P Parameter: Plant Line Value: WS
  misc_feature: MA Experiment 20000173 PARAMETER Experiment Name: At_42deg_Heat_P Parameter: Temperature (deg C) Value: 42 vs. 22
  misc_feature: MA Experiment 20000173 PARAMETER Experiment Name: At_42deg_Heat_P Parameter: Timepoint (hr) Value: 6
  misc_feature: MA Experiment 20000173 PARAMETER Experiment Name: At_42deg_Heat_P Parameter: Tissue Value: Aerial
  misc_feature: MA Experiment ID: 20000182 Result: Up-regulated in Transcription
  misc_feature: MA Experiment 20000182 PARAMETER Experiment Name: At_2mM_SA_P Parameter: Age (day) Value: 14
  misc_feature: MA Experiment 20000182 PARAMETER Experiment Name: At_2mM_SA_P Parameter: Organism Value: A. thaliana
  misc_feature: MA Experiment 20000182 PARAMETER Experiment Name: At_2mM_SA_P Parameter: Plant Line Value: WS
  misc_feature: MA Experiment 20000182 PARAMETER Experiment Name: At_2mM_SA_P Parameter: Timepoint (hr) Value: 6
  misc_feature: MA Experiment 20000182 PARAMETER Experiment Name: At_2mM_SA_P Parameter: Tissue Value: Aerial
  misc_feature: MA Experiment 20000182 PARAMETER Experiment Name: At_2mM_SA_P Parameter: Treatment Value: 2mM SA vs. No Treatment
  misc_feature: MA Experiment ID: 20000184 Result: Down-regulated in Transcription
  misc_feature: MA Experiment 20000184 PARAMETER Experiment Name: At_Shoots__P Parameter: Age (day) Value: 7
  misc_feature: MA Experiment 20000184 PARAMETER Experiment Name: At_Shoots__P Parameter: Tissue Value: Shoots vs. Whole Plant
  misc_feature: MA Experiment ID: 20000496 Result: Up-regulated in Transcription
  misc_feature: MA Experiment 20000496 PARAMETER Experiment Name: At_Guard_Cells_P Parameter: Harvest Date Value: 7/19/2002
  misc_feature: MA Experiment 20000496 PARAMETER Experiment Name: At_Guard_Cells_P Parameter: Organism Value: Canola
  misc_feature: MA Experiment 20000496 PARAMETER Experiment Name: At_Guard_Cells_P Parameter: Tissue Value: Guard Cells vs. Leaves
  misc_feature: MA Experiment ID: 20000794 Result: Down-regulated in Transcription
  misc_feature: MA Experiment 20000794 PARAMETER Experiment Name: At_Petals_P Parameter: Age (day) Value: 23-25 days
  misc_feature: MA Experiment 20000794 PARAMETER Experiment Name: At_Petals_P Parameter: Plant Line Value: WS
  misc_feature: MA Experiment 20000794 PARAMETER Experiment Name: At_Petals_P Parameter: Tissue Value: Petals vs. Whole plant
gacgaggaaacaacaaaaaggaagaagcgaagaacgaagtagacgaagacgatgaagaaaggtggattcagcaataatctcaagctcgcaattcctgttgctggcgagcaatccatcaccaaattcctgactcaaagcggtacgtttaaggatggagatctacgtgttaacaaggatggagttcgaatcatttctcaattggagcctgaagtcctgtctccaattaagccagctgatgatcagctgagcttgtcggatttggatatggttaaagtcattggcaaaggaagtagtggtgttgttcagctggttcaacacaaatggactggccaatttttcgccttgaaggtcattcaactaaatattgatgaagcaattcgcaaggcaattgcacaagagctcaaaataaatcaatcgtcacagtgtccaaatcttgttacctcgtaccagtcattttatgacaatggcgcaatctcactaatcttggagtacatggacggaggatctctagcagactttctcaagtcagttaaagccatccctgactcctatctttctgccatctttagacaagtgcttcaaggattaatctatcttcatcacgataggcatatcatccatcgtgacttgaaaccatccaatctgttgatcaaccacagaggagaagtcaaaataactgactttggtgtgagtaccgttatgacaaacaccgcaggtttagcaaacacatttgtggggacttacaattatatgtctccagagagaatcgttggaaacaagtacggaaataaaagtgatatatggagcttgggtttagtagtactcgaatgtgcaacaggaaagttcccttatgcacctccgaatcaagaggaaacatggaccagtgttttcgagttgatggaagccattgttgaccaaccgccacccgctcttccttcaggaaatttctcccctgagttatcttcattcatctccacatgtttgcagaaggatccaaacagtcgaagctctgcaaaggaactgatggaacatcctttcttgaacaaatacgactactcggggatcaatctcgcgtcctacttcacagatgcaggatcgccacttgcaacacttgggaacctgtctggtacgttctccgtgtaaactacaagggagacataatatcaccatctggttcctgttatcatctgaagatttcttgttttaccttccagtgataaaatgatctttataatacatatagatatattaaattgctgtattttaagattatagatatataaggtacatgagagtgtttatttaaaaaaattcacttggaattcatgttttgtgatacgttagattggaatccatttgggaaaagaagaatcatctgttcttatgtctcaaattttgacttc

SEQ ID NO: 44141 - protein, 363 aa, Arabidopsis thaliana
  peptide (1)..(363): Ceres Seq. ID no. 13509718
  misc_feature (70)..(330): Pfam Name: Protein kinase domain Pfam Description: Protein kinase domain
  misc_feature (10)..(351): Homolog of NCBI NO: 7434320 NR Description: protein kinase MEK1 (EC 2.7.1.-) - maize
  misc_feature (1)..(308): Homolog of NCBI NO: 30687096 NR Description: mitogen-activated protein kinase kinase
  misc_feature (1)..(356): Homolog of NCBI NO: 15236108 NR Description: mitogen-activated protein kinase kinase
  misc_feature (1)..(357): Homolog of NCBI NO: 7434316 NR Description: protein kinase MEK1 - tomato
  misc_feature (1)..(357): Homolog of NCBI NO: 9843771 NR Description: MAP kinase kinase [Lycopersicon esculentum]
  misc_feature (1)..(357): Homolog of NCBI NO: 7682432 NR Description: MAP kinase kinase [Nicotiana tabacum]
  misc_feature (1)..(354): Homolog of NCBI NO: 15528441 NR Description: MAP kinase kinase [Medicago sativa subsp. x varia]
  misc_feature (1)..(353): Homolog of NCBI NO: 37625027 NR Description: putative mitogen-activated protein kinase kinase
  misc_feature (1)..(363): Homolog of NCBI NO: 11259772 NR Description: mitogen-activated protein kinase kinase (EC
  misc_feature (1)..(363): Homolog of NCBI NO: 15233715 NR Description: mitogen-activated protein kinase kinase
MKKGGFSNNLKLAIPVAGEQSITKFLTQSGTFKDGDLRVNKDGVRIISQLEPEVLSPIKPADDQLSLSDLDMVKVIGKGSSGVVQLVQHKWTGQFFALKVIQLNIDEAIRKAIAQELKINQSSQCPNLVTSYQSFYDNGAISLILEYMDGGSLADFLKSVKAIPDSYLSAIFRQVLQGLIYLHHDRHIIHRDLKPSNLLINHRGEVKITDFGVSTVMTNTAGLANTFVGTYNYMSPERIVGNKYGNKSDIWSLGLVVLECATGKFPYAPPNQEETWTSVFELMEAIVDQPPPALPSGNFSPELSSFISTCLQKDPNSRSSAKELMEHPFLNKYDYSGINLASYFTDAGSPLATLGNLSGTFSV

SEQ ID NO: 44142 - protein, 292 aa, Arabidopsis thaliana
  peptide (1)..(292): Ceres Seq. ID no. 13509719
  misc_feature (1)..(259): Pfam Name: Protein kinase domain Pfam Description: Protein kinase domain
  misc_feature (1)..(280): Homolog of NCBI NO: 7434320 NR Description: protein kinase MEK1 (EC 2.7.1.-) - maize
  misc_feature (1)..(237): Homolog of NCBI NO: 30687096 NR Description: mitogen-activated protein kinase kinase
  misc_feature (1)..(285): Homolog of NCBI NO: 15236108 NR Description: mitogen-activated protein kinase kinase
  misc_feature (1)..(286): Homolog of NCBI NO: 7434316 NR Description: protein kinase MEK1 - tomato
  misc_feature (1)..(286): Homolog of NCBI NO: 9843771 NR Description: MAP kinase kinase [Lycopersicon esculentum]
  misc_feature (1)..(286): Homolog of NCBI NO: 7682432 NR Description: MAP kinase kinase [Nicotiana tabacum]
  misc_feature (1)..(283): Homolog of NCBI NO: 15528441 NR Description: MAP kinase kinase [Medicago sativa subsp. x varia]
  misc_feature (1)..(282): Homolog of NCBI NO: 37625027 NR Description: putative mitogen-activated protein kinase kinase
  misc_feature (1)..(292): Homolog of NCBI NO: 11259772 NR Description: mitogen-activated protein kinase kinase (EC
  misc_feature (1)..(292): Homolog of NCBI NO: 15233715 NR Description: mitogen-activated protein kinase kinase
MVKVIGKGSSGVVQLVQHKWTGQFFALKVIQLNIDEAIRKAIAQELKINQSSQCPNLVTSYQSFYDNGAISLILEYMDGGSLADFLKSVKAIPDSYLSAIFRQVLQGLIYLHHDRHIIHRDLKPSNLLINHRGEVKITDFGVSTVMTNTAGLANTFVGTYNYMSPERIVGNKYGNKSDIWSLGLVVLECATGKFPYAPPNQEETWTSVFELMEAIVDQPPPALPSGNFSPELSSFISTCLQKDPNSRSSAKELMEHPFLNKYDYSGINLASYFTDAGSPLATLGNLSGTFSV

SEQ ID NO: 44143 - protein, 216 aa, Arabidopsis thaliana
  peptide (1)..(216): Ceres Seq. ID no. 13509720
  misc_feature (1)..(183): Pfam Name: Protein kinase domain Pfam Description: Protein kinase domain
  misc_feature (1)..(204): Homolog of NCBI NO: 7434320 NR Description: protein kinase MEK1 (EC 2.7.1.-) - maize
  misc_feature (1)..(161): Homolog of NCBI NO: 30687096 NR Description: mitogen-activated protein kinase kinase
  misc_feature (1)..(209): Homolog of NCBI NO: 15236108 NR Description: mitogen-activated protein kinase kinase
  misc_feature (1)..(210): Homolog of NCBI NO: 7434316 NR Description: protein kinase MEK1 - tomato
  misc_feature (1)..(210): Homolog of NCBI NO: 9843771 NR Description: MAP kinase kinase [Lycopersicon esculentum]
  misc_feature (1)..(210): Homolog of NCBI NO: 7682432 NR Description: MAP kinase kinase [Nicotiana tabacum]
  misc_feature (1)..(207): Homolog of NCBI NO: 15528441 NR Description: MAP kinase kinase [Medicago sativa subsp. x varia]
  misc_feature (1)..(206): Homolog of NCBI NO: 37625027 NR Description: putative mitogen-activated protein kinase kinase
  misc_feature (1)..(216): Homolog of NCBI NO: 11259772 NR Description: mitogen-activated protein kinase kinase (EC
  misc_feature (1)..(216): Homolog of NCBI NO: 15233715 NR Description: mitogen-activated protein kinase kinase
MDGGSLADFLKSVKAIPDSYLSAIFRQVLQGLIYLHHDRHIIHRDLKPSNLLINHRGEVKITDFGVSTVMTNTAGLANTFVGTYNYMSPERIVGNKYGNKSDIWSLGLVVLECATGKFPYAPPNQEETWTSVFELMEAIVDQPPPALPSGNFSPELSSFISTCLQKDPNSRSSAKELMEHPFLNKYDYSGINLASYFTDAGSPLATLGNLSGTFSV

SEQ ID NO: 44144 - DNA, 858 bp, Arabidopsis thaliana
  misc_feature (1)..(858): Ceres Seq. ID no. 12466127
  misc_feature: MA Experiment ID: 20000166 Result: Down-regulated in Transcription
  misc_feature: MA Experiment 20000166 PARAMETER Experiment Name: At_100uM_ABA_P Parameter: Age (day) Value: 14
  misc_feature: MA Experiment 20000166 PARAMETER Experiment Name: At_100uM_ABA_P Parameter: Organism Value: A. thaliana
  misc_feature: MA Experiment 20000166 PARAMETER Experiment Name: At_100uM_ABA_P Parameter: Plant Line Value: WS
  misc_feature: MA Experiment 20000166 PARAMETER Experiment Name: At_100uM_ABA_P Parameter: Timepoint (hr) Value: 1
  misc_feature: MA Experiment 20000166 PARAMETER Experiment Name: At_100uM_ABA_P Parameter: Tissue Value: Aerial
  misc_feature: MA Experiment 20000166 PARAMETER Experiment Name: At_100uM_ABA_P Parameter: Treatment Value: 100uM ABA vs. No Treatment
  misc_feature: MA Experiment ID: 20000169 Result: Down-regulated in Transcription
  misc_feature: MA Experiment 20000169 PARAMETER Experiment Name: At_100uM_ABA_P Parameter: Age (day) Value: 14
  misc_feature: MA Experiment 20000169 PARAMETER Experiment Name: At_100uM_ABA_P Parameter: Organism Value: A. thaliana
  misc_feature: MA Experiment 20000169 PARAMETER Experiment Name: At_100uM_ABA_P Parameter: Plant Line Value: WS
  misc_feature: MA Experiment 20000169 PARAMETER Experiment Name: At_100uM_ABA_P Parameter: Timepoint (hr) Value: 6
  misc_feature: MA Experiment 20000169 PARAMETER Experiment Name: At_100uM_ABA_P Parameter: Tissue Value: Aerial
  misc_feature: MA Experiment 20000169 PARAMETER Experiment Name: At_100uM_ABA_P Parameter: Treatment Value: 100uM ABA vs. No Treatment
  misc_feature: MA Experiment ID: 20000171 Result: Down-regulated in Transcription
  misc_feature: MA Experiment 20000171 PARAMETER Experiment Name: At_42deg_Heat_P Parameter: Age (day) Value: 14
  misc_feature: MA Experiment 20000171 PARAMETER Experiment Name: At_42deg_Heat_P Parameter: Organism Value: A. thaliana
  misc_feature: MA Experiment 20000171 PARAMETER Experiment Name: At_42deg_Heat_P Parameter: Plant Line Value: WS
  misc_feature: MA Experiment 20000171 PARAMETER Experiment Name: At_42deg_Heat_P Parameter: Temperature (deg C) Value: 42 vs. 22
  misc_feature: MA Experiment 20000171 PARAMETER Experiment Name: At_42deg_Heat_P Parameter: Timepoint (hr) Value: 1
  misc_feature: MA Experiment 20000171 PARAMETER Experiment Name: At_42deg_Heat_P Parameter: Tissue Value: Aerial
  misc_feature: MA Experiment ID: 20000173 Result: Down-regulated in Transcription
  misc_feature: MA Experiment 20000173 PARAMETER Experiment Name: At_42deg_Heat_P Parameter: Age (day) Value: 14
  misc_feature: MA Experiment 20000173 PARAMETER Experiment Name: At_42deg_Heat_P Parameter: Organism Value: A. thaliana
  misc_feature: MA Experiment 20000173 PARAMETER Experiment Name: At_42deg_Heat_P Parameter: Plant Line Value: WS
  misc_feature: MA Experiment 20000173 PARAMETER Experiment Name: At_42deg_Heat_P Parameter: Temperature (deg C) Value: 42 vs. 22
  misc_feature: MA Experiment 20000173 PARAMETER Experiment Name: At_42deg_Heat_P Parameter: Timepoint (hr) Value: 6
  misc_feature: MA Experiment 20000173 PARAMETER Experiment Name: At_42deg_Heat_P Parameter: Tissue Value: Aerial
  misc_feature: MA Experiment ID: 20000179 Result: Down-regulated in Transcription
  misc_feature: MA Experiment 20000179 PARAMETER Experiment Name: At_Germinating_Seeds_P Parameter: Age (hr) Value: 6 vs. 0
  misc_feature: MA Experiment 20000179 PARAMETER Experiment Name: At_Germinating_Seeds_P Parameter: Tissue Value: Germinating Seeds
  misc_feature: MA Experiment ID: 20000180 Result: Down-regulated in Transcription
  misc_feature: MA Experiment 20000180 PARAMETER Experiment Name: At_Germinating_Seeds_P Parameter: Age (hr) Value: 24 vs. 0
  misc_feature: MA Experiment 20000180 PARAMETER Experiment Name: At_Germinating_Seeds_P Parameter: Tissue Value: Germinating Seeds
  misc_feature: MA Experiment ID: 20000184 Result: Down-regulated in Transcription
  misc_feature: MA Experiment 20000184 PARAMETER Experiment Name: At_Shoots__P Parameter: Age (day) Value: 7
  misc_feature: MA Experiment 20000184 PARAMETER Experiment Name: At_Shoots__P Parameter: Tissue Value: Shoots vs. Whole Plant
  misc_feature: MA Experiment ID: 20000185 Result: Down-regulated in Transcription
  misc_feature: MA Experiment 20000185 PARAMETER Experiment Name: At_Roots__P Parameter: Age (day) Value: 7 vs. 21
  misc_feature: MA Experiment 20000185 PARAMETER Experiment Name: At_Roots__P Parameter: Organism Value: A. thaliana
  misc_feature: MA Experiment 20000185 PARAMETER Experiment Name: At_Roots__P Parameter: Tissue Value: Roots vs. Whole Plant
  misc_feature: MA Experiment ID: 20000213 Result: Up-regulated in Transcription
  misc_feature: MA Experiment 20000213 PARAMETER Experiment Name: At_4deg_Cold_P Parameter: Timepoint (hr) Value: 2
  misc_feature: MA Experiment ID: 20000234 Result: Down-regulated in Transcription
  misc_feature: MA Experiment 20000234 PARAMETER Experiment Name: At_Siliques_P Parameter: Age (day) Value: 21
  misc_feature: MA Experiment 20000234 PARAMETER Experiment Name: At_Siliques_P Parameter: Organism Value: A. thaliana
  misc_feature: MA Experiment 20000234 PARAMETER Experiment Name: At_Siliques_P Parameter: Plant Line Value: WS
  misc_feature: MA Experiment 20000234 PARAMETER Experiment Name: At_Siliques_P Parameter: Tissue Value: Less Than 5mm Siliques vs. Whole Plant
  misc_feature: MA Experiment ID: 20000264 Result: Down-regulated in Transcription
  misc_feature: MA Experiment 20000264 PARAMETER Experiment Name: At_Open_Flower_P Parameter: Age (day) Value: 21
  misc_feature: MA Experiment 20000264 PARAMETER Experiment Name: At_Open_Flower_P Parameter: Plant Line Value: WS
  misc_feature: MA Experiment 20000264 PARAMETER Experiment Name: At_Open_Flower_P Parameter: Tissue Value: Open Flower vs. Whole Plant
  misc_feature: MA Experiment ID: 20000265 Result: Down-regulated in Transcription
  misc_feature: MA Experiment 20000265 PARAMETER Experiment Name: At_Open_Flower_P Parameter: Age (day) Value: 21
  misc_feature: MA Experiment 20000265 PARAMETER Experiment Name: At_Open_Flower_P Parameter: Plant Line Value: WS
  misc_feature: MA Experiment 20000265 PARAMETER Experiment Name: At_Open_Flower_P Parameter: Tissue Value: Closed Flower vs. Whole Plant
  misc_feature: MA Experiment ID: 20000286 Result: Down-regulated in Transcription
  misc_feature: MA Experiment 20000286 PARAMETER Experiment Name: At_Open_Flower_P Parameter: Age (day) Value: 21
  misc_feature: MA Experiment 20000286 PARAMETER Experiment Name: At_Open_Flower_P Parameter: Plant Line Value: WS
  misc_feature: MA Experiment 20000286 PARAMETER Experiment Name: At_Open_Flower_P Parameter: Tissue Value: Half Open vs. Whole Plant
  misc_feature: MA Experiment ID: 20000436 Result: Down-regulated in Transcription
  misc_feature: MA Experiment 20000436 PARAMETER Experiment Name: At_Drought_P Parameter: Age (day) Value: 7
  misc_feature: MA Experiment 20000436 PARAMETER Experiment Name: At_Drought_P Parameter: Organism Value: A. thaliana
  misc_feature: MA Experiment 20000436 PARAMETER Experiment Name: At_Drought_P Parameter: Plant Line Value: WS
  misc_feature: MA Experiment 20000436 PARAMETER Experiment Name: At_Drought_P Parameter: Timepoint (hr) Value: 12
  misc_feature: MA Experiment 20000436 PARAMETER Experiment Name: At_Drought_P Parameter: Tissue Value: Whole Plant
  misc_feature: MA Experiment 20000436 PARAMETER Experiment Name: At_Drought_P Parameter: Treatment Value: Drought vs. No Drought
  misc_feature: MA Experiment ID: 20000437 Result: Down-regulated in Transcription
  misc_feature: MA Experiment 20000437 PARAMETER Experiment Name: At_Drought_P Parameter: Age (day) Value: 8
  misc_feature: MA Experiment 20000437 PARAMETER Experiment Name: At_Drought_P Parameter: Organism Value: A. thaliana
  misc_feature: MA Experiment 20000437 PARAMETER Experiment Name: At_Drought_P Parameter: Plant Line Value: WS
  misc_feature: MA Experiment 20000437 PARAMETER Experiment Name: At_Drought_P Parameter: Timepoint (hr) Value: 24
  misc_feature: MA Experiment 20000437 PARAMETER Experiment Name: At_Drought_P Parameter: Tissue Value: Whole Plant
  misc_feature: MA Experiment 20000437 PARAMETER Experiment Name: At_Drought_P Parameter: Treatment Value: Drought vs. No Drought
  misc_feature: MA Experiment ID: 20000438 Result: Down-regulated in Transcription
  misc_feature: MA Experiment 20000438 PARAMETER Experiment Name: At_Shoots__P Parameter: Age (day) Value: 14
  misc_feature: MA Experiment 20000438 PARAMETER Experiment Name: At_Shoots__P Parameter: Tissue Value: Shoots vs. Whole Plant
  misc_feature: MA Experiment ID: 20000439 Result: Down-regulated in Transcription
  misc_feature: MA Experiment 20000439 PARAMETER Experiment Name: At_Roots__P Parameter: Age (day) Value: 14 vs. 21
  misc_feature: MA Experiment 20000439 PARAMETER Experiment Name: At_Roots__P Parameter: Organism Value: A. thaliana
  misc_feature: MA Experiment 20000439 PARAMETER Experiment Name: At_Roots__P Parameter: Tissue Value: Roots vs. Whole Plant
  misc_feature: MA Experiment ID: 20000441 Result: Up-regulated in Transcription
  misc_feature: MA Experiment 20000441 PARAMETER Experiment Name: At_1uM_BR-BRZ__P Parameter: Tissue Value: Shoot Apices
  misc_feature: MA Experiment 20000441 PARAMETER Experiment Name: At_1uM_BR-BRZ__P Parameter: Treatment Value: 1uM BR vs. No Treatment
  misc_feature: MA Experiment ID: 20000443 Result: Up-regulated in Transcription
  misc_feature: MA Experiment 20000443 PARAMETER Experiment Name: At_1uM_BR-BRZ__P Parameter: Tissue Value: Shoot Apices
  misc_feature: MA Experiment 20000443 PARAMETER Experiment Name: At_1uM_BR-BRZ__P Parameter: Treatment Value: 1uM BRZ vs. No Treatment
  misc_feature: MA Experiment ID: 20000452 Result: Up-regulated in Transcription
  misc_feature: MA Experiment 20000452 PARAMETER Experiment Name: At_CS6879_Shoots-Roots_P Parameter: Age (day) Value: 14
  misc_feature: MA Experiment 20000452 PARAMETER Experiment Name: At_CS6879_Shoots-Roots_P Parameter: Organism Value: A. thaliana
  misc_feature: MA Experiment 20000452 PARAMETER Experiment Name: At_CS6879_Shoots-Roots_P Parameter: Plant Line Value: CS6879 vs. WS
  misc_feature: MA Experiment 20000452 PARAMETER Experiment Name: At_CS6879_Shoots-Roots_P Parameter: Tissue Value: Shoots
  misc_feature: MA Experiment ID: 20000460 Result: Up-regulated in Transcription
  misc_feature: MA Experiment 20000460 PARAMETER Experiment Name: At_10percent_PEG_P Parameter: Age (day) Value: 12
  misc_feature: MA Experiment 20000460 PARAMETER Experiment Name: At_10percent_PEG_P Parameter: Organism Value: A. thaliana
  misc_feature: MA Experiment 20000460 PARAMETER Experiment Name: At_10percent_PEG_P Parameter: Plant Line Value: WS
  misc_feature: MA Experiment 20000460 PARAMETER Experiment Name: At_10percent_PEG_P Parameter: Timepoint (day) Value: 12
  misc_feature: MA Experiment 20000460 PARAMETER Experiment Name: At_10percent_PEG_P Parameter: Tissue Value: Whole Plant
  misc_feature: MA Experiment 20000460 PARAMETER Experiment Name: At_10percent_PEG_P Parameter: Treatment Value: 10percent PEG vs. No Treatment
  misc_feature: MA Experiment ID: 20000495 Result: Down-regulated in Transcription
  misc_feature: MA Experiment 20000495 PARAMETER Experiment Name: At_Guard_Cells_P Parameter: Harvest Date Value: 8/2/2002
  misc_feature: MA Experiment 20000495 PARAMETER Experiment Name: At_Guard_Cells_P Parameter: Organism Value: A. thaliana
  misc_feature: MA Experiment 20000495 PARAMETER Experiment Name: At_Guard_Cells_P Parameter: Tissue Value: Guard Cells vs. Leaves
  misc_feature: MA Experiment ID: 20000573 Result: Down-regulated in Transcription
  misc_feature: MA Experiment 20000573 PARAMETER Experiment Name: At_100uM_ABA_Mutants__P Parameter: Organism Value: A. thaliana
  misc_feature: MA Experiment 20000573 PARAMETER Experiment Name: At_100uM_ABA_Mutants__P Parameter: Plant Line Value: CS22 vs. Ler wt
  misc_feature: MA Experiment 20000573 PARAMETER Experiment Name: At_100uM_ABA_Mutants__P Parameter: Timepoint (hr) Value: N/A
  misc_feature: MA Experiment 20000573 PARAMETER Experiment Name: At_100uM_ABA_Mutants__P Parameter: Tissue Value: Whole Plant
  misc_feature: MA Experiment 20000573 PARAMETER Experiment Name: At_100uM_ABA_Mutants__P Parameter: Treatment Value: None
  misc_feature: MA Experiment ID: 20000574 Result: Down-regulated in Transcription
  misc_feature: MA Experiment 20000574 PARAMETER Experiment Name: At_100uM_ABA_Mutants__P Parameter: Organism Value: A. thaliana
  misc_feature: MA Experiment 20000574 PARAMETER Experiment Name: At_100uM_ABA_Mutants__P Parameter: Plant Line Value: CS23 vs. Ler wt
  misc_feature: MA Experiment 20000574 PARAMETER Experiment Name: At_100uM_ABA_Mutants__P Parameter: Timepoint (hr) Value: N/A
  misc_feature: MA Experiment 20000574 PARAMETER Experiment Name: At_100uM_ABA_Mutants__P Parameter: Tissue Value: Whole Plant
  misc_feature: MA Experiment 20000574 PARAMETER Experiment Name: At_100uM_ABA_Mutants__P Parameter: Treatment Value: None
  misc_feature: MA Experiment ID: 20000794 Result: Down-regulated in Transcription
  misc_feature: MA Experiment 20000794 PARAMETER Experiment Name: At_Petals_P Parameter: Age (day) Value: 23-25 days
  misc_feature: MA Experiment 20000794 PARAMETER Experiment Name: At_Petals_P Parameter: Plant Line Value: WS
  misc_feature: MA Experiment 20000794 PARAMETER Experiment Name: At_Petals_P Parameter: Tissue Value: Petals vs. Whole plant
  misc_feature: MA Experiment ID: 20001248 Result: Up-regulated in Transcription
  misc_feature: MA Experiment 20001248 PARAMETER Experiment Name: At_Far-red-induction_P Parameter: Age (day) Value: 7
  misc_feature: MA Experiment 20001248 PARAMETER Experiment Name: At_Far-red-induction_P Parameter: Light Value: Far-red vs. White
  misc_feature: MA Experiment 20001248 PARAMETER Experiment Name: At_Far-red-induction_P Parameter: Organism Value: A. thaliana
  misc_feature: MA Experiment 20001248 PARAMETER Experiment Name: At_Far-red-induction_P Parameter: Plant Line Value: Columbia
  misc_feature: MA Experiment 20001248 PARAMETER Experiment Name: At_Far-red-induction_P Parameter: Timepoint (hr) Value: 4
  misc_feature: MA Experiment 20001248 PARAMETER Experiment Name: At_Far-red-induction_P Parameter: Tissue Value: Whole Plant
  misc_feature: MA Experiment ID: 20001451 Result: Down-regulated in Transcription
  misc_feature: MA Experiment 20001451 PARAMETER Experiment Name: At_Far-red-induction_P Parameter: Age (day) Value: 7
  misc_feature: MA Experiment 20001451 PARAMETER Experiment Name: At_Far-red-induction_P Parameter: Light Value: Far-red vs. White
  misc_feature: MA Experiment 20001451 PARAMETER Experiment Name: At_Far-red-induction_P Parameter: Organism Value: A. thaliana
  misc_feature: MA Experiment 20001451 PARAMETER Experiment Name: At_Far-red-induction_P Parameter: Plant Line Value: Columbia
  misc_feature: MA Experiment 20001451 PARAMETER Experiment Name: At_Far-red-induction_P Parameter: Timepoint (hr) Value: 24
  misc_feature: MA Experiment 20001451 PARAMETER Experiment Name: At_Far-red-induction_P Parameter: Tissue Value: Whole Plant
  misc_feature: MA Experiment ID: 20001554 Result: Down-regulated in Transcription
  misc_feature: MA Experiment 20001554 PARAMETER Experiment Name: At_Drought_Soil_Dry_P Parameter: Age (day) Value: 21
  misc_feature: MA Experiment 20001554 PARAMETER Experiment Name: At_Drought_Soil_Dry_P Parameter: Organism Value: A. thaliana
  misc_feature: MA Experiment 20001554 PARAMETER Experiment Name: At_Drought_Soil_Dry_P Parameter: Plant Line Value: WS
  misc_feature: MA Experiment 20001554 PARAMETER Experiment Name: At_Drought_Soil_Dry_P Parameter: Post Timepoint (hr) Value: None
  misc_feature: MA Experiment 20001554 PARAMETER Experiment Name: At_Drought_Soil_Dry_P Parameter: Post-Treatment Value: None
  misc_feature: MA Experiment 20001554 PARAMETER Experiment Name: At_Drought_Soil_Dry_P Parameter: Timepoint (day) Value: 7
  misc_feature: MA Experiment 20001554 PARAMETER Experiment Name: At_Drought_Soil_Dry_P Parameter: Treatment Value: Drought vs. No Drought
  misc_feature: MA Experiment ID: 20001555 Result: Down-regulated in Transcription
  misc_feature: MA Experiment 20001555 PARAMETER Experiment Name: At_Drought_Soil_Dry_P Parameter: Age (day) Value: 24
  misc_feature: MA Experiment 20001555 PARAMETER Experiment Name: At_Drought_Soil_Dry_P Parameter: Organism Value: A. thaliana
  misc_feature: MA Experiment 20001555 PARAMETER Experiment Name: At_Drought_Soil_Dry_P Parameter: Plant Line Value: WS
  misc_feature: MA Experiment 20001555 PARAMETER Experiment Name: At_Drought_Soil_Dry_P Parameter: Post Timepoint (hr) Value: None
  misc_feature: MA Experiment 20001555 PARAMETER Experiment Name: At_Drought_Soil_Dry_P Parameter: Post-Treatment Value: None
  misc_feature: MA Experiment 20001555 PARAMETER Experiment Name: At_Drought_Soil_Dry_P Parameter: Timepoint (day) Value: 10
  misc_feature: MA Experiment 20001555 PARAMETER Experiment Name: At_Drought_Soil_Dry_P Parameter: Treatment Value: Drought vs. No Drought
  misc_feature: MA Experiment ID: 20001556 Result: Down-regulated in Transcription
  misc_feature: MA Experiment 20001556 PARAMETER Experiment Name: At_Drought_Soil_Dry_P Parameter: Age (day) Value: 26
  misc_feature: MA Experiment 20001556 PARAMETER Experiment Name: At_Drought_Soil_Dry_P Parameter: Organism Value: A. thaliana
  misc_feature: MA Experiment 20001556 PARAMETER Experiment Name: At_Drought_Soil_Dry_P Parameter: Plant Line Value: WS
  misc_feature: MA Experiment 20001556 PARAMETER Experiment Name: At_Drought_Soil_Dry_P Parameter: Post Timepoint (hr) Value: None
  misc_feature: MA Experiment 20001556 PARAMETER Experiment Name: At_Drought_Soil_Dry_P Parameter: Post-Treatment Value: None
  misc_feature: MA Experiment 20001556 PARAMETER Experiment Name: At_Drought_Soil_Dry_P Parameter: Timepoint (day) Value: 12
  misc_feature: MA Experiment 20001556 PARAMETER Experiment Name: At_Drought_Soil_Dry_P Parameter: Treatment Value: Drought vs. No Drought
  misc_feature: MA Experiment ID: 20001558 Result: Down-regulated in Transcription
  misc_feature: MA Experiment 20001558 PARAMETER Experiment Name: At_Drought_Soil_Dry_P Parameter: Age (day) Value: 27
  misc_feature: MA Experiment 20001558 PARAMETER Experiment Name: At_Drought_Soil_Dry_P Parameter: Organism Value: A. thaliana
  misc_feature: MA Experiment 20001558 PARAMETER Experiment Name: At_Drought_Soil_Dry_P Parameter: Plant Line Value: WS
  misc_feature: MA Experiment 20001558 PARAMETER Experiment Name: At_Drought_Soil_Dry_P Parameter: Post Timepoint (hr) Value: 6
  misc_feature: MA Experiment 20001558 PARAMETER Experiment Name: At_Drought_Soil_Dry_P Parameter: Post-Treatment Value: Re-Water vs. No Drought
  misc_feature: MA Experiment 20001558 PARAMETER Experiment Name: At_Drought_Soil_Dry_P Parameter: Timepoint (day) Value: 13
  misc_feature: MA Experiment 20001558 PARAMETER Experiment Name: At_Drought_Soil_Dry_P Parameter: Treatment Value: Drought vs. No Drought
  misc_feature: MA Experiment ID: 20001904 Result: Down-regulated in Transcription
  misc_feature: MA Experiment 20001904 PARAMETER Experiment Name: At_Drought_Reproduction_P Parameter: Age (day) Value: 37
  misc_feature: MA Experiment 20001904 PARAMETER Experiment Name: At_Drought_Reproduction_P Parameter: Organism Value: A. thaliana
  misc_feature: MA Experiment 20001904 PARAMETER Experiment Name: At_Drought_Reproduction_P Parameter: Plant Line Value: WS
  misc_feature: MA Experiment 20001904 PARAMETER Experiment Name: At_Drought_Reproduction_P Parameter: Timepoint (day) Value: 7
  misc_feature: MA Experiment 20001904 PARAMETER Experiment Name: At_Drought_Reproduction_P Parameter: Tissue Value: Rosettes
  misc_feature: MA Experiment 20001904 PARAMETER Experiment Name: At_Drought_Reproduction_P Parameter: Treatment Value: Drought vs. No Drought
  misc_feature: MA Experiment ID: 20001905 Result: Down-regulated in Transcription
  misc_feature: MA Experiment 20001905 PARAMETER Experiment Name: At_Drought_Reproduction_P Parameter: Age (day) Value: 40
  misc_feature: MA Experiment 20001905 PARAMETER Experiment Name: At_Drought_Reproduction_P Parameter: Organism Value: A. thaliana
  misc_feature: MA Experiment 20001905 PARAMETER Experiment Name: At_Drought_Reproduction_P Parameter: Plant Line Value: WS
  misc_feature: MA Experiment 20001905 PARAMETER Experiment Name: At_Drought_Reproduction_P Parameter: Timepoint (day) Value: 10
  misc_feature: MA Experiment 20001905 PARAMETER Experiment Name: At_Drought_Reproduction_P Parameter: Tissue Value: Rosettes
  misc_feature: MA Experiment 20001905 PARAMETER Experiment Name: At_Drought_Reproduction_P Parameter: Treatment Value: Drought vs. No Drought
agatatttgataaatcaatcaacaaaacaaaaaaaactctatagttagtttctctgaaaatgtacggacagtgcaatatagaatccgactacgctttgttggagtcgataacacgtcacttgctaggaggaggaggacatgttggtgtacggactcctcaaagatgccttccattttgacacgtcatcatcggacttgagctgtctttttgattttccggcggttaaagtcgagccaactgagaactttacggcgatggaggagaaaccaaagaaagcgataccggttacggagacggcagtgaaggcgaagcattacagaggagtgaggcagagaccgtgggggaaattcgcggcggagatacgtgatccggcgaagaatggagctagggtttggttagggacgtttgagacggcggaagatgcggctttagcttacgatatagctgcttttaggatgcgtggttcccgcgctttattgaattttccgttgagggttaattccggtgaacctgacccggttcggatcacgtctaagagatcttcttcgtcgtcgtcgtcgtcgtcctcttctacgtcgtcgtctgaaaacgggaagttgaaacgaaggagaaaagcagagaatctgacgtcggaggtggtgcaggtgaagtgtgaggttggtgatgagacacgtgttgatgagttattggtttcataagtttgatcttgtgtgttttgtagttgaatagttttgctataaatgttgaggcaccaagtaaaagtgttcccgtgatgtaaattagttactaaacagagccatatatcttcaatccataaacaaaatagacactttaataaagccgtgagtgttaatttt

SEQ ID NO: 44145 - protein, 186 aa, Arabidopsis thaliana; identical to SEQ ID NO: 26541
  peptide (1)..(186): Ceres Seq. ID no. 12466128
  misc_feature (57)..(122): Pfam Name: AP2 domain Pfam Description: AP2 domain
  misc_feature (1)..(159): Homolog of NCBI NO: 28274828 NR Description: ethylene response factor 1 [Lycopersicon
  misc_feature (1)..(186): Homolog of NCBI NO: 7489113 NR Description: DNA binding protein EREBP-2 - common tobacco
  misc_feature (1)..(185): Homolog of NCBI NO: 7489077 NR Description: transcription factor Pti4 - tomato (fragment)
  misc_feature (1)..(167): Homolog of NCBI NO: 7528276 NR Description: AP2-related transcription factor
  misc_feature (1)..(185): Homolog of NCBI NO: 18414897 NR Description: ethylene responsive element binding factor 1
  misc_feature (1)..(185): Homolog of NCBI NO: 25350257 NR Description: EREBP-2 protein [imported] - Arabidopsis thaliana
  misc_feature (1)..(185): Homolog of NCBI NO: 25350258 NR Description: ethylene responsive element binding factor 1
  misc_feature (1)..(185): Homolog of NCBI NO: 21264420 NR Description: Ethylene responsive element binding factor 1
  misc_feature (1)..(186): Homolog of NCBI NO: 21592595 NR Description: ethylene responsive element binding factor 2
  misc_feature (1)..(186): Homolog of NCBI NO: 15238041 NR Description: ethylene responsive element binding factor 2

SEQ ID NO: 44146 - protein, 147 aa, Arabidopsis thaliana; identical to SEQ ID NO: 26542
  peptide (1)..(147): Ceres Seq. ID no. 12466129
  misc_feature (18)..(83): Pfam Name: AP2 domain Pfam Description: AP2 domain
  misc_feature (1)..(120): Homolog of NCBI NO: 28274828 NR Description: ethylene response factor 1 [Lycopersicon
  misc_feature (1)..(147): Homolog of NCBI NO: 7489113 NR Description: DNA binding protein EREBP-2 - common tobacco
  misc_feature (1)..(146): Homolog of NCBI NO: 7489077 NR Description: transcription factor Pti4 - tomato (fragment)
  misc_feature (1)..(128): Homolog of NCBI NO: 7528276 NR Description: AP2-related transcription factor
  misc_feature (1)..(146): Homolog of NCBI NO: 18414897 NR Description: ethylene responsive element binding factor 1
  misc_feature (1)..(146): Homolog of NCBI NO: 25350257 NR Description: EREBP-2 protein [imported] - Arabidopsis thaliana
  misc_feature (1)..(146): Homolog of NCBI NO: 25350258 NR Description: ethylene responsive element binding factor 1
  misc_feature (1)..(146): Homolog of NCBI NO: 21264420 NR Description: Ethylene responsive element binding factor 1
  misc_feature (1)..(147): Homolog of NCBI NO: 21592595 NR Description: ethylene responsive element binding factor 2
  misc_feature (1)..(147): Homolog of NCBI NO: 15238041 NR Description: ethylene responsive element binding factor 2

SEQ ID NO: 44147 - DNA, 771 bp, Arabidopsis thaliana; identical to SEQ ID NO: 25848
  misc_feature (1)..(771): Ceres Seq. ID no. 13503800
  misc_feature: MA Experiment ID: 108434 Result: Down-regulated in Transcription
  misc_feature: MA Experiment 108434 PARAMETER Experiment Name: At_Root_Tips_cDNA_P Parameter: Tissue Value: Root Tips
  misc_feature: MA Experiment ID: 20000214 Result: Up-regulated in Transcription
  misc_feature: MA Experiment 20000214 PARAMETER Experiment Name: At_4deg_Cold_P Parameter: Timepoint (hr) Value: 6
  misc_feature: MA Experiment ID: 20001451 Result: Up-regulated in Transcription
  misc_feature: MA Experiment 20001451 PARAMETER Experiment Name: At_Far-red-induction_P Parameter: Age (day) Value: 7
  misc_feature: MA Experiment 20001451 PARAMETER Experiment Name: At_Far-red-induction_P Parameter: Light Value: Far-red vs. White
  misc_feature: MA Experiment 20001451 PARAMETER Experiment Name: At_Far-red-induction_P Parameter: Organism Value: A. thaliana
  misc_feature: MA Experiment 20001451 PARAMETER Experiment Name: At_Far-red-induction_P Parameter: Plant Line Value: Columbia
  misc_feature: MA Experiment 20001451 PARAMETER Experiment Name: At_Far-red-induction_P Parameter: Timepoint (hr) Value: 24
  misc_feature: MA Experiment 20001451 PARAMETER Experiment Name: At_Far-red-induction_P Parameter: Tissue Value: Whole Plant

SEQ ID NO: 44148 - protein, 158 aa, Arabidopsis thaliana; identical to SEQ ID NO: 25849
  peptide (1)..(158): Ceres Seq. ID no. 13503801
  misc_feature (6)..(141): Homolog of NCBI NO: 2982253 NR Description: CROC-1-like protein [Picea mariana]
  misc_feature (6)..(141): Homolog of NCBI NO: 30686662 NR Description: ubiquitin-conjugating enzyme family [Arabidopsis
  misc_feature (6)..(141): Homolog of NCBI NO: 18404032 NR Description: ubiquitin-conjugating enzyme family [Arabidopsis
  misc_feature (1)..(141): Homolog of NCBI NO: 30693656 NR Description: ubiquitin-conjugating enzyme family [Arabidopsis
  misc_feature (1)..(141): Homolog of NCBI NO: 18409633 NR Description: ubiquitin-conjugating enzyme family [Arabidopsis
  misc_feature (10)..(158): Homolog of NCBI NO: 13324790 NR Description: putative DNA-binding protein [Oryza sativa]
  misc_feature (1)..(158): Homolog of NCBI NO: 18409647 NR Description: ubiquitin-conjugating enzyme family [Arabidopsis
  misc_feature (1)..(158): Homolog of NCBI NO: 21593918 NR Description: E2, ubiquitin-conjugating enzyme, putative
  misc_feature (1)..(158): Homolog of NCBI NO: 25326240 NR Description: protein F26F24.10 [imported] - Arabidopsis
  misc_feature (1)..(158): Homolog of NCBI NO: 18395221 NR Description: ubiquitin-conjugating enzyme family [Arabidopsis
  misc_feature (6)..(141): Homolog of NCBI NO: 2982253 NR Description: CROC-1-like protein [Picea mariana]
  misc_feature (6)..(141): Homolog of NCBI NO: 30686662 NR Description: ubiquitin-conjugating enzyme family [Arabidopsis
  misc_feature (6)..(141): Homolog of NCBI NO: 18404032 NR Description: ubiquitin-conjugating enzyme family [Arabidopsis
  misc_feature (1)..(141): Homolog of NCBI NO: 30693656 NR Description: ubiquitin-conjugating enzyme family [Arabidopsis
  misc_feature (1)..(141): Homolog of NCBI NO: 18409633 NR Description: ubiquitin-conjugating enzyme family [Arabidopsis
  misc_feature (10)..(158): Homolog of NCBI NO: 13324790 NR Description: putative DNA-binding protein [Oryza sativa]
  misc_feature (1)..(158): Homolog of NCBI NO: 18409647 NR Description: ubiquitin-conjugating enzyme family [Arabidopsis
  misc_feature (1)..(158): Homolog of NCBI NO: 21593918 NR Description: E2, ubiquitin-conjugating enzyme, putative
  misc_feature (1)..(158): Homolog of NCBI NO: 25326240 NR Description: protein F26F24.10 [imported] - Arabidopsis
  misc_feature (1)..(158): Homolog of NCBI NO: 18395221 NR Description: ubiquitin-conjugating enzyme family [Arabidopsis

SEQ ID NO: 44149 - protein, 123 aa, Arabidopsis thaliana; identical to SEQ ID NO: 25850
  peptide (1)..(123): Ceres Seq. ID no. 13503802
  misc_feature (1)..(106): Homolog of NCBI NO: 2982253 NR Description: CROC-1-like protein [Picea mariana]
  misc_feature (1)..(106): Homolog of NCBI NO: 30686662 NR Description: ubiquitin-conjugating enzyme family [Arabidopsis
  misc_feature (1)..(106): Homolog of NCBI NO: 18404032 NR Description: ubiquitin-conjugating enzyme family [Arabidopsis
  misc_feature (1)..(106): Homolog of NCBI NO: 30693656 NR Description: ubiquitin-conjugating enzyme family [Arabidopsis
  misc_feature (1)..(106): Homolog of NCBI NO: 18409633 NR Description: ubiquitin-conjugating enzyme family [Arabidopsis
  misc_feature (1)..(123): Homolog of NCBI NO: 13324790 NR Description: putative DNA-binding protein [Oryza sativa]
  misc_feature (1)..(123): Homolog of NCBI NO: 18409647 NR Description: ubiquitin-conjugating enzyme family [Arabidopsis
  misc_feature (1)..(123): Homolog of NCBI NO: 21593918 NR Description: E2, ubiquitin-conjugating enzyme, putative
  misc_feature (1)..(123): Homolog of NCBI NO: 25326240 NR Description: protein F26F24.10 [imported] - Arabidopsis
  misc_feature (1)..(123): Homolog of NCBI NO: 18395221 NR Description: ubiquitin-conjugating enzyme family [Arabidopsis
  misc_feature (1)..(106): Homolog of NCBI NO: 2982253 NR Description: CROC-1-like protein [Picea mariana]
  misc_feature (1)..(106): Homolog of NCBI NO: 30686662 NR Description: ubiquitin-conjugating enzyme family [Arabidopsis
  misc_feature (1)..(106): Homolog of NCBI NO: 18404032 NR Description: ubiquitin-conjugating enzyme family [Arabidopsis
  misc_feature (1)..(106): Homolog of NCBI NO: 30693656 NR Description: ubiquitin-conjugating enzyme family [Arabidopsis
  misc_feature (1)..(106): Homolog of NCBI NO: 18409633 NR Description: ubiquitin-conjugating enzyme family [Arabidopsis
  misc_feature (1)..(123): Homolog of NCBI NO: 13324790 NR Description: putative DNA-binding protein [Oryza sativa]
  misc_feature (1)..(123): Homolog of NCBI NO: 18409647 NR Description: ubiquitin-conjugating enzyme family [Arabidopsis
  misc_feature (1)..(123): Homolog of NCBI NO: 21593918 NR Description: E2, ubiquitin-conjugating enzyme, putative
  misc_feature (1)..(123): Homolog of NCBI NO: 25326240 NR Description: protein F26F24.10 [imported] - Arabidopsis
  misc_feature (1)..(123): Homolog of NCBI NO: 18395221 NR Description: ubiquitin-conjugating enzyme family [Arabidopsis

SEQ ID NO: 44150 - protein, 115 aa, Arabidopsis thaliana; identical to SEQ ID NO: 25851
  peptide (1)..(115): Ceres Seq. ID no. 13503803
  misc_feature (1)..(98): Homolog of NCBI NO: 2982253 NR Description: CROC-1-like protein [Picea mariana]
  misc_feature (1)..(98): Homolog of NCBI NO: 30686662 NR Description: ubiquitin-conjugating enzyme family [Arabidopsis
  misc_feature (1)..(98): Homolog of NCBI NO: 18404032 NR Description: ubiquitin-conjugating enzyme family [Arabidopsis
  misc_feature (1)..(98): Homolog of NCBI NO: 30693656 NR Description: ubiquitin-conjugating enzyme family [Arabidopsis
  misc_feature (1)..(98): Homolog of NCBI NO: 18409633 NR Description: ubiquitin-conjugating enzyme family [Arabidopsis
  misc_feature (1)..(115): Homolog of NCBI NO: 13324790 NR Description: putative DNA-binding protein [Oryza sativa]
  misc_feature (1)..(115): Homolog of NCBI NO: 18409647 NR Description: ubiquitin-conjugating enzyme family [Arabidopsis
  misc_feature (1)..(115): Homolog of NCBI NO: 21593918 NR Description: E2, ubiquitin-conjugating enzyme, putative
  misc_feature (1)..(115): Homolog of NCBI NO: 25326240 NR Description: protein F26F24.10 [imported] - Arabidopsis
  misc_feature (1)..(115): Homolog of NCBI NO: 18395221 NR Description: ubiquitin-conjugating enzyme family [Arabidopsis
  misc_feature (1)..(98): Homolog of NCBI NO: 2982253 NR Description: CROC-1-like protein [Picea mariana]
  misc_feature (1)..(98): Homolog of NCBI NO: 30686662 NR Description: ubiquitin-conjugating enzyme family [Arabidopsis
  misc_feature (1)..(98): Homolog of NCBI NO: 18404032 NR Description: ubiquitin-conjugating enzyme family [Arabidopsis
  misc_feature (1)..(98): Homolog of NCBI NO: 30693656 NR Description: ubiquitin-conjugating enzyme family [Arabidopsis
  misc_feature (1)..(98): Homolog of NCBI NO: 18409633 NR Description: ubiquitin-conjugating enzyme family [Arabidopsis
  misc_feature (1)..(115): Homolog of NCBI NO: 13324790 NR Description: putative DNA-binding protein [Oryza sativa]
  misc_feature (1)..(115): Homolog of NCBI NO: 18409647 NR Description: ubiquitin-conjugating enzyme family [Arabidopsis
  misc_feature (1)..(115): Homolog of NCBI NO: 21593918 NR Description: E2, ubiquitin-conjugating enzyme, putative
  misc_feature (1)..(115): Homolog of NCBI NO: 25326240 NR Description: protein F26F24.10 [imported] - Arabidopsis
  misc_feature (1)..(115): Homolog of NCBI NO: 18395221 NR Description: ubiquitin-conjugating enzyme family [Arabidopsis

SEQ ID NO: 44151 - DNA, 999 bp, Arabidopsis thaliana
  misc_feature (1)..(999): Ceres Seq. ID no. 12580301
  misc_feature: MA Experiment ID: 20000169 Result: Down-regulated in Transcription
  misc_feature: MA Experiment 20000169 PARAMETER Experiment Name: At_100uM_ABA_P Parameter: Age (day) Value: 14
  misc_feature: MA Experiment 20000169 PARAMETER Experiment Name: At_100uM_ABA_P Parameter: Organism Value: A. thaliana
  misc_feature: MA Experiment 20000169 PARAMETER Experiment Name: At_100uM_ABA_P Parameter: Plant Line Value: WS
  misc_feature: MA Experiment 20000169 PARAMETER Experiment Name: At_100uM_ABA_P Parameter: Timepoint (hr) Value: 6
  misc_feature: MA Experiment 20000169 PARAMETER Experiment Name: At_100uM_ABA_P Parameter: Tissue Value: Aerial
  misc_feature: MA Experiment 20000169 PARAMETER Experiment Name: At_100uM_ABA_P Parameter: Treatment Value: 100uM ABA vs. No Treatment
  misc_feature: MA Experiment ID: 20000171 Result: Down-regulated in Transcription
  misc_feature: MA Experiment 20000171 PARAMETER Experiment Name: At_42deg_Heat_P Parameter: Age (day) Value: 14
  misc_feature: MA Experiment 20000171 PARAMETER Experiment Name: At_42deg_Heat_P Parameter: Organism Value: A. thaliana
  misc_feature: MA Experiment 20000171 PARAMETER Experiment Name: At_42deg_Heat_P Parameter: Plant Line Value: WS
  misc_feature: MA Experiment 20000171 PARAMETER Experiment Name: At_42deg_Heat_P Parameter: Temperature (deg C) Value: 42 vs. 22
  misc_feature: MA Experiment 20000171 PARAMETER Experiment Name: At_42deg_Heat_P Parameter: Timepoint (hr) Value: 1
  misc_feature: MA Experiment 20000171 PARAMETER Experiment Name: At_42deg_Heat_P Parameter: Tissue Value: Aerial
  misc_feature: MA Experiment ID: 20000173 Result: Down-regulated in Transcription
  misc_feature: MA Experiment 20000173 PARAMETER Experiment Name: At_42deg_Heat_P Parameter: Age (day) Value: 14
  misc_feature: MA Experiment 20000173 PARAMETER Experiment Name: At_42deg_Heat_P Parameter: Organism Value: A. thaliana
  misc_feature: MA Experiment 20000173 PARAMETER Experiment Name: At_42deg_Heat_P Parameter: Plant Line Value: WS
  misc_feature: MA Experiment 20000173 PARAMETER Experiment Name: At_42deg_Heat_P Parameter: Temperature (deg C) Value: 42 vs. 22
  misc_feature: MA Experiment 20000173 PARAMETER Experiment Name: At_42deg_Heat_P Parameter: Timepoint (hr) Value: 6
  misc_feature: MA Experiment 20000173 PARAMETER Experiment Name: At_42deg_Heat_P Parameter: Tissue Value: Aerial
  misc_feature: MA Experiment ID: 20000182 Result: Down-regulated in Transcription
  misc_feature: MA Experiment 20000182 PARAMETER Experiment Name: At_2mM_SA_P Parameter: Age (day) Value: 14
  misc_feature: MA Experiment 20000182 PARAMETER Experiment Name: At_2mM_SA_P Parameter: Organism Value: A. thaliana
  misc_feature: MA Experiment 20000182 PARAMETER Experiment Name: At_2mM_SA_P Parameter: Plant Line Value: WS
  misc_feature: MA Experiment 20000182 PARAMETER Experiment Name: At_2mM_SA_P Parameter: Timepoint (hr) Value: 6
  misc_feature: MA Experiment 20000182 PARAMETER Experiment Name: At_2mM_SA_P Parameter: Tissue Value: Aerial
  misc_feature: MA Experiment 20000182 PARAMETER Experiment Name: At_2mM_SA_P Parameter: Treatment Value: 2mM SA vs. No Treatment
  misc_feature: MA Experiment ID: 20000227 Result: Up-regulated in Transcription
  misc_feature: MA Experiment 20000227 PARAMETER Experiment Name: At_Root-Tips-vs-Tops_P Parameter: Tissue Value: Root Tips vs. Root Tops
  misc_feature: MA Experiment ID: 20000234 Result: Up-regulated in Transcription
  misc_feature: MA Experiment 20000234 PARAMETER Experiment Name: At_Siliques_P Parameter: Age (day) Value: 21
  misc_feature: MA Experiment 20000234 PARAMETER Experiment Name: At_Siliques_P Parameter: Organism Value: A. thaliana
  misc_feature: MA Experiment 20000234 PARAMETER Experiment Name: At_Siliques_P Parameter: Plant Line Value: WS
  misc_feature: MA Experiment 20000234 PARAMETER Experiment Name: At_Siliques_P Parameter: Tissue Value: Less Than 5mm Siliques vs. Whole Plant
  misc_feature: MA Experiment ID: 20000265 Result: Up-regulated in Transcription
  misc_feature: MA Experiment 20000265 PARAMETER Experiment Name: At_Open_Flower_P Parameter: Age (day) Value: 21
  misc_feature: MA Experiment 20000265 PARAMETER Experiment Name: At_Open_Flower_P Parameter: Plant Line Value: WS
  misc_feature: MA Experiment 20000265 PARAMETER Experiment Name: At_Open_Flower_P Parameter: Tissue Value: Closed Flower vs. Whole Plant
  misc_feature: MA Experiment ID: 20000436 Result: Down-regulated in Transcription
  misc_feature: MA Experiment 20000436 PARAMETER Experiment Name: At_Drought_P Parameter: Age (day) Value: 7
  misc_feature: MA Experiment 20000436 PARAMETER Experiment Name: At_Drought_P Parameter: Organism Value: A. thaliana
  misc_feature: MA Experiment 20000436 PARAMETER Experiment Name: At_Drought_P Parameter: Plant Line Value: WS
  misc_feature: MA Experiment 20000436 PARAMETER Experiment Name: At_Drought_P Parameter: Timepoint (hr) Value: 12
  misc_feature: MA Experiment 20000436 PARAMETER Experiment Name: At_Drought_P Parameter: Tissue Value: Whole Plant
  misc_feature: MA Experiment 20000436 PARAMETER Experiment Name: At_Drought_P Parameter: Treatment Value: Drought vs. No Drought
  misc_feature: MA Experiment ID: 20000437 Result: Down-regulated in Transcription
  misc_feature: MA Experiment 20000437 PARAMETER Experiment Name: At_Drought_P Parameter: Age (day) Value: 8
  misc_feature: MA Experiment 20000437 PARAMETER Experiment Name: At_Drought_P Parameter: Organism Value: A. thaliana
  misc_feature: MA Experiment 20000437 PARAMETER Experiment Name: At_Drought_P Parameter: Plant Line Value: WS
  misc_feature: MA Experiment 20000437 PARAMETER Experiment Name: At_Drought_P Parameter: Timepoint (hr) Value: 24
  misc_feature: MA Experiment 20000437 PARAMETER Experiment Name: At_Drought_P Parameter: Tissue Value: Whole Plant
  misc_feature: MA Experiment 20000437 PARAMETER Experiment Name: At_Drought_P Parameter: Treatment Value: Drought vs. No Drought
  misc_feature: MA Experiment ID: 20000453 Result: Down-regulated in Transcription
  misc_feature: MA Experiment 20000453 PARAMETER Experiment Name: At_100uM_ABA_P Parameter: Age (day) Value: 15
  misc_feature: MA Experiment 20000453 PARAMETER Experiment Name: At_100uM_ABA_P Parameter: Organism Value: A. thaliana
  misc_feature: MA Experiment 20000453 PARAMETER Experiment Name: At_100uM_ABA_P Parameter: Plant Line Value: WS
  misc_feature: MA Experiment 20000453 PARAMETER Experiment Name: At_100uM_ABA_P Parameter: Timepoint (hr) Value: 24
  misc_feature: MA Experiment 20000453 PARAMETER Experiment Name: At_100uM_ABA_P Parameter: Tissue Value: Aerial
  misc_feature: MA Experiment 20000453 PARAMETER Experiment Name: At_100uM_ABA_P Parameter: Treatment Value: 100uM ABA vs. No Treatment
  misc_feature: MA Experiment ID: 20000496 Result: Up-regulated in Transcription
  misc_feature: MA Experiment 20000496 PARAMETER Experiment Name: At_Guard_Cells_P Parameter: Harvest Date Value: 7/19/2002
  misc_feature: MA Experiment 20000496 PARAMETER Experiment Name: At_Guard_Cells_P Parameter: Organism Value: Canola
  misc_feature: MA Experiment 20000496 PARAMETER Experiment Name: At_Guard_Cells_P Parameter: Tissue Value: Guard Cells vs. Leaves
  misc_feature: MA Experiment ID: 20000573 Result: Down-regulated in Transcription
  misc_feature: MA Experiment 20000573 PARAMETER Experiment Name: At_100uM_ABA_Mutants__P Parameter: Organism Value: A. thaliana
  misc_feature: MA Experiment 20000573 PARAMETER Experiment Name: At_100uM_ABA_Mutants__P Parameter: Plant Line Value: CS22 vs. Ler wt
  misc_feature: MA Experiment 20000573 PARAMETER Experiment Name: At_100uM_ABA_Mutants__P Parameter: Timepoint (hr) Value: N/A
  misc_feature: MA Experiment 20000573 PARAMETER Experiment Name: At_100uM_ABA_Mutants__P Parameter: Tissue Value: Whole Plant
  misc_feature: MA Experiment 20000573 PARAMETER Experiment Name: At_100uM_ABA_Mutants__P Parameter: Treatment Value: None
  misc_feature: MA Experiment ID: 20000794 Result: Down-regulated in Transcription
  misc_feature: MA Experiment 20000794 PARAMETER Experiment Name: At_Petals_P Parameter: Age (day) Value: 23-25 days
  misc_feature: MA Experiment 20000794 PARAMETER Experiment Name: At_Petals_P Parameter: Plant Line Value: WS
  misc_feature: MA Experiment 20000794 PARAMETER Experiment Name: At_Petals_P Parameter: Tissue Value: Petals vs. Whole plant
  misc_feature: MA Experiment ID: 20001248 Result: Down-regulated in Transcription
  misc_feature: MA Experiment 20001248 PARAMETER Experiment Name: At_Far-red-induction_P Parameter: Age (day) Value: 7
  misc_feature: MA Experiment 20001248 PARAMETER Experiment Name: At_Far-red-induction_P Parameter: Light Value: Far-red vs. White
  misc_feature: MA Experiment 20001248 PARAMETER Experiment Name: At_Far-red-induction_P Parameter: Organism Value: A. thaliana
  misc_feature: MA Experiment 20001248 PARAMETER Experiment Name: At_Far-red-induction_P Parameter: Plant Line Value: Columbia
  misc_feature: MA Experiment 20001248 PARAMETER Experiment Name: At_Far-red-induction_P Parameter: Timepoint (hr) Value: 4
  misc_feature: MA Experiment 20001248 PARAMETER Experiment Name: At_Far-red-induction_P Parameter: Tissue Value: Whole Plant
  misc_feature: MA Experiment ID: 20001450 Result: Down-regulated in Transcription
  misc_feature: MA Experiment 20001450 PARAMETER Experiment Name: At_Far-red-induction_P Parameter: Age (day) Value: 7
  misc_feature: MA Experiment 20001450 PARAMETER Experiment Name: At_Far-red-induction_P Parameter: Light Value: Far-red vs. White
  misc_feature: MA Experiment 20001450 PARAMETER Experiment Name: At_Far-red-induction_P Parameter: Organism Value: A. thaliana
  misc_feature: MA Experiment 20001450 PARAMETER Experiment Name: At_Far-red-induction_P Parameter: Plant Line Value: Columbia
  misc_feature: MA Experiment 20001450 PARAMETER Experiment Name: At_Far-red-induction_P Parameter: Timepoint (hr) Value: 8
  misc_feature: MA Experiment 20001450 PARAMETER Experiment Name: At_Far-red-induction_P Parameter: Tissue Value: Whole Plant
  misc_feature: MA Experiment ID: 20001554 Result: Down-regulated in Transcription
  misc_feature: MA Experiment 20001554 PARAMETER Experiment Name: At_Drought_Soil_Dry_P Parameter: Age (day) Value: 21
  misc_feature: MA Experiment 20001554 PARAMETER Experiment Name: At_Drought_Soil_Dry_P Parameter: Organism Value: A. thaliana
  misc_feature: MA Experiment 20001554 PARAMETER Experiment Name: At_Drought_Soil_Dry_P Parameter: Plant Line Value: WS
  misc_feature: MA Experiment 20001554 PARAMETER Experiment Name: At_Drought_Soil_Dry_P Parameter: Post Timepoint (hr) Value: None
  misc_feature: MA Experiment 20001554 PARAMETER Experiment Name: At_Drought_Soil_Dry_P Parameter: Post-Treatment Value: None
  misc_feature: MA Experiment 20001554 PARAMETER Experiment Name: At_Drought_Soil_Dry_P Parameter: Timepoint (day) Value: 7
  misc_feature: MA Experiment 20001554 PARAMETER Experiment Name: At_Drought_Soil_Dry_P Parameter: Treatment Value: Drought vs. No Drought
  misc_feature: MA Experiment ID: 20001555 Result: Down-regulated in Transcription
  misc_feature: MA Experiment 20001555 PARAMETER Experiment Name: At_Drought_Soil_Dry_P Parameter: Age (day) Value: 24
  misc_feature: MA Experiment 20001555 PARAMETER Experiment Name: At_Drought_Soil_Dry_P Parameter: Organism Value: A. thaliana
  misc_feature: MA Experiment 20001555 PARAMETER Experiment Name: At_Drought_Soil_Dry_P Parameter: Plant Line Value: WS
  misc_feature: MA Experiment 20001555 PARAMETER Experiment Name: At_Drought_Soil_Dry_P Parameter: Post Timepoint (hr) Value: None
  misc_feature: MA Experiment 20001555 PARAMETER Experiment Name: At_Drought_Soil_Dry_P Parameter: Post-Treatment Value: None
  misc_feature: MA Experiment 20001555 PARAMETER Experiment Name: At_Drought_Soil_Dry_P Parameter: Timepoint (day) Value: 10
  misc_feature: MA Experiment 20001555 PARAMETER Experiment Name: At_Drought_Soil_Dry_P Parameter: Treatment Value: Drought vs. No Drought
  misc_feature: MA Experiment ID: 20001558 Result: Up-regulated in Transcription
  misc_feature: MA Experiment 20001558 PARAMETER Experiment Name: At_Drought_Soil_Dry_P Parameter: Age (day) Value: 27
  misc_feature: MA Experiment 20001558 PARAMETER Experiment Name: At_Drought_Soil_Dry_P Parameter: Organism Value: A. thaliana
  misc_feature: MA Experiment 20001558 PARAMETER Experiment Name: At_Drought_Soil_Dry_P Parameter: Plant Line Value: WS
  misc_feature: MA Experiment 20001558 PARAMETER Experiment Name: At_Drought_Soil_Dry_P Parameter: Post Timepoint (hr) Value: 6
  misc_feature: MA Experiment 20001558 PARAMETER Experiment Name: At_Drought_Soil_Dry_P Parameter: Post-Treatment Value: Re-Water vs. No Drought
  misc_feature: MA Experiment 20001558 PARAMETER Experiment Name: At_Drought_Soil_Dry_P Parameter: Timepoint (day) Value: 13
  misc_feature: MA Experiment 20001558 PARAMETER Experiment Name: At_Drought_Soil_Dry_P Parameter: Treatment Value: Drought vs. No Drought
  misc_feature: MA Experiment ID: 20001560 Result: Up-regulated in Transcription
  misc_feature: MA Experiment 20001560 PARAMETER Experiment Name: At_Drought_Soil_Dry_P Parameter: Age (day) Value: 28
  misc_feature: MA Experiment 20001560 PARAMETER Experiment Name: At_Drought_Soil_Dry_P Parameter: Organism Value: A. thaliana
  misc_feature: MA Experiment 20001560 PARAMETER Experiment Name: At_Drought_Soil_Dry_P Parameter: Plant Line Value: WS
  misc_feature: MA Experiment 20001560 PARAMETER Experiment Name: At_Drought_Soil_Dry_P Parameter: Post Timepoint (hr) Value: None
  misc_feature: MA Experiment 20001560 PARAMETER Experiment Name: At_Drought_Soil_Dry_P Parameter: Post-Treatment Value: None
  misc_feature: MA Experiment 20001560 PARAMETER Experiment Name: At_Drought_Soil_Dry_P Parameter: Timepoint (day) Value: 14
  misc_feature: MA Experiment 20001560 PARAMETER Experiment Name: At_Drought_Soil_Dry_P Parameter: Treatment Value: Drought vs. No Drought
aaaattcaatgggagaggaagataagaaaatggaggagaagaaatctgaagagccacaagcgaaatcagaagataagaaaccagaagaagagaaaaagaaagaacctcaagagattgtgcttaagatttttatgcattgtgaaggttgtgctaaaaaaatccatagatgtcttaaaggctttgaaggagtggaggatgtaactactgattgtaagactagtaaagttgtggtgaaaggagagaaggcagatccattaaaagtgttgcaaagattgcagaggaagagccatcgtcaagtggagcttatctcaccgattccggagcctaaaccggtttctgataaaccggagaaaaaggagaaggagaaacctaaacctgaggagaaaaaagaagaggtagtgacagtggtgctgagagttcacatgcattgngaagcatgtgccatggagattcaaaagaggatcatgagaatgaaaggagtggagtctgtgganccagattttaaagcatcncnagtgagcgtgaaaggagtttttacgccggaaaagctagttgagttcatttacaagagaatcgggaagcatgccgcggttgtcaagcaagatccgccgccaaaacctccggagaaagaaaaagaaacgaaagncaaagacgagaagaaaaaggaagagggncagcccaaagaaggaaaagaggccaaggaaaacggtggtggaggaggtgctaaaggcgatggtgctgccgcggaggaggggaacaaagtggtagacttgaagaagaacgaatatcagtaccagccnccgaggtaccccgtggagatgtttgcttatccaccgcagatattcagtgatgaaaaccccaatgcttgtaccattatgtaataaaatcgtcggtttaaggggttgtaggatttgttatttttttactttatttctatgcagaattttaatttaaatgtatttttggtaatttttagtttcaaccgaattgaatgatcgc

SEQ ID NO: 44152 - protein, 292 aa, Arabidopsis thaliana
  peptide (1)..(292): Ceres Seq. ID no. 12580302
  misc_feature (5)..(122): Pfam Name: Dehydrin Pfam Description: Dehydrin
  misc_feature (5)..(279): Homolog of NCBI NO: 31193908 NR Description: putative heavy-metal-associated protein
  misc_feature (4)..(223): Homolog of NCBI NO: 15233023 NR Description: hypothetical protein; protein id: At3g02960.1
  misc_feature (10)..(231): Homolog of NCBI NO: 37532382 NR Description: putative ATFP3 [Oryza sativa (japonica
  misc_feature (159)..(292): Homolog of NCBI NO: 15241255 NR Description: putative protein; protein id: At5g50730.1
  misc_feature (264)..(292): Homolog of NCBI NO: 38344582 NR Description: OSJNBa0053B21.14 [Oryza sativa (japonica
  misc_feature (4)..(267): Homolog of NCBI NO: 38344582 NR Description: OSJNBa0053B21.14 [Oryza sativa (japonica
  misc_feature (35)..(264): Homolog of NCBI NO: 4097547 NR Description: ATFP3 [Arabidopsis thaliana]
  misc_feature (10)..(160): Homolog of NCBI NO: 15241256 NR Description: copper chaperone (CCH)-related; protein id:
  misc_feature (6)..(278): Homolog of NCBI NO: 18424719 NR Description: copper chaperone (CCH)-related
  misc_feature (6)..(278): Homolog of NCBI NO: 9758294 NR Description: contains similarity to ATFP3~gene_id:MLE2.16
  misc_feature (143)..(143): Xaa is any aa, unknown or other
  misc_feature (164)..(164): Xaa is any aa, unknown or other
  misc_feature (170)..(170): Xaa is any aa, unknown or other
  misc_feature (171)..(171): Xaa is any aa, unknown or other
  misc_feature (215)..(215): Xaa is any aa, unknown or other
  misc_feature (224)..(224): Xaa is any aa, unknown or other
  misc_feature (266)..(266): Xaa is any aa, unknown or other
NSMGEEDKKMEEKKSEEPQAKSEDKKPEEEKKKEPQEIVLKIFMHCEGCAKKIHRCLKGFEGVEDVTTDCKTSKVVVKGEKADPLKVLQRLQRKSHRQVELISPIPEPKPVSDKPEKKEKEKPKPEEKKEEVVTVVLRVHMHXEACAMEIQKRIMRMKGVESVXPDFKAXXVSVKGVFTPEKLVEFIYKRIGKHAAVVKQDPPPKPPEKEKETKXKDEKKKEEXQPKEGKEAKENGGGGGAKGDGAAAEEGNKVVDLKKNEYQYQXPRYPVEMFAYPPQIFSDENPNACTIM

SEQ ID NO: 44153 - protein, 290 aa, Arabidopsis thaliana
  peptide (1)..(290): Ceres Seq. ID no. 12580303
  misc_feature (3)..(120): Pfam Name: Dehydrin Pfam Description: Dehydrin
  misc_feature (3)..(277): Homolog of NCBI NO: 31193908 NR Description: putative heavy-metal-associated protein
  misc_feature (2)..(221): Homolog of NCBI NO: 15233023 NR Description: hypothetical protein; protein id: At3g02960.1
  misc_feature (8)..(229): Homolog of NCBI NO: 37532382 NR Description: putative ATFP3 [Oryza sativa (japonica
  misc_feature (157)..(290): Homolog of NCBI NO: 15241255 NR Description: putative protein; protein id: At5g50730.1
  misc_feature (262)..(290): Homolog of NCBI NO: 38344582 NR Description: OSJNBa0053B21.14 [Oryza sativa (japonica
  misc_feature (2)..(265): Homolog of NCBI NO: 38344582 NR Description: OSJNBa0053B21.14 [Oryza sativa (japonica
  misc_feature (33)..(262): Homolog of NCBI NO: 4097547 NR Description: ATFP3 [Arabidopsis thaliana]
  misc_feature (8)..(158): Homolog of NCBI NO: 15241256 NR Description: copper chaperone (CCH)-related; protein id:
  misc_feature (4)..(276): Homolog of NCBI NO: 18424719 NR Description: copper chaperone (CCH)-related
  misc_feature (4)..(276): Homolog of NCBI NO: 9758294 NR Description: contains similarity to ATFP3~gene_id:MLE2.16
  misc_feature (141)..(141): Xaa is any aa, unknown or other
  misc_feature (162)..(162): Xaa is any aa, unknown or other
  misc_feature (168)..(168): Xaa is any aa, unknown or other
  misc_feature (169)..(169): Xaa is any aa, unknown or other
  misc_feature (213)..(213): Xaa is any aa, unknown or other
  misc_feature (222)..(222): Xaa is any aa, unknown or other
  misc_feature (264)..(264): Xaa is any aa, unknown or other
MGEEDKKMEEKKSEEPQAKSEDKKPEEEKKKEPQEIVLKIFMHCEGCAKKIHRCLKGFEGVEDVTTDCKTSKVVVKGEKADPLKVLQRLQRKSHRQVELISPIPEPKPVSDKPEKKEKEKPKPEEKKEEVVTVVLRVHMHXEACAMEIQKRIMRMKGVESVXPDFKAXXVSVKGVFTPEKLVEFIYKRIGKHAAVVKQDPPPKPPEKEKETKXKDEKKKEEXQPKEGKEAKENGGGGGAKGDGAAAEEGNKVVDLKKNEYQYQXPRYPVEMFAYPPQIFSDENPNACTIM

SEQ ID NO: 44154 - protein, 283 aa, Arabidopsis thaliana
  peptide (1)..(283): Ceres Seq. ID no. 12580304
  misc_feature (1)..(113): Pfam Name: Dehydrin Pfam Description: Dehydrin
  misc_feature (1)..(270): Homolog of NCBI NO: 31193908 NR Description: putative heavy-metal-associated protein
  misc_feature (1)..(214): Homolog of NCBI NO: 15233023 NR Description: hypothetical protein; protein id: At3g02960.1
  misc_feature (1)..(222): Homolog of NCBI NO: 37532382 NR Description: putative ATFP3 [Oryza sativa (japonica
  misc_feature (150)..(283): Homolog of NCBI NO: 15241255 NR Description: putative protein; protein id: At5g50730.1
  misc_feature (255)..(283): Homolog of NCBI NO: 38344582 NR Description: OSJNBa0053B21.14 [Oryza sativa (japonica
  misc_feature (1)..(258): Homolog of NCBI NO: 38344582 NR Description: OSJNBa0053B21.14 [Oryza sativa (japonica
  misc_feature (26)..(255): Homolog of NCBI NO: 4097547 NR Description: ATFP3 [Arabidopsis thaliana]
  misc_feature (1)..(151): Homolog of NCBI NO: 15241256 NR Description: copper chaperone (CCH)-related; protein id:
  misc_feature (1)..(269): Homolog of NCBI NO: 18424719 NR Description: copper chaperone (CCH)-related
  misc_feature (1)..(269): Homolog of NCBI NO: 9758294 NR Description: contains similarity to ATFP3~gene_id:MLE2.16
  misc_feature (134)..(134): Xaa is any aa, unknown or other
  misc_feature (155)..(155): Xaa is any aa, unknown or other
  misc_feature (161)..(161): Xaa is any aa, unknown or other
  misc_feature (162)..(162): Xaa is any aa, unknown or other
  misc_feature (206)..(206): Xaa is any aa, unknown or other
  misc_feature (215)..(215): Xaa is any aa, unknown or other
  misc_feature (257)..(257): Xaa is any aa, unknown or other
MEEKKSEEPQAKSEDKKPEEEKKKEPQEIVLKIFMHCEGCAKKIHRCLKGFEGVEDVTTDCKTSKVVVKGEKADPLKVLQRLQRKSHRQVELISPIPEPKPVSDKPEKKEKEKPKPEEKKEEVVTVVLRVHMHXEACAMEIQKRIMRMKGVESVXPDFKAXXVSVKGVFTPEKLVEFIYKRIGKHAAVVKQDPPPKPPEKEKETKXKDEKKKEEXQPKEGKEAKENGGGGGAKGDGAAAEEGNKVVDLKKNEYQYQXPRYPVEMFAYPPQIFSDENPNACTIM

SEQ ID NO: 44155 - DNA, 1037 bp, Arabidopsis thaliana
  misc_feature (1)..(1037): Ceres Seq. ID no. 14304439
  misc_feature: MA Experiment ID: 20000184 Result: Down-regulated in Transcription
  misc_feature: MA Experiment 20000184 PARAMETER Experiment Name: At_Shoots__P Parameter: Age (day) Value: 7
  misc_feature: MA Experiment 20000184 PARAMETER Experiment Name: At_Shoots__P Parameter: Tissue Value: Shoots vs. Whole Plant
  misc_feature: MA Experiment ID: 20000437 Result: Up-regulated in Transcription
  misc_feature: MA Experiment 20000437 PARAMETER Experiment Name: At_Drought_P Parameter: Age (day) Value: 8
  misc_feature: MA Experiment 20000437 PARAMETER Experiment Name: At_Drought_P Parameter: Organism Value: A. thaliana
  misc_feature: MA Experiment 20000437 PARAMETER Experiment Name: At_Drought_P Parameter: Plant Line Value: WS
  misc_feature: MA Experiment 20000437 PARAMETER Experiment Name: At_Drought_P Parameter: Timepoint (hr) Value: 24
  misc_feature: MA Experiment 20000437 PARAMETER Experiment Name: At_Drought_P Parameter: Tissue Value: Whole Plant
  misc_feature: MA Experiment 20000437 PARAMETER Experiment Name: At_Drought_P Parameter: Treatment Value: Drought vs. No Drought
  misc_feature: MA Experiment ID: 20000794 Result: Down-regulated in Transcription
  misc_feature: MA Experiment 20000794 PARAMETER Experiment Name: At_Petals_P Parameter: Age (day) Value: 23-25 days
  misc_feature: MA Experiment 20000794 PARAMETER Experiment Name: At_Petals_P Parameter: Plant Line Value: WS
  misc_feature: MA Experiment 20000794 PARAMETER Experiment Name: At_Petals_P Parameter: Tissue Value: Petals vs. Whole plant
ctcctttgtctcgcttttttcttttgttctttcacatgtgtatatacacacagaacacacacttacatttctattatcatataaaacttcaactttaccttttatcttccaaaaaaaacactatcttcttcatcaaattctcttgattctgtttctttttatcctcctccatggccctctcacctaattcaagctctttagatttaacaatctcaattccgagcttctctccatctccttcacttggtgatcatcacgggatgagagattttgacataaaccaaacaccaaagacggaagaagatcgtgagtggatgatcggtgcaacaccacatgtcaacgaagatgatagcaactcgggtggccggcggcgcaaaaagctccgtctaacgaaagaacaatcacatcttcttgaagagagtttcatacaaaaccataccttaacccctaagcaaaaaaaagatttggccacctttttgaagcttagtcaaaggcaagttgaggtgtggtttcaaaatcgaagagctcggagtaagctaaagcacacggaaatggaatgtgagtatctaaaaagatggttcggatcgttgaaggaacaaaatcgacggctacaaatagaagttgaagaactacgagcgctaaagccatcatcgacctcggctttaaccatgtgtcctcggtgtgaacgtgtgactgatgcagtagataatgactctaatgccgttcaagagggggcagttcttagcagccggtcacggatgacaatttcctcttcctcttccctctgttgactggtttggtcgaagtcaaaagtcaaaagataaacgcctgtttcggggtaaaaagcaaagatttgatgatgattaggaggattttgtgtatagtttgctaattatttattacaaatttacaaaccagtgaggaaaaaagataatttaattctcgatctttaattagctttttgtgttatttattcataattttatttttcgtgtttaaccaaaaaatagacaaaacaaatattgcttttcgtgttc

SEQ ID NO: 44156 - protein, 206 aa, Arabidopsis thaliana
  peptide (1)..(206): Ceres Seq. ID no. 14304440
  misc_feature (67)..(123): Pfam Name: Homeobox domain Pfam Description: Homeobox domain
  misc_feature (5)..(176): Homolog of NCBI NO: 7489329 NR Description: homeobox protein - common sunflower
  misc_feature (57)..(199): Homolog of NCBI NO: 25386203 NR Description: homeobox protein HAT14
  misc_feature (15)..(199): Homolog of NCBI NO: 29028870 NR Description: At5g06710 [Arabidopsis thaliana]
  misc_feature (15)..(199): Homolog of NCBI NO: 22326632 NR Description: homeobox-leucine zipper protein HAT14 (HD-Zip
  misc_feature (15)..(199): Homolog of NCBI NO: 12230908 NR Description: Homeobox-leucine zipper protein HAT14 (HD-ZIP
  misc_feature (36)..(185): Homolog of NCBI NO: 25386214 NR Description: probable homeodomain transcription factor
  misc_feature (8)..(177): Homolog of NCBI NO: 34911664 NR Description: putative homeodomain-leucine zipper
  misc_feature (2)..(177): Homolog of NCBI NO: 5006851 NR Description: homeodomain leucine zipper protein [Oryza sativa]
  misc_feature (1)..(185): Homolog of NCBI NO: 30677923 NR Description: homeodomain-leucine zipper protein ATHB-17
  misc_feature (1)..(206): Homolog of NCBI NO: 30698765 NR Description: homeodomain-leucine zipper protein, putative
MALSPNSSSLDLTISIPSFSPSPSLGDHHGMRDFDINQTPKTEEDREWMIGATPHVNEDDSNSGGRRRKKLRLTKEQSHLLEESFIQNHTLTPKQKKDLATFLKLSQRQVEVWFQNRRARSKLKHTEMECEYLKRWFGSLKEQNRRLQIEVEELRALKPSSTSALTMCPRCERVTDAVDNDSNAVQEGAVLSSRSRMTISSSSSLC

SEQ ID NO: 44157 - protein, 176 aa, Arabidopsis thaliana
  peptide (1)..(176): Ceres Seq. ID no. 14304441
  misc_feature (37)..(93): Pfam Name: Homeobox domain Pfam Description: Homeobox domain
  misc_feature (1)..(146): Homolog of NCBI NO: 7489329 NR Description: homeobox protein - common sunflower
  misc_feature (27)..(169): Homolog of NCBI NO: 25386203 NR Description: homeobox protein HAT14
  misc_feature (1)..(169): Homolog of NCBI NO: 29028870 NR Description: At5g06710 [Arabidopsis thaliana]
  misc_feature (1)..(169): Homolog of NCBI NO: 22326632 NR Description: homeobox-leucine zipper protein HAT14 (HD-Zip
  misc_feature (1)..(169): Homolog of NCBI NO: 12230908 NR Description: Homeobox-leucine zipper protein HAT14 (HD-ZIP
  misc_feature (6)..(155): Homolog of NCBI NO: 25386214 NR Description: probable homeodomain transcription factor
  misc_feature (1)..(147): Homolog of NCBI NO: 34911664 NR Description: putative homeodomain-leucine zipper
  misc_feature (1)..(147): Homolog of NCBI NO: 5006851 NR Description: homeodomain leucine zipper protein [Oryza sativa]
  misc_feature (1)..(155): Homolog of NCBI NO: 30677923 NR Description: homeodomain-leucine zipper protein ATHB-17
  misc_feature (1)..(176): Homolog of NCBI NO: 30698765 NR Description: homeodomain-leucine zipper protein, putative
MRDFDINQTPKTEEDREWMIGATPHVNEDDSNSGGRRRKKLRLTKEQSHLLEESFIQNHTLTPKQKKDLATFLKLSQRQVEVWFQNRRARSKLKHTEMECEYLKRWFGSLKEQNRRLQIEVEELRALKPSSTSALTMCPRCERVTDAVDNDSNAVQEGAVLSSRSRMTISSSSSLC

SEQ ID NO: 44158 - protein, 158 aa, Arabidopsis thaliana
  peptide (1)..(158): Ceres Seq. ID no. 14304442
  misc_feature (19)..(75): Pfam Name: Homeobox domain Pfam Description: Homeobox domain
  misc_feature (1)..(128): Homolog of NCBI NO: 7489329 NR Description: homeobox protein - common sunflower
  misc_feature (9)..(151): Homolog of NCBI NO: 25386203 NR Description: homeobox protein HAT14
  misc_feature (1)..(151): Homolog of NCBI NO: 29028870 NR Description: At5g06710 [Arabidopsis thaliana]
  misc_feature (1)..(151): Homolog of NCBI NO: 22326632 NR Description: homeobox-leucine zipper protein HAT14 (HD-Zip
  misc_feature (1)..(151): Homolog of NCBI NO: 12230908 NR Description: Homeobox-leucine zipper protein HAT14 (HD-ZIP
  misc_feature (1)..(137): Homolog of NCBI NO: 25386214 NR Description: probable homeodomain transcription factor
  misc_feature (1)..(129): Homolog of NCBI NO: 34911664 NR Description: putative homeodomain-leucine zipper
  misc_feature (1)..(129): Homolog of NCBI NO: 5006851 NR Description: homeodomain leucine zipper protein [Oryza sativa]
  misc_feature (1)..(137): Homolog of NCBI NO: 30677923 NR Description: homeodomain-leucine zipper protein ATHB-17
  misc_feature (1)..(158): Homolog of NCBI NO: 30698765 NR Description: homeodomain-leucine zipper protein, putative
MIGATPHVNEDDSNSGGRRRKKLRLTKEQSHLLEESFIQNHTLTPKQKKDLATFLKLSQRQVEVWFQNRRARSKLKHTEMECEYLKRWFGSLKEQNRRLQIEVEELRALKPSSTSALTMCPRCERVTDAVDNDSNAVQEGAVLSSRSRMTISSSSSLC

SEQ ID NO: 44159 - DNA, 1246 bp, Arabidopsis thaliana
  misc_feature (1)..(1246): Ceres Seq. ID no. 13509786
  misc_feature: MA Experiment ID: 108434 Result: Down-regulated in Transcription
  misc_feature: MA Experiment 108434 PARAMETER Experiment Name: At_Root_Tips_cDNA_P Parameter: Tissue Value: Root Tips
  misc_feature: MA Experiment ID: 108463 Result: Up-regulated in Transcription
  misc_feature: MA Experiment 108463 PARAMETER Experiment Name: At_Germinating_Seeds_cDNA_P Parameter: Age (day) Value: 3 vs. 0
  misc_feature: MA Experiment 108463 PARAMETER Experiment Name: At_Germinating_Seeds_cDNA_P Parameter: Tissue Value: Germinating Seeds
  misc_feature: MA Experiment ID: 108464 Result: Up-regulated in Transcription
  misc_feature: MA Experiment 108464 PARAMETER Experiment Name: At_Germinating_Seeds_cDNA_P Parameter: Age (day) Value: 4 vs. 0
  misc_feature: MA Experiment 108464 PARAMETER Experiment Name: At_Germinating_Seeds_cDNA_P Parameter: Tissue Value: Germinating Seeds
  misc_feature: MA Experiment ID: 108469 Result: Up-regulated in Transcription
  misc_feature: MA Experiment ID: 108488 Result: Down-regulated in Transcription
  misc_feature: MA Experiment ID: 108572 Result: Up-regulated in Transcription
  misc_feature: MA Experiment 108572 PARAMETER Experiment Name: At_Drought_cDNA_P Parameter: Timepoint (hr) Value: 1
  misc_feature: MA Experiment 108572 PARAMETER Experiment Name: At_Drought_cDNA_P Parameter: Tissue Value: Aerial
  misc_feature: MA Experiment 108572 PARAMETER Experiment Name: At_Drought_cDNA_P Parameter: Treatment Value: Drought vs. No Drought
  misc_feature: MA Experiment ID: 108585 Result: Up-regulated in Transcription
  misc_feature: MA Experiment 108585 PARAMETER Experiment Name: At_5mM_NaNP_cDNA_P Parameter: Timepoint (hr) Value: 6
  misc_feature: MA Experiment 108585 PARAMETER Experiment Name: At_5mM_NaNP_cDNA_P Parameter: Tissue Value: Aerial
  misc_feature: MA Experiment 108585 PARAMETER Experiment Name: At_5mM_NaNP_cDNA_P Parameter: Treatment Value: null
  misc_feature: MA Experiment ID: 108594 Result: Down-regulated in Transcription
  misc_feature: MA Experiment 108594 PARAMETER Experiment Name: At_Ler-rhl_Root_cDNA_P Parameter: Plant Line Value: null
  misc_feature: MA Experiment ID: 108667 Result: Up-regulated in Transcription
  misc_feature: MA Experiment 108667 PARAMETER Experiment Name: At_2mM_SA_cDNA_P Parameter: Plant Line Value: WS
  misc_feature: MA Experiment 108667 PARAMETER Experiment Name: At_2mM_SA_cDNA_P Parameter: Timepoint (hr) Value: 1
  misc_feature: MA Experiment 108667 PARAMETER Experiment Name: At_2mM_SA_cDNA_P Parameter: Treatment Value: 2mM SA vs. No Treatment
  misc_feature: MA Experiment ID: 108668 Result: Up-regulated in Transcription
  misc_feature: MA Experiment 108668 PARAMETER Experiment Name: At_2mM_SA_cDNA_P Parameter: Plant Line Value: WS
  misc_feature: MA Experiment 108668 PARAMETER Experiment Name: At_2mM_SA_cDNA_P Parameter: Timepoint (hr) Value: 6
  misc_feature: MA Experiment 108668 PARAMETER Experiment Name: At_2mM_SA_cDNA_P Parameter: Treatment Value: 2mM SA vs. No Treatment
  misc_feature: MA Experiment ID: 20000182 Result: Up-regulated in Transcription
  misc_feature: MA Experiment 20000182 PARAMETER Experiment Name: At_2mM_SA_P Parameter: Age (day) Value: 14
  misc_feature: MA Experiment 20000182 PARAMETER Experiment Name: At_2mM_SA_P Parameter: Organism Value: A. thaliana
  misc_feature: MA Experiment 20000182 PARAMETER Experiment Name: At_2mM_SA_P Parameter: Plant Line Value: WS
  misc_feature: MA Experiment 20000182 PARAMETER Experiment Name: At_2mM_SA_P Parameter: Timepoint (hr) Value: 6
  misc_feature: MA Experiment 20000182 PARAMETER Experiment Name: At_2mM_SA_P Parameter: Tissue Value: Aerial
  misc_feature: MA Experiment 20000182 PARAMETER Experiment Name: At_2mM_SA_P Parameter: Treatment Value: 2mM SA vs. No Treatment
  misc_feature: MA Experiment ID: 20000234 Result: Down-regulated in Transcription
  misc_feature: MA Experiment 20000234 PARAMETER Experiment Name: At_Siliques_P Parameter: Age (day) Value: 21
  misc_feature: MA Experiment 20000234 PARAMETER Experiment Name: At_Siliques_P Parameter: Organism Value: A. thaliana
  misc_feature: MA Experiment 20000234 PARAMETER Experiment Name: At_Siliques_P Parameter: Plant Line Value: WS
  misc_feature: MA Experiment 20000234 PARAMETER Experiment Name: At_Siliques_P Parameter: Tissue Value: Less Than 5mm Siliques vs. Whole Plant
  misc_feature: MA Experiment ID: 20000709 Result: Up-regulated in Transcription
  misc_feature: MA Experiment 20000709 PARAMETER Experiment Name: At_15mM_NH4NO3_L-to-H_P Parameter: Age (hr) Value: 14
  misc_feature: MA Experiment 20000709 PARAMETER Experiment Name: At_15mM_NH4NO3_L-to-H_P Parameter: Organism Value: A. thaliana
  misc_feature: MA Experiment 20000709 PARAMETER Experiment Name: At_15mM_NH4NO3_L-to-H_P Parameter: Plant Line Value: WS
  misc_feature: MA Experiment 20000709 PARAMETER Experiment Name: At_15mM_NH4NO3_L-to-H_P Parameter: Timepoint (hr) Value: 4
  misc_feature: MA Experiment 20000709 PARAMETER Experiment Name: At_15mM_NH4NO3_L-to-H_P Parameter: Tissue Value: Aerial
  misc_feature: MA Experiment 20000709 PARAMETER Experiment Name: At_15mM_NH4NO3_L-to-H_P Parameter: Treatment Value: 15mM NH4NO3 vs. 30mM Mannitol
atagcagaggaaagtgaaatcatgaaagggattctagggtttgaatacgggatagttcaggcgccattaggaccagatatctccggaccagagcttgtagccgccgtcgctaatgcaggagggattggtcttctcagatgtcctgattgggagtgtcctgattacttgagagagcttataagaaagacaaagacattgacagagaaaccatttgggatcggtgttgttcttgcgtttcctcatgatttgaacattaagacaatcttagaagagaaagtggctgtcttgcagctttattggggtgattgttcacaggagcttgtggatgatgctcactttgccggtgtcaaagttattcctcaggtggggaatgtcgaagaagctagaaaggctgttgctgtaggagtagacgccattattgtccaagggcgtgaagcaggtgggcatgttattggcaaggatggtctcttttcattgttgccaagagtggtggatttagttggggaacgcgatattcccgttattgctgctggaggaattgtggatggacgcggttatgttgcagctttgtcacttggggctcaaggggtctgtctaggcacaagatttgtggcgactcatgaaagctatgcacacccaatatacaaaaggaagttgattgaatatgaaaaaaccgaatacacggatgtatttggaagagcaaggtggcctggtgcgcctcaacgtgttctggagacgcctttctttgatgactggaggtctcttccggctcatgagaatgaagttaaccaacctattattggacgttccaccatacatggcgttgaaaaggagataagaagattttcaggaacagtaccaaacatgacgacaacaggcgacttagagagtatggctatgtatgcaggccaaagcgtaggccttatcaaggagattttaccggctggagaggtagtgaaaagtcttgtggaagaagctcaggctctgatcctccaaaagttcaacaatgctactactacatgatgcagtcccagcctcaaatcatgagaaaacataaactttactgcttttggaatcgggatgaaaatagtctcatctaatgtaaataaggtacataaacttctgtatctctcgtgttgttttcaactagaaaaattgtgtccatcatgtgtaatccagcaatagaccttgtgtattggattaagtatacttcttatggttgtttgtttcctgtgaaactttccac

SEQ ID NO: 44160 - protein, 340 aa, Arabidopsis thaliana
  peptide (1)..(340): Ceres Seq. ID no. 13509787
  misc_feature (8)..(325): Pfam Name: 2-nitropropane dioxygenase Pfam Description: 2-nitropropane dioxygenase
  misc_feature (11)..(330): Homolog of NCBI NO: 15896810 NR Description: Dioxygenase related to 2-nitropropane dioxygenase
  misc_feature (27)..(330): Homolog of NCBI NO: 23038509 NR Description: hypothetical protein [Oenococcus oeni MCW]
  misc_feature (12)..(330): Homolog of NCBI NO: 23025170 NR Description: hypothetical protein
  misc_feature (11)..(330): Homolog of NCBI NO: 16799884 NR Description: similar to oxidoreductases [Listeria innocua]
  misc_feature (11)..(330): Homolog of NCBI NO: 16802856 NR Description: similar to oxidoreductases [Listeria
  misc_feature (11)..(330): Homolog of NCBI NO: 20807921 NR Description: Dioxygenases related to 2-nitropropane
  misc_feature (11)..(330): Homolog of NCBI NO: 16127609 NR Description: conserved hypothetical protein [Caulobacter
  misc_feature (27)..(338): Homolog of NCBI NO: 38505809 NR Description: 2-nitropropane dioxygenase [Synechocystis sp. PCC
  misc_feature (51)..(340): Homolog of NCBI NO: 30697978 NR Description: 2-nitropropane dioxygenase-related protein
  misc_feature (8)..(340): Homolog of NCBI NO: 30697982 NR Description: 2-nitropropane dioxygenase-related protein
IAEESEIMKGILGFEYGIVQAPLGPDISGPELVAAVANAGGIGLLRCPDWECPDYLRELIRKTKTLTEKPFGIGVVLAFPHDLNIKTILEEKVAVLQLYWGDCSQELVDDAHFAGVKVIPQVGNVEEARKAVAVGVDAIIVQGREAGGHVIGKDGLFSLLPRVVDLVGERDIPVIAAGGIVDGRGYVAALSLGAQGVCLGTRFVATHESYAHPIYKRKLIEYEKTEYTDVFGRARWPGAPQRVLETPFFDDWRSLPAHENEVNQPIIGRSTIHGVEKEIRRFSGTVPNMTTTGDLESMAMYAGQSVGLIKEILPAGEVVKSLVEEAQALILQKFNNATTT

SEQ ID NO: 44161 - protein, 333 aa, Arabidopsis thaliana
  peptide (1)..(333): Ceres Seq. ID no. 13509788
  misc_feature (1)..(318): Pfam Name: 2-nitropropane dioxygenase Pfam Description: 2-nitropropane dioxygenase
  misc_feature (4)..(323): Homolog of NCBI NO: 15896810 NR Description: Dioxygenase related to 2-nitropropane dioxygenase
  misc_feature (20)..(323): Homolog of NCBI NO: 23038509 NR Description: hypothetical protein [Oenococcus oeni MCW]
  misc_feature (5)..(323): Homolog of NCBI NO: 23025170 NR Description: hypothetical protein
  misc_feature (4)..(323): Homolog of NCBI NO: 16799884 NR Description: similar to oxidoreductases [Listeria innocua]
  misc_feature (4)..(323): Homolog of NCBI NO: 16802856 NR Description: similar to oxidoreductases [Listeria
  misc_feature (4)..(323): Homolog of NCBI NO: 20807921 NR Description: Dioxygenases related to 2-nitropropane
  misc_feature (4)..(323): Homolog of NCBI NO: 16127609 NR Description: conserved hypothetical protein [Caulobacter
  misc_feature (20)..(331): Homolog of NCBI NO: 38505809 NR Description: 2-nitropropane dioxygenase [Synechocystis sp. PCC
  misc_feature (44)..(333): Homolog of NCBI NO: 30697978 NR Description: 2-nitropropane dioxygenase-related protein
  misc_feature (1)..(333): Homolog of NCBI NO: 30697982 NR Description: 2-nitropropane dioxygenase-related protein
MKGILGFEYGIVQAPLGPDISGPELVAAVANAGGIGLLRCPDWECPDYLRELIRKTKTLTEKPFGIGVVLAFPHDLNIKTILEEKVAVLQLYWGDCSQELVDDAHFAGVKVIPQVGNVEEARKAVAVGVDAIIVQGREAGGHVIGKDGLFSLLPRVVDLVGERDIPVIAAGGIVDGRGYVAALSLGAQGVCLGTRFVATHESYAHPIYKRKLIEYEKTEYTDVFGRARWPGAPQRVLETPFFDDWRSLPAHENEVNQPIIGRSTIHGVEKEIRRFSGTVPNMTTTGDLESMAMYAGQSVGLIKEILPAGEVVKSLVEEAQALILQKFNNATTT

SEQ ID NO: 44162 - DNA, 2002 bp, Arabidopsis thaliana
  misc_feature (1)..(2002): Ceres Seq. ID no. 12489432
  misc_feature: MA Experiment ID: 20000166 Result: Up-regulated in Transcription
  misc_feature: MA Experiment 20000166 PARAMETER Experiment Name: At_100uM_ABA_P Parameter: Age (day) Value: 14
  misc_feature: MA Experiment 20000166 PARAMETER Experiment Name: At_100uM_ABA_P Parameter: Organism Value: A. thaliana
  misc_feature: MA Experiment 20000166 PARAMETER Experiment Name: At_100uM_ABA_P Parameter: Plant Line Value: WS
  misc_feature: MA Experiment 20000166 PARAMETER Experiment Name: At_100uM_ABA_P Parameter: Timepoint (hr) Value: 1
  misc_feature: MA Experiment 20000166 PARAMETER Experiment Name: At_100uM_ABA_P Parameter: Tissue Value: Aerial
  misc_feature: MA Experiment 20000166 PARAMETER Experiment Name: At_100uM_ABA_P Parameter: Treatment Value: 100uM ABA vs. No Treatment
  misc_feature: MA Experiment ID: 20000169 Result: Up-regulated in Transcription
  misc_feature: MA Experiment 20000169 PARAMETER Experiment Name: At_100uM_ABA_P Parameter: Age (day) Value: 14
  misc_feature: MA Experiment 20000169 PARAMETER Experiment Name: At_100uM_ABA_P Parameter: Organism Value: A. thaliana
  misc_feature: MA Experiment 20000169 PARAMETER Experiment Name: At_100uM_ABA_P Parameter: Plant Line Value: WS
  misc_feature: MA Experiment 20000169 PARAMETER Experiment Name: At_100uM_ABA_P Parameter: Timepoint (hr) Value: 6
  misc_feature: MA Experiment 20000169 PARAMETER Experiment Name: At_100uM_ABA_P Parameter: Tissue Value: Aerial
  misc_feature: MA Experiment 20000169 PARAMETER Experiment Name: At_100uM_ABA_P Parameter: Treatment Value: 100uM ABA vs. No Treatment
  misc_feature: MA Experiment ID: 20000179 Result: Down-regulated in Transcription
  misc_feature: MA Experiment 20000179 PARAMETER Experiment Name: At_Germinating_Seeds_P Parameter: Age (hr) Value: 6 vs. 0
  misc_feature: MA Experiment 20000179 PARAMETER Experiment Name: At_Germinating_Seeds_P Parameter: Tissue Value: Germinating Seeds
  misc_feature: MA Experiment ID: 20000182 Result: Up-regulated in Transcription
  misc_feature: MA Experiment 20000182 PARAMETER Experiment Name: At_2mM_SA_P Parameter: Age (day) Value: 14
  misc_feature: MA Experiment 20000182 PARAMETER Experiment Name: At_2mM_SA_P Parameter: Organism Value: A. thaliana
  misc_feature: MA Experiment 20000182 PARAMETER Experiment Name: At_2mM_SA_P Parameter: Plant Line Value: WS
  misc_feature: MA Experiment 20000182 PARAMETER Experiment Name: At_2mM_SA_P Parameter: Timepoint (hr) Value: 6
  misc_feature: MA Experiment 20000182 PARAMETER Experiment Name: At_2mM_SA_P Parameter: Tissue Value: Aerial
  misc_feature: MA Experiment 20000182 PARAMETER Experiment Name: At_2mM_SA_P Parameter: Treatment Value: 2mM SA vs. No Treatment
  misc_feature: MA Experiment ID: 20000234 Result: Down-regulated in Transcription
  misc_feature: MA Experiment 20000234 PARAMETER Experiment Name: At_Siliques_P Parameter: Age (day) Value: 21
  misc_feature: MA Experiment 20000234 PARAMETER Experiment Name: At_Siliques_P Parameter: Organism Value: A. thaliana
  misc_feature: MA Experiment 20000234 PARAMETER Experiment Name: At_Siliques_P Parameter: Plant Line Value: WS
  misc_feature: MA Experiment 20000234 PARAMETER Experiment Name: At_Siliques_P Parameter: Tissue Value: Less Than 5mm Siliques vs. Whole Plant
  misc_feature: MA Experiment ID: 20000267 Result: Up-regulated in Transcription
  misc_feature: MA Experiment 20000267 PARAMETER Experiment Name: At_Drought_P Parameter: Age (day) Value: 7
  misc_feature: MA Experiment 20000267 PARAMETER Experiment Name: At_Drought_P Parameter: Organism Value: A. thaliana
  misc_feature: MA Experiment 20000267 PARAMETER Experiment Name: At_Drought_P Parameter: Plant Line Value: WS
  misc_feature: MA Experiment 20000267 PARAMETER Experiment Name: At_Drought_P Parameter: Timepoint (hr) Value: 6
  misc_feature: MA Experiment 20000267 PARAMETER Experiment Name: At_Drought_P Parameter: Tissue Value: Whole Plant
  misc_feature: MA Experiment 20000267 PARAMETER Experiment Name: At_Drought_P Parameter: Treatment Value: Drought vs. No Drought
  misc_feature: MA Experiment ID: 20000268 Result: Up-regulated in Transcription
  misc_feature: MA Experiment 20000268 PARAMETER Experiment Name: At_100mM_NaCl__P Parameter: Age (day) Value: 14
  misc_feature: MA Experiment 20000268 PARAMETER Experiment Name: At_100mM_NaCl__P Parameter: Organism Value: A. thaliana
  misc_feature: MA Experiment 20000268 PARAMETER Experiment Name: At_100mM_NaCl__P Parameter: Plant Line Value: WS
  misc_feature: MA Experiment 20000268 PARAMETER Experiment Name: At_100mM_NaCl__P Parameter: Timepoint (hr) Value: 6
  misc_feature: MA Experiment 20000268 PARAMETER Experiment Name: At_100mM_NaCl__P Parameter: Tissue Value: Whole Plant
  misc_feature: MA Experiment 20000268 PARAMETER Experiment Name: At_100mM_NaCl__P Parameter: Treatment Value: 100mM NaCl vs. No Treatment
  misc_feature: MA Experiment ID: 20000436 Result: Up-regulated in Transcription
  misc_feature: MA Experiment 20000436 PARAMETER Experiment Name: At_Drought_P Parameter: Age (day) Value: 7
  misc_feature: MA Experiment 20000436 PARAMETER Experiment Name: At_Drought_P Parameter: Organism Value: A. thaliana
  misc_feature: MA Experiment 20000436 PARAMETER Experiment Name: At_Drought_P Parameter: Plant Line Value: WS
  misc_feature: MA Experiment 20000436 PARAMETER Experiment Name: At_Drought_P Parameter: Timepoint (hr) Value: 12
  misc_feature: MA Experiment 20000436 PARAMETER Experiment Name: At_Drought_P Parameter: Tissue Value: Whole Plant
  misc_feature: MA Experiment 20000436 PARAMETER Experiment Name: At_Drought_P Parameter: Treatment Value: Drought vs. No Drought
  misc_feature: MA Experiment ID: 20000437 Result: Up-regulated in Transcription
  misc_feature: MA Experiment 20000437 PARAMETER Experiment Name: At_Drought_P Parameter: Age (day) Value: 8
  misc_feature: MA Experiment 20000437 PARAMETER Experiment Name: At_Drought_P Parameter: Organism Value: A. thaliana
  misc_feature: MA Experiment 20000437 PARAMETER Experiment Name: At_Drought_P Parameter: Plant Line Value: WS
  misc_feature: MA Experiment 20000437 PARAMETER Experiment Name: At_Drought_P Parameter: Timepoint (hr) Value: 24
  misc_feature: MA Experiment 20000437 PARAMETER Experiment Name: At_Drought_P Parameter: Tissue Value: Whole Plant
  misc_feature: MA Experiment 20000437 PARAMETER Experiment Name: At_Drought_P Parameter: Treatment Value: Drought vs. No Drought
  misc_feature: MA Experiment ID: 20000453 Result: Up-regulated in Transcription
  misc_feature: MA Experiment 20000453 PARAMETER Experiment Name: At_100uM_ABA_P Parameter: Age (day) Value: 15
  misc_feature: MA Experiment 20000453 PARAMETER Experiment Name: At_100uM_ABA_P Parameter: Organism Value: A. thaliana
  misc_feature: MA Experiment 20000453 PARAMETER Experiment Name: At_100uM_ABA_P Parameter: Plant Line Value: WS
  misc_feature: MA Experiment 20000453 PARAMETER Experiment Name: At_100uM_ABA_P Parameter: Timepoint (hr) Value: 24
  misc_feature: MA Experiment 20000453 PARAMETER Experiment Name: At_100uM_ABA_P Parameter: Tissue Value: Aerial
  misc_feature: MA Experiment 20000453 PARAMETER Experiment Name: At_100uM_ABA_P Parameter: Treatment Value: 100uM ABA vs. No Treatment
  misc_feature: MA Experiment ID: 20001247 Result: Down-regulated in Transcription
  misc_feature: MA Experiment 20001247 PARAMETER Experiment Name: At_Far-red-induction_P Parameter: Age (day) Value: 7
  misc_feature: MA Experiment 20001247 PARAMETER Experiment Name: At_Far-red-induction_P Parameter: Light Value: Far-red vs. White
  misc_feature: MA Experiment 20001247 PARAMETER Experiment Name: At_Far-red-induction_P Parameter: Organism Value: A. thaliana
  misc_feature: MA Experiment 20001247 PARAMETER Experiment Name: At_Far-red-induction_P Parameter: Plant Line Value: Columbia
  misc_feature: MA Experiment 20001247 PARAMETER Experiment Name: At_Far-red-induction_P Parameter: Timepoint (hr) Value: 1
  misc_feature: MA Experiment 20001247 PARAMETER Experiment Name: At_Far-red-induction_P Parameter: Tissue Value: Whole Plant
  misc_feature: MA Experiment ID: 20001554 Result: Up-regulated in Transcription
  misc_feature: MA Experiment 20001554 PARAMETER Experiment Name: At_Drought_Soil_Dry_P Parameter: Age (day) Value: 21
  misc_feature: MA Experiment 20001554 PARAMETER Experiment Name: At_Drought_Soil_Dry_P Parameter: Organism Value: A. thaliana
  misc_feature: MA Experiment 20001554 PARAMETER Experiment Name: At_Drought_Soil_Dry_P Parameter: Plant Line Value: WS
  misc_feature: MA Experiment 20001554 PARAMETER Experiment Name: At_Drought_Soil_Dry_P Parameter: Post Timepoint (hr) Value: None
  misc_feature: MA Experiment 20001554 PARAMETER Experiment Name: At_Drought_Soil_Dry_P Parameter: Post-Treatment Value: None
  misc_feature: MA Experiment 20001554 PARAMETER Experiment Name: At_Drought_Soil_Dry_P Parameter: Timepoint (day) Value: 7
  misc_feature: MA Experiment 20001554 PARAMETER Experiment Name: At_Drought_Soil_Dry_P Parameter: Treatment Value: Drought vs. No Drought
  misc_feature: MA Experiment ID: 20001555 Result: Up-regulated in Transcription
  misc_feature: MA Experiment 20001555 PARAMETER Experiment Name: At_Drought_Soil_Dry_P Parameter: Age (day) Value: 24
  misc_feature: MA Experiment 20001555 PARAMETER Experiment Name: At_Drought_Soil_Dry_P Parameter: Organism Value: A. thaliana
  misc_feature: MA Experiment 20001555 PARAMETER Experiment Name: At_Drought_Soil_Dry_P Parameter: Plant Line Value: WS
  misc_feature: MA Experiment 20001555 PARAMETER Experiment Name: At_Drought_Soil_Dry_P Parameter: Post Timepoint (hr) Value: None
  misc_feature: MA Experiment 20001555 PARAMETER Experiment Name: At_Drought_Soil_Dry_P Parameter: Post-Treatment Value: None
  misc_feature: MA Experiment 20001555 PARAMETER Experiment Name: At_Drought_Soil_Dry_P Parameter: Timepoint (day) Value: 10
  misc_feature: MA Experiment 20001555 PARAMETER Experiment Name: At_Drought_Soil_Dry_P Parameter: Treatment Value: Drought vs. No Drought
  misc_feature: MA Experiment ID: 20001559 Result: Up-regulated in Transcription
  misc_feature: MA Experiment 20001559 PARAMETER Experiment Name: At_Drought_Soil_Dry_P Parameter: Age (day) Value: 28
  misc_feature: MA Experiment 20001559 PARAMETER Experiment Name: At_Drought_Soil_Dry_P Parameter: Organism Value: A. thaliana
  misc_feature: MA Experiment 20001559 PARAMETER Experiment Name: At_Drought_Soil_Dry_P Parameter: Plant Line Value: WS
  misc_feature: MA Experiment 20001559 PARAMETER Experiment Name: At_Drought_Soil_Dry_P Parameter: Post Timepoint (hr) Value: 29
  misc_feature: MA Experiment 20001559 PARAMETER Experiment Name: At_Drought_Soil_Dry_P Parameter: Post-Treatment Value: Re-Water vs. No Drought
  misc_feature: MA Experiment 20001559 PARAMETER Experiment Name: At_Drought_Soil_Dry_P Parameter: Timepoint (day) Value: 14
  misc_feature: MA Experiment 20001559 PARAMETER Experiment Name: At_Drought_Soil_Dry_P Parameter: Treatment Value: Drought vs. No Drought
  misc_feature: MA Experiment ID: 20001757 Result: Down-regulated in Transcription
  misc_feature: MA Experiment 20001757 PARAMETER Experiment Name: At_50mM_NH4NO3_L-to-H_P Parameter: Timepoint (hr) Value: 6
  misc_feature: MA Experiment 20001757 PARAMETER Experiment Name: At_50mM_NH4NO3_L-to-H_P Parameter: Tissue Value: Leaf
  misc_feature: MA Experiment 20001757 PARAMETER Experiment Name: At_50mM_NH4NO3_L-to-H_P Parameter: Treatment Value: 50mM NH4NO3 vs 100mM Mannitol
  misc_feature: MA Experiment ID: 20001904 Result: Up-regulated in Transcription
  misc_feature: MA Experiment 20001904 PARAMETER Experiment Name: At_Drought_Reproduction_P Parameter: Age (day) Value: 37
  misc_feature: MA Experiment 20001904 PARAMETER Experiment Name: At_Drought_Reproduction_P Parameter: Organism Value: A. thaliana
  misc_feature: MA Experiment 20001904 PARAMETER Experiment Name: At_Drought_Reproduction_P Parameter: Plant Line Value: WS
  misc_feature: MA Experiment 20001904 PARAMETER Experiment Name: At_Drought_Reproduction_P Parameter: Timepoint (day) Value: 7
  misc_feature: MA Experiment 20001904 PARAMETER Experiment Name: At_Drought_Reproduction_P Parameter: Tissue Value: Rosettes
  misc_feature: MA Experiment 20001904 PARAMETER Experiment Name: At_Drought_Reproduction_P Parameter: Treatment Value: Drought vs. No Drought
  misc_feature: MA Experiment ID: 20001906 Result: Up-regulated in Transcription
  misc_feature: MA Experiment 20001906 PARAMETER Experiment Name: At_Drought_Reproduction_P Parameter: Age (day) Value: 35
  misc_feature: MA Experiment 20001906 PARAMETER Experiment Name: At_Drought_Reproduction_P Parameter: Organism Value: A. thaliana
  misc_feature: MA Experiment 20001906 PARAMETER Experiment Name: At_Drought_Reproduction_P Parameter: Plant Line Value: WS
  misc_feature: MA Experiment 20001906 PARAMETER Experiment Name: At_Drought_Reproduction_P Parameter: Timepoint (day) Value: 5
  misc_feature: MA Experiment 20001906 PARAMETER Experiment Name: At_Drought_Reproduction_P Parameter: Tissue Value: Siliques
  misc_feature: MA Experiment 20001906 PARAMETER Experiment Name: At_Drought_Reproduction_P Parameter: Treatment Value: Drought vs. No Drought
  misc_feature: MA Experiment ID: 20001908 Result: Up-regulated in Transcription
  misc_feature: MA Experiment 20001908 PARAMETER Experiment Name: At_Drought_Reproduction_P Parameter: Age (day) Value: 40
  misc_feature: MA Experiment 20001908 PARAMETER Experiment Name: At_Drought_Reproduction_P Parameter: Organism Value: A. thaliana
  misc_feature: MA Experiment 20001908 PARAMETER Experiment Name: At_Drought_Reproduction_P Parameter: Plant Line Value: WS
  misc_feature: MA Experiment 20001908 PARAMETER Experiment Name: At_Drought_Reproduction_P Parameter: Timepoint (day) Value: 10
  misc_feature: MA Experiment 20001908 PARAMETER Experiment Name: At_Drought_Reproduction_P Parameter: Tissue Value: Siliques
  misc_feature: MA Experiment 20001908 PARAMETER Experiment Name: At_Drought_Reproduction_P Parameter: Treatment Value: Drought vs. No Drought
catttcctccttctttctctcttctatctgtgaacaaggcacattagaactcttcttttcaacttttttaggtgtatatagatgaatctagaaatagttttatagttggaaattaattgaagagagagagatattactacaccaatcttttcaagaggtcctaacgaattacccacaatccaggaaacccttattgaaattcaattcatttctttctttctgtgtttgtgattttcccgggaaatatttttgggtatatgtctctctgtttttgctttcctttttcataggagtcatgtgtttcttcttgtcttcctagcttcttctaataaagtccttctcttgtgaaaatctctcgaattttcatttttgttccattggagctatcttatagatcacaaccagagaaaaagatcaaatctttaccgttaatggaggaagtatctccggcgatcgcaggtcctttcaggccattctccgaaacccagatggatttcaccgggatcagattgggtaaaggttactgcaataaccaatactcaaatcaagattccgagaacggagatctaatggtttcgttaccggagacttcatcatgctctgtttctgggtcacatggttctgaatctaggaaagttttgatttctcggatcaattctcctaatttaaacatgaaggaatcagcagctgctgatatagtcgtcgttgatatctccgccggagatgagatcaacggctcagatattactagcgagaagaagatgatcagcagaacagagagtaggagtttgtttgaattcaagagtgtgcctttgtatggttttacttcgatttgtggaagaagacctgagatggaagatgctgtttcgactataccaagattccttcaatcttcctctggttcgatgttagatggtcggtttgatcctcaatccgccgctcatttcttcggtgtttacgacggccatggcggttctcaggtagcgaactattgtagagagaggatgcatttggctttggcggaggagatagctaaggagaaaccgatgctctgcgatggtgatacgtggctggagaagtggaagaaagctcttttcaactcgttcctgagagttgactcggagattgagtcagttgcgccggagacggttgggtcaacgtcggtggttgccgttgttttcccgtctcacatcttcgtcgctaactgcggtgactctagagccgttctttgccgcggcaaaactgcacttccattatccgttgaccataaaccggatagagaagatgaagctgcgaggattgaagccgcaggagggaaagtgattcagtggaatggagctcgtgttttcggtgttctcgccatgtcgagatccattggcgatagatacttgaaaccatccatcattcctgatccggaagtgacggctgtgaagagagtaaaagaagatgattgtctgattttggcgagtgacggggtttgggatgtaatgacggatgaagaagcgtgtgagatggcaaggaagcggattctcttgtggcacaagaaaaacgcggtggctggggatgcatcgttgctcgcggatgagcggagaaaggaagggaaagatcctgcggcgatgtccgcggctgagtatttgtcaaagctggcgatacagagaggaagcaaagacaacataagtgtggtggtggttgatttgaagcctcggaggaaactcaagagcaaacccttgaactgaggcagagagggtcctttttcttaatttttaaaatgaatatgggtctctccaagaaaaagtatttactattattaatttgtgcttatttttttaactaacaagttataaccatatggagataatgaagcttaatgtgttaagctcttttgtcttgactacattctaaaaagccccttgtatttttcttcccgggctaattgtaatatggttacaacatacattaagatgtagtattattgtttatgcaattactttcaaaactttac

SEQ ID NO: 44163 - protein, 434 aa, Arabidopsis thaliana
  peptide (1)..(434): Ceres Seq. ID no. 12489433
  misc_feature (127)..(415): Pfam Name: Protein phosphatase 2C Pfam Description: Protein phosphatase 2C
  misc_feature (127)..(415): Pfam Name: Protein phosphatase 2C Pfam Description: Protein phosphatase 2C
  misc_feature (229)..(431): Homolog of NCBI NO: 15218595 NR Description: protein phosphatase 2C (AtP2C-HA); protein id:
  misc_feature (229)..(431): Homolog of NCBI NO: 3242077 NR Description: protein phosphatase 2C [Arabidopsis thaliana]
  misc_feature (232)..(431): Homolog of NCBI NO: 26452332 NR Description: unknown protein [Arabidopsis thaliana]
  misc_feature (47)..(254): Homolog of NCBI NO: 26452332 NR Description: unknown protein [Arabidopsis thaliana]
  misc_feature (232)..(431): Homolog of NCBI NO: 30685388 NR Description: protein phosphatase 2C (PP2C) -related
  misc_feature (229)..(431): Homolog of NCBI NO: 15218595 NR Description: protein phosphatase 2C (AtP2C-HA); protein id:
  misc_feature (232)..(431): Homolog of NCBI NO: 26452332 NR Description: unknown protein [Arabidopsis thaliana]
  misc_feature (232)..(431): Homolog of NCBI NO: 30685388 NR Description: protein phosphatase 2C (PP2C) -related
  misc_feature (1)..(434): Homolog of NCBI NO: 15236110 NR Description: protein phosphatase ABI1
  misc_feature (1)..(434): Homolog of NCBI NO: 509419 NR Description: ABI1 [Arabidopsis thaliana]
  misc_feature (1)..(434): Homolog of NCBI NO: 14334800 NR Description: putative protein phosphatase ABI1 [Arabidopsis
  misc_feature (1)..(434): Homolog of NCBI NO: 15242022 NR Description: protein phosphatase 2C, ABI2; protein id:
  misc_feature (47)..(254): Homolog of NCBI NO: 30685388 NR Description: protein phosphatase 2C (PP2C) -related
  misc_feature (47)..(254): Homolog of NCBI NO: 26452332 NR Description: unknown protein [Arabidopsis thaliana]
  misc_feature (229)..(431): Homolog of NCBI NO: 3242077 NR Description: protein phosphatase 2C [Arabidopsis thaliana]
  misc_feature (47)..(254): Homolog of NCBI NO: 30685388 NR Description: protein phosphatase 2C (PP2C) -related
  misc_feature (1)..(434): Homolog of NCBI NO: 15242022 NR Description: protein phosphatase 2C, ABI2; protein id:
  misc_feature (1)..(434): Homolog of NCBI NO: 14334800 NR Description: putative protein phosphatase ABI1 [Arabidopsis
  misc_feature (1)..(434): Homolog of NCBI NO: 509419 NR Description: ABI1 [Arabidopsis thaliana]
  misc_feature (1)..(434): Homolog of NCBI NO: 15236110 NR Description: protein phosphatase ABI1
MEEVSPAIAGPFRPFSETQMDFTGIRLGKGYCNNQYSNQDSENGDLMVSLPETSSCSVSGSHGSESRKVLISRINSPNLNMKESAAADIVVVDISAGDEINGSDITSEKKMISRTESRSLFEFKSVPLYGFTSICGRRPEMEDAVSTIPRFLQSSSGSMLDGRFDPQSAAHFFGVYDGHGGSQVANYCRERMHLALAEEIAKEKPMLCDGDTWLEKWKKALFNSFLRVDSEIESVAPETVGSTSVVAVVFPSHIFVANCGDSRAVLCRGKTALPLSVDHKPDREDEAARIEAAGGKVIQWNGARVFGVLAMSRSIGDRYLKPSIIPDPEVTAVKRVKEDDCLILASDGVWDVMTDEEACEMARKRILLWHKKNAVAGDASLLADERRKEGKDPAAMSAAEYLSKLAIQRGSKDNISVVVVDLKPRRKLKSKPLN

SEQ ID NO: 44164 - protein, 415 aa, Arabidopsis thaliana
  peptide (1)..(415): Ceres Seq. ID no. 12489434
  misc_feature (108)..(396): Pfam Name: Protein phosphatase 2C Pfam Description: Protein phosphatase 2C
  misc_feature (108)..(396): Pfam Name: Protein phosphatase 2C Pfam Description: Protein phosphatase 2C
  misc_feature (210)..(412): Homolog of NCBI NO: 15218595 NR Description: protein phosphatase 2C (AtP2C-HA); protein id:
  misc_feature (210)..(412): Homolog of NCBI NO: 3242077 NR Description: protein phosphatase 2C [Arabidopsis thaliana]
  misc_feature (213)..(412): Homolog of NCBI NO: 26452332 NR Description: unknown protein [Arabidopsis thaliana]
  misc_feature (28)..(235): Homolog of NCBI NO: 26452332 NR Description: unknown protein [Arabidopsis thaliana]
  misc_feature (213)..(412): Homolog of NCBI NO: 30685388 NR Description: protein phosphatase 2C (PP2C) -related
  misc_feature (210)..(412): Homolog of NCBI NO: 15218595 NR Description: protein phosphatase 2C (AtP2C-HA); protein id:
  misc_feature (213)..(412): Homolog of NCBI NO: 26452332 NR Description: unknown protein [Arabidopsis thaliana]
  misc_feature (213)..(412): Homolog of NCBI NO: 30685388 NR Description: protein phosphatase 2C (PP2C) -related
  misc_feature (1)..(415): Homolog of NCBI NO: 15236110 NR Description: protein phosphatase ABI1
  misc_feature (1)..(415): Homolog of NCBI NO: 509419 NR Description: ABI1 [Arabidopsis thaliana]
  misc_feature (1)..(415): Homolog of NCBI NO: 14334800 NR Description: putative protein phosphatase ABI1 [Arabidopsis
  misc_feature (1)..(415): Homolog of NCBI NO: 15242022 NR Description: protein phosphatase 2C, ABI2; protein id:
  misc_feature (28)..(235): Homolog of NCBI NO: 30685388 NR Description: protein phosphatase 2C (PP2C) -related
  misc_feature (28)..(235): Homolog of NCBI NO: 26452332 NR Description: unknown protein [Arabidopsis thaliana]
  misc_feature (210)..(412): Homolog of NCBI NO: 3242077 NR Description: protein phosphatase 2C [Arabidopsis thaliana]
  misc_feature (28)..(235): Homolog of NCBI NO: 30685388 NR Description: protein phosphatase 2C (PP2C) -related
  misc_feature (1)..(415): Homolog of NCBI NO: 15242022 NR Description: protein phosphatase 2C, ABI2; protein id:
  misc_feature (1)..(415): Homolog of NCBI NO: 14334800 NR Description: putative protein phosphatase ABI1 [Arabidopsis
  misc_feature (1)..(415): Homolog of NCBI NO: 509419 NR Description: ABI1 [Arabidopsis thaliana]
  misc_feature (1)..(415): Homolog of NCBI NO: 15236110 NR Description: protein phosphatase ABI1
MDFTGIRLGKGYCNNQYSNQDSENGDLMVSLPETSSCSVSGSHGSESRKVLISRINSPNLNMKESAAADIVVVDISAGDEINGSDITSEKKMISRTESRSLFEFKSVPLYGFTSICGRRPEMEDAVSTIPRFLQSSSGSMLDGRFDPQSAAHFFGVYDGHGGSQVANYCRERMHLALAEEIAKEKPMLCDGDTWLEKWKKALFNSFLRVDSEIESVAPETVGSTSVVAVVFPSHIFVANCGDSRAVLCRGKTALPLSVDHKPDREDEAARIEAAGGKVIQWNGARVFGVLAMSRSIGDRYLKPSIIPDPEVTAVKRVKEDDCLILASDGVWDVMTDEEACEMARKRILLWHKKNAVAGDASLLADERRKEGKDPAAMSAAEYLSKLAIQRGSKDNISVVVVDLKPRRKLKSKPLN

SEQ ID NO: 44165 - protein, 388 aa, Arabidopsis thaliana
  peptide (1)..(388): Ceres Seq. ID no. 12489435
  misc_feature (81)..(369): Pfam Name: Protein phosphatase 2C Pfam Description: Protein phosphatase 2C
  misc_feature (81)..(369): Pfam Name: Protein phosphatase 2C Pfam Description: Protein phosphatase 2C
  misc_feature (183)..(385): Homolog of NCBI NO: 15218595 NR Description: protein phosphatase 2C (AtP2C-HA); protein id:
  misc_feature (183)..(385): Homolog of NCBI NO: 3242077 NR Description: protein phosphatase 2C [Arabidopsis thaliana]
  misc_feature (186)..(385): Homolog of NCBI NO: 26452332 NR Description: unknown protein [Arabidopsis thaliana]
  misc_feature (1)..(208): Homolog of NCBI NO: 26452332 NR Description: unknown protein [Arabidopsis thaliana]
  misc_feature (186)..(385): Homolog of NCBI NO: 30685388 NR Description: protein phosphatase 2C (PP2C) -related
  misc_feature (183)..(385): Homolog of NCBI NO: 15218595 NR Description: protein phosphatase 2C (AtP2C-HA); protein id:
  misc_feature (186)..(385): Homolog of NCBI NO: 26452332 NR Description: unknown protein [Arabidopsis thaliana]
  misc_feature (186)..(385): Homolog of NCBI NO: 30685388 NR Description: protein phosphatase 2C (PP2C) -related
  misc_feature (1)..(388): Homolog of NCBI NO: 15236110 NR Description: protein phosphatase ABI1
  misc_feature (1)..(388): Homolog of NCBI NO: 509419 NR Description: ABI1 [Arabidopsis thaliana]
  misc_feature (1)..(388): Homolog of NCBI NO: 14334800 NR Description: putative protein phosphatase ABI1 [Arabidopsis
  misc_feature (1)..(388): Homolog of NCBI NO: 15242022 NR Description: protein phosphatase 2C, ABI2; protein id:
  misc_feature (1)..(208): Homolog of NCBI NO: 30685388 NR Description: protein phosphatase 2C (PP2C) -related
  misc_feature (1)..(208): Homolog of NCBI NO: 26452332 NR Description: unknown protein [Arabidopsis thaliana]
  misc_feature (183)..(385): Homolog of NCBI NO: 3242077 NR Description: protein phosphatase 2C [Arabidopsis thaliana]
  misc_feature (1)..(208): Homolog of NCBI NO: 30685388 NR Description: protein phosphatase 2C (PP2C) -related
  misc_feature (1)..(388): Homolog of NCBI NO: 15242022 NR Description: protein phosphatase 2C, ABI2; protein id:
  misc_feature (1)..(388): Homolog of NCBI NO: 14334800 NR Description: putative protein phosphatase ABI1 [Arabidopsis
  misc_feature (1)..(388): Homolog of NCBI NO: 509419 NR Description: ABI1 [Arabidopsis thaliana]
  misc_feature (1)..(388): Homolog of NCBI NO: 15236110 NR Description: protein phosphatase ABI1
MVSLPETSSCSVSGSHGSESRKVLISRINSPNLNMKESAAADIVVVDISAGDEINGSDITSEKKMISRTESRSLFEFKSVPLYGFTSICGRRPEMEDAVSTIPRFLQSSSGSMLDGRFDPQSAAHFFGVYDGHGGSQVANYCRERMHLALAEEIAKEKPMLCDGDTWLEKWKKALFNSFLRVDSEIESVAPETVGSTSVVAVVFPSHIFVANCGDSRAVLCRGKTALPLSVDHKPDREDEAARIEAAGGKVIQWNGARVFGVLAMSRSIGDRYLKPSIIPDPEVTAVKRVKEDDCLILASDGVWDVMTDEEACEMARKRILLWHKKNAVAGDASLLADERRKEGKDPAAMSAAEYLSKLAIQRGSKDNISVVVVDLKPRRKLKSKPLN

SEQ ID NO: 44166 - DNA, 1002 bp, Arabidopsis thaliana
  misc_feature (1)..(1002): Ceres Seq. ID no. 13509338
  misc_feature: MA Experiment ID: 20000179 Result: Up-regulated in Transcription
  misc_feature: MA Experiment 20000179 PARAMETER Experiment Name: At_Germinating_Seeds_P Parameter: Age (hr) Value: 6 vs. 0
  misc_feature: MA Experiment 20000179 PARAMETER Experiment Name: At_Germinating_Seeds_P Parameter: Tissue Value: Germinating Seeds
  misc_feature: MA Experiment ID: 20000180 Result: Up-regulated in Transcription
  misc_feature: MA Experiment 20000180 PARAMETER Experiment Name: At_Germinating_Seeds_P Parameter: Age (hr) Value: 24 vs. 0
  misc_feature: MA Experiment 20000180 PARAMETER Experiment Name: At_Germinating_Seeds_P Parameter: Tissue Value: Germinating Seeds
  misc_feature: MA Experiment ID: 20000182 Result: Up-regulated in Transcription
  misc_feature: MA Experiment 20000182 PARAMETER Experiment Name: At_2mM_SA_P Parameter: Age (day) Value: 14
  misc_feature: MA Experiment 20000182 PARAMETER Experiment Name: At_2mM_SA_P Parameter: Organism Value: A. thaliana
  misc_feature: MA Experiment 20000182 PARAMETER Experiment Name: At_2mM_SA_P Parameter: Plant Line Value: WS
  misc_feature: MA Experiment 20000182 PARAMETER Experiment Name: At_2mM_SA_P Parameter: Timepoint (hr) Value: 6
  misc_feature: MA Experiment 20000182 PARAMETER Experiment Name: At_2mM_SA_P Parameter: Tissue Value: Aerial
  misc_feature: MA Experiment 20000182 PARAMETER Experiment Name: At_2mM_SA_P Parameter: Treatment Value: 2mM SA vs. No Treatment
  misc_feature: MA Experiment ID: 20000264 Result: Up-regulated in Transcription
  misc_feature: MA Experiment 20000264 PARAMETER Experiment Name: At_Open_Flower_P Parameter: Age (day) Value: 21
  misc_feature: MA Experiment 20000264 PARAMETER Experiment Name: At_Open_Flower_P Parameter: Plant Line Value: WS
  misc_feature: MA Experiment 20000264 PARAMETER Experiment Name: At_Open_Flower_P Parameter: Tissue Value: Open Flower vs. Whole Plant
  misc_feature: MA Experiment ID: 20000267 Result: Up-regulated in Transcription
  misc_feature: MA Experiment 20000267 PARAMETER Experiment Name: At_Drought_P Parameter: Age (day) Value: 7
  misc_feature: MA Experiment 20000267 PARAMETER Experiment Name: At_Drought_P Parameter: Organism Value: A. thaliana
  misc_feature: MA Experiment 20000267 PARAMETER Experiment Name: At_Drought_P Parameter: Plant Line Value: WS
  misc_feature: MA Experiment 20000267 PARAMETER Experiment Name: At_Drought_P Parameter: Timepoint (hr) Value: 6
  misc_feature: MA Experiment 20000267 PARAMETER Experiment Name: At_Drought_P Parameter: Tissue Value: Whole Plant
  misc_feature: MA Experiment 20000267 PARAMETER Experiment Name: At_Drought_P Parameter: Treatment Value: Drought vs. No Drought
  misc_feature: MA Experiment ID: 20000436 Result: Up-regulated in Transcription
  misc_feature: MA Experiment 20000436 PARAMETER Experiment Name: At_Drought_P Parameter: Age (day) Value: 7
  misc_feature: MA Experiment 20000436 PARAMETER Experiment Name: At_Drought_P Parameter: Organism Value: A. thaliana
  misc_feature: MA Experiment 20000436 PARAMETER Experiment Name: At_Drought_P Parameter: Plant Line Value: WS
  misc_feature: MA Experiment 20000436 PARAMETER Experiment Name: At_Drought_P Parameter: Timepoint (hr) Value: 12
  misc_feature: MA Experiment 20000436 PARAMETER Experiment Name: At_Drought_P Parameter: Tissue Value: Whole Plant
  misc_feature: MA Experiment 20000436 PARAMETER Experiment Name: At_Drought_P Parameter: Treatment Value: Drought vs. No Drought
  misc_feature: MA Experiment ID: 20000437 Result: Up-regulated in Transcription
  misc_feature: MA Experiment 20000437 PARAMETER Experiment Name: At_Drought_P Parameter: Age (day) Value: 8
  misc_feature: MA Experiment 20000437 PARAMETER Experiment Name: At_Drought_P Parameter: Organism Value: A. thaliana
  misc_feature: MA Experiment 20000437 PARAMETER Experiment Name: At_Drought_P Parameter: Plant Line Value: WS
  misc_feature: MA Experiment 20000437 PARAMETER Experiment Name: At_Drought_P Parameter: Timepoint (hr) Value: 24
  misc_feature: MA Experiment 20000437 PARAMETER Experiment Name: At_Drought_P Parameter: Tissue Value: Whole Plant
  misc_feature: MA Experiment 20000437 PARAMETER Experiment Name: At_Drought_P Parameter: Treatment Value: Drought vs. No Drought
  misc_feature: MA Experiment ID: 20000438 Result: Up-regulated in Transcription
  misc_feature: MA Experiment 20000438 PARAMETER Experiment Name: At_Shoots__P Parameter: Age (day) Value: 14
  misc_feature: MA Experiment 20000438 PARAMETER Experiment Name: At_Shoots__P Parameter: Tissue Value: Shoots vs. Whole Plant
  misc_feature: MA Experiment ID: 20000439 Result: Up-regulated in Transcription
  misc_feature: MA Experiment 20000439 PARAMETER Experiment Name: At_Roots__P Parameter: Age (day) Value: 14 vs. 21
  misc_feature: MA Experiment 20000439 PARAMETER Experiment Name: At_Roots__P Parameter: Organism Value: A. thaliana
  misc_feature: MA Experiment 20000439 PARAMETER Experiment Name: At_Roots__P Parameter: Tissue Value: Roots vs. Whole Plant
  misc_feature: MA Experiment ID: 20000495 Result: Down-regulated in Transcription
  misc_feature: MA Experiment 20000495 PARAMETER Experiment Name: At_Guard_Cells_P Parameter: Harvest Date Value: 8/2/2002
  misc_feature: MA Experiment 20000495 PARAMETER Experiment Name: At_Guard_Cells_P Parameter: Organism Value: A. thaliana
  misc_feature: MA Experiment 20000495 PARAMETER Experiment Name: At_Guard_Cells_P Parameter: Tissue Value: Guard Cells vs. Leaves
  misc_feature: MA Experiment ID: 20000794 Result: Up-regulated in Transcription
  misc_feature: MA Experiment 20000794 PARAMETER Experiment Name: At_Petals_P Parameter: Age (day) Value: 23-25 days
  misc_feature: MA Experiment 20000794 PARAMETER Experiment Name: At_Petals_P Parameter: Plant Line Value: WS
  misc_feature: MA Experiment 20000794 PARAMETER Experiment Name: At_Petals_P Parameter: Tissue Value: Petals vs. Whole plant
  misc_feature: MA Experiment ID: 20001248 Result: Down-regulated in Transcription
  misc_feature: MA Experiment 20001248 PARAMETER Experiment Name: At_Far-red-induction_P Parameter: Age (day) Value: 7
  misc_feature: MA Experiment 20001248 PARAMETER Experiment Name: At_Far-red-induction_P Parameter: Light Value: Far-red vs. White
  misc_feature: MA Experiment 20001248 PARAMETER Experiment Name: At_Far-red-induction_P Parameter: Organism Value: A. thaliana
  misc_feature: MA Experiment 20001248 PARAMETER Experiment Name: At_Far-red-induction_P Parameter: Plant Line Value: Columbia
  misc_feature: MA Experiment 20001248 PARAMETER Experiment Name: At_Far-red-induction_P Parameter: Timepoint (hr) Value: 4
  misc_feature: MA Experiment 20001248 PARAMETER Experiment Name: At_Far-red-induction_P Parameter: Tissue Value: Whole Plant
  misc_feature: MA Experiment ID: 20001451 Result: Down-regulated in Transcription
  misc_feature: MA Experiment 20001451 PARAMETER Experiment Name: At_Far-red-induction_P Parameter: Age (day) Value: 7
  misc_feature: MA Experiment 20001451 PARAMETER Experiment Name: At_Far-red-induction_P Parameter: Light Value: Far-red vs. White
  misc_feature: MA Experiment 20001451 PARAMETER Experiment Name: At_Far-red-induction_P Parameter: Organism Value: A. thaliana
  misc_feature: MA Experiment 20001451 PARAMETER Experiment Name: At_Far-red-induction_P Parameter: Plant Line Value: Columbia
  misc_feature: MA Experiment 20001451 PARAMETER Experiment Name: At_Far-red-induction_P Parameter: Timepoint (hr) Value: 24
  misc_feature: MA Experiment 20001451 PARAMETER Experiment Name: At_Far-red-induction_P Parameter: Tissue Value: Whole Plant
  misc_feature: MA Experiment ID: 20001458 Result: Down-regulated in Transcription
  misc_feature: MA Experiment 20001458 PARAMETER Experiment Name: At_50mM_NH4NO3_L-to-H_P Parameter: Age (day) Value: Undefined
  misc_feature: MA Experiment 20001458 PARAMETER Experiment Name: At_50mM_NH4NO3_L-to-H_P Parameter: Organism Value: Undefined
  misc_feature: MA Experiment 20001458 PARAMETER Experiment Name: At_50mM_NH4NO3_L-to-H_P Parameter: Plant Line Value: Undefined
  misc_feature: MA Experiment 20001458 PARAMETER Experiment Name: At_50mM_NH4NO3_L-to-H_P Parameter: Timepoint (hr) Value: 2
  misc_feature: MA Experiment 20001458 PARAMETER Experiment Name: At_50mM_NH4NO3_L-to-H_P Parameter: Tissue Value: Siliques
  misc_feature: MA Experiment 20001458 PARAMETER Experiment Name: At_50mM_NH4NO3_L-to-H_P Parameter: Treatment Value: 50mM NH4NO3 vs. 100mM Manitol
  misc_feature: MA Experiment ID: 20001904 Result: Up-regulated in Transcription
  misc_feature: MA Experiment 20001904 PARAMETER Experiment Name: At_Drought_Reproduction_P Parameter: Age (day) Value: 37
  misc_feature: MA Experiment 20001904 PARAMETER Experiment Name: At_Drought_Reproduction_P Parameter: Organism Value: A. thaliana
  misc_feature: MA Experiment 20001904 PARAMETER Experiment Name: At_Drought_Reproduction_P Parameter: Plant Line Value: WS
  misc_feature: MA Experiment 20001904 PARAMETER Experiment Name: At_Drought_Reproduction_P Parameter: Timepoint (day) Value: 7
  misc_feature: MA Experiment 20001904 PARAMETER Experiment Name: At_Drought_Reproduction_P Parameter: Tissue Value: Rosettes
  misc_feature: MA Experiment 20001904 PARAMETER Experiment Name: At_Drought_Reproduction_P Parameter: Treatment Value: Drought vs. No Drought
  misc_feature: MA Experiment ID: 20001905 Result: Up-regulated in Transcription
  misc_feature: MA Experiment 20001905 PARAMETER Experiment Name: At_Drought_Reproduction_P Parameter: Age (day) Value: 40
  misc_feature: MA Experiment 20001905 PARAMETER Experiment Name: At_Drought_Reproduction_P Parameter: Organism Value: A. thaliana
  misc_feature: MA Experiment 20001905 PARAMETER Experiment Name: At_Drought_Reproduction_P Parameter: Plant Line Value: WS
  misc_feature: MA Experiment 20001905 PARAMETER Experiment Name: At_Drought_Reproduction_P Parameter: Timepoint (day) Value: 10
  misc_feature: MA Experiment 20001905 PARAMETER Experiment Name: At_Drought_Reproduction_P Parameter: Tissue Value: Rosettes
  misc_feature: MA Experiment 20001905 PARAMETER Experiment Name: At_Drought_Reproduction_P Parameter: Treatment Value: Drought vs. No Drought
aggaactcgaactatcttccacaactcacgaaaatgtttctcttaaagacatggagatcaaccgcttttggggtttatggctacatgaatttcaccaagagtggtttcttagatcattcaaagaagtttaaacctgaagatatgcagttacaaattgaaggaaagaattgtgtagttactggagctaattcaggtattggttttgctgctgcagagggtcttgcttcacgtggagcaactgtttacatggtgtgccggaacaaggaaagaggacaagaggctctttctaagattcaaacctcaacaggaaaccaaaatgtgtacttggaagtatgtgatttgtcttccgttaatgaaatcaaatcatttgcttcgagtttcgcttccaaggatgttccggttcatgtgctggttaataatgctggtttgcttgagaacaaacgtactactacacctgaaggattcgagttaagttttgcggtgaatgtacttgggacatacacaatgacagagttgatgcttccattgttggagaaagcaacaccagacgccaaagtcattacagttgcctctggtggaatgtacacttcgccgcttactacagatcttcagtttagtggtgaaaaatttgatggagtggaacaatacgcacggaacaaaagaatccaggtggctctgacagaaaaatgggctgataagtacaaaaataaaggcatagggttctactcaatgcaccctggctgggctgagacaccaggtgttgccaagagtttaccgagtttcagtgaatcgttcgcgggtaagcttagaacaagcgaacaaggagccgatacaatcgtttggttagcactgcagccaaaagagaagcttgtctctggtgcattctatttcgatagagctgaagcaccaaaacatctaaagcttgcaggtacaagcaagtctcatgaccttattgactcagtcattgattctgtgcattccatggcagctcttaatccttaa

SEQ ID NO: 44167 - protein, 333 aa, Arabidopsis thaliana
  peptide (1)..(333): Ceres Seq. ID no. 13509339
  misc_feature (54)..(309): Homolog of NCBI NO: 19921754 NR Description: CG2065-PA [Drosophila melanogaster]
  misc_feature (50)..(298): Homolog of NCBI NO: 6630624 NR Description: M42C60 [Mus musculus]
  misc_feature (54)..(298): Homolog of NCBI NO: 24586328 NR Description: CG30491-PA [Drosophila melanogaster]
  misc_feature (50)..(298): Homolog of NCBI NO: 34395789 NR Description: Retinol dehydrogenase 11 (Retinal reductase 1) (Prostate short-chain dehydrogenase/reductase 1) short-chain dehydrogenase/reductase 1) (HCV core-binding protein
  misc_feature (50)..(298): Homolog of NCBI NO: 20070798 NR Description: androgen-regulated short-chain
  misc_feature (50)..(298): Homolog of NCBI NO: 20070272 NR Description: androgen-regulated short-chain
  misc_feature (54)..(303): Homolog of NCBI NO: 24586330 NR Description: CG30495-PA [Drosophila melanogaster]
  misc_feature (94)..(295): Homolog of NCBI NO: 13375997 NR Description: hypothetical protein FLJ13639 [Homo sapiens]
  misc_feature (15)..(325): Homolog of NCBI NO: 34106252 NR Description: short chain dehydrogenase/reductase [Danio rerio]
  misc_feature (12)..(333): Homolog of NCBI NO: 15234031 NR Description: short-chain dehydrogenase/reductase family
RNSNYLPQLTKMFLLKTWRSTAFGVYGYMNFTKSGFLDHSKKFKPEDMQLQIEGKNCVVTGANSGIGFAAAEGLASRGATVYMVCRNKERGQEALSKIQTSTGNQNVYLEVCDLSSVNEIKSFASSFASKDVPVHVLVNNAGLLENKRTTTPEGFELSFAVNVLGTYTMTELMLPLLEKATPDAKVITVASGGMYTSPLTTDLQFSGEKFDGVEQYARNKRIQVALTEKWADKYKNKGIGFYSMHPGWAETPGVAKSLPSFSESFAGKLRTSEQGADTIVWLALQPKEKLVSGAFYFDRAEAPKHLKLAGTSKSHDLIDSVIDSVHSMAALNP

SEQ ID NO: 44168 - protein, 322 aa, Arabidopsis thaliana
  peptide (1)..(322): Ceres Seq. ID no. 13509340
  misc_feature (43)..(298): Homolog of NCBI NO: 19921754 NR Description: CG2065-PA [Drosophila melanogaster]
  misc_feature (39)..(287): Homolog of NCBI NO: 6630624 NR Description: M42C60 [Mus musculus]
  misc_feature (43)..(287): Homolog of NCBI NO: 24586328 NR Description: CG30491-PA [Drosophila melanogaster]
  misc_feature (39)..(287): Homolog of NCBI NO: 34395789 NR Description: Retinol dehydrogenase 11 (Retinal reductase 1) (Prostate short-chain dehydrogenase/reductase 1) short-chain dehydrogenase/reductase 1) (HCV core-binding protein
  misc_feature (39)..(287): Homolog of NCBI NO: 20070798 NR Description: androgen-regulated short-chain
  misc_feature (39)..(287): Homolog of NCBI NO: 20070272 NR Description: androgen-regulated short-chain
  misc_feature (43)..(292): Homolog of NCBI NO: 24586330 NR Description: CG30495-PA [Drosophila melanogaster]
  misc_feature (83)..(284): Homolog of NCBI NO: 13375997 NR Description: hypothetical protein FLJ13639 [Homo sapiens]
  misc_feature (4)..(314): Homolog of NCBI NO: 34106252 NR Description: short chain dehydrogenase/reductase [Danio rerio]
  misc_feature (1)..(322): Homolog of NCBI NO: 15234031 NR Description: short-chain dehydrogenase/reductase family
MFLLKTWRSTAFGVYGYMNFTKSGFLDHSKKFKPEDMQLQIEGKNCVVTGANSGIGFAAAEGLASRGATVYMVCRNKERGQEALSKIQTSTGNQNVYLEVCDLSSVNEIKSFASSFASKDVPVHVLVNNAGLLENKRTTTPEGFELSFAVNVLGTYTMTELMLPLLEKATPDAKVITVASGGMYTSPLTTDLQFSGEKFDGVEQYARNKRIQVALTEKWADKYKNKGIGFYSMHPGWAETPGVAKSLPSFSESFAGKLRTSEQGADTIVWLALQPKEKLVSGAFYFDRAEAPKHLKLAGTSKSHDLIDSVIDSVHSMAALNP

SEQ ID NO: 44169 - protein, 305 aa, Arabidopsis thaliana
  peptide (1)..(305): Ceres Seq. ID no. 13509341
  misc_feature (26)..(281): Homolog of NCBI NO: 19921754 NR Description: CG2065-PA [Drosophila melanogaster]
  misc_feature (22)..(270): Homolog of NCBI NO: 6630624 NR Description: M42C60 [Mus musculus]
  misc_feature (26)..(270): Homolog of NCBI NO: 24586328 NR Description: CG30491-PA [Drosophila melanogaster]
  misc_feature (22)..(270): Homolog of NCBI NO: 34395789 NR Description: Retinol dehydrogenase 11 (Retinal reductase 1) (Prostate short-chain dehydrogenase/reductase 1) short-chain dehydrogenase/reductase 1) (HCV core-binding protein
  misc_feature (22)..(270): Homolog of NCBI NO: 20070798 NR Description: androgen-regulated short-chain
  misc_feature (22)..(270): Homolog of NCBI NO: 20070272 NR Description: androgen-regulated short-chain
  misc_feature (26)..(275): Homolog of NCBI NO: 24586330 NR Description: CG30495-PA [Drosophila melanogaster]
  misc_feature (66)..(267): Homolog of NCBI NO: 13375997 NR Description: hypothetical protein FLJ13639 [Homo sapiens]
  misc_feature (1)..(297): Homolog of NCBI NO: 34106252 NR Description: short chain dehydrogenase/reductase [Danio rerio]
  misc_feature (1)..(305): Homolog of NCBI NO: 15234031 NR Description: short-chain dehydrogenase/reductase family
MNFTKSGFLDHSKKFKPEDMQLQIEGKNCVVTGANSGIGFAAAEGLASRGATVYMVCRNKERGQEALSKIQTSTGNQNVYLEVCDLSSVNEIKSFASSFASKDVPVHVLVNNAGLLENKRTTTPEGFELSFAVNVLGTYTMTELMLPLLEKATPDAKVITVASGGMYTSPLTTDLQFSGEKFDGVEQYARNKRIQVALTEKWADKYKNKGIGFYSMHPGWAETPGVAKSLPSFSESFAGKLRTSEQGADTIVWLALQPKEKLVSGAFYFDRAEAPKHLKLAGTSKSHDLIDSVIDSVHSMAALNP

SEQ ID NO: 44170 - DNA, 771 bp, Arabidopsis thaliana
  misc_feature (1)..(771): Ceres Seq. ID no. 12466019
  misc_feature: MA Experiment ID: 20000265 Result: Up-regulated in Transcription
  misc_feature: MA Experiment 20000265 PARAMETER Experiment Name: At_Open_Flower_P Parameter: Age (day) Value: 21
  misc_feature: MA Experiment 20000265 PARAMETER Experiment Name: At_Open_Flower_P Parameter: Plant Line Value: WS
  misc_feature: MA Experiment 20000265 PARAMETER Experiment Name: At_Open_Flower_P Parameter: Tissue Value: Closed Flower vs. Whole Plant
  misc_feature: MA Experiment ID: 20000286 Result: Up-regulated in Transcription
  misc_feature: MA Experiment 20000286 PARAMETER Experiment Name: At_Open_Flower_P Parameter: Age (day) Value: 21
  misc_feature: MA Experiment 20000286 PARAMETER Experiment Name: At_Open_Flower_P Parameter: Plant Line Value: WS
  misc_feature: MA Experiment 20000286 PARAMETER Experiment Name: At_Open_Flower_P Parameter: Tissue Value: Half Open vs. Whole Plant
agttgaacatataacaacattcataacaatggctggaggtacagctctaactccaacctctgtaggatccaagtctgttccaatgaggaaccatgaagcaacagagagaggcaacaccaacaacaacctgagagcattacccaaagccgtccaaccggtttcatcaatcgaaggagagatggctaagaggccacgtggcagacccgctggctccaagaacaaacccaaaccaccaatcattgtgactcacgacagtccaaattccctcagagctaacgccgttgagatcagctcaggttgtgacatctgtgagactttatcggattttgcaagaaggaaacagagaggtctctgcattctcagtgccaatggttgtgtcaccaatgtgacattaaggcaaccagcttcatcaggagcaattgtcacattacacggacgctacgagatcctctcattgcttggatcaatcttgcctccaccagcaccacttggaataactggtctgaccatttacttagccggacctcaaggacaggttgttggtggaggagtggttggtgggctaatcgcatctggtcctgttgttctcatggctgcatctttcatgaatgctgtttttgatcgtcttcctatggatgatgatgaagctgcctctatgcagaaccagcagtactaccagaatggaagatcccgtcctttagatgacattcatggactgcctcaaaatctgctcactaatggaaactcggcttctgatatctactcttgggg

SEQ ID NO: 44171 - protein, 256 aa, Arabidopsis thaliana
  peptide (1)..(256): Ceres Seq. ID no. 12466020
  misc_feature (60)..(215): Homolog of NCBI NO: 15236657 NR Description: hypothetical protein
  misc_feature (30)..(217): Homolog of NCBI NO: 18396925 NR Description: expressed protein
  misc_feature (62)..(215): Homolog of NCBI NO: 7486025 NR Description: hypothetical protein F23E12.50 - Arabidopsis
  misc_feature (23)..(215): Homolog of NCBI NO: 30690333 NR Description: expressed protein [Arabidopsis thaliana]
  misc_feature (58)..(215): Homolog of NCBI NO: 15226945 NR Description: putative AT-hook DNA-binding protein; protein id:
  misc_feature (59)..(215): Homolog of NCBI NO: 15235815 NR Description: putative DNA binding protein; protein id:
  misc_feature (59)..(215): Homolog of NCBI NO: 15234404 NR Description: putative DNA-binding protein; protein id:
  misc_feature (57)..(215): Homolog of NCBI NO: 15225475 NR Description: putative AT-hook DNA-binding protein; protein id:
  misc_feature (60)..(223): Homolog of NCBI NO: 38346718 NR Description: OSJNBa0086O06.16 [Oryza sativa (japonica
  misc_feature (10)..(255): Homolog of NCBI NO: 15228036 NR Description: putative DNA binding protein; protein id:
VEHITTFITMAGGTALTPTSVGSKSVPMRNHEATERGNTNNNLRALPKAVQPVSSIEGEMAKRPRGRPAGSKNKPKPPIIVTHDSPNSLRANAVEISSGCDICETLSDFARRKQRGLCILSANGCVTNVTLRQPASSGAIVTLHGRYEILSLLGSILPPPAPLGITGLTIYLAGPQGQVVGGGVVGGLIASGPVVLMAASFMNAVFDRLPMDDDEAASMQNQQYYQNGRSRPLDDIHGLPQNLLTNGNSASDIYSW

SEQ ID NO: 44172 - protein, 247 aa, Arabidopsis thaliana
  peptide (1)..(247): Ceres Seq. ID no. 12466021
  misc_feature (51)..(206): Homolog of NCBI NO: 15236657 NR Description: hypothetical protein
  misc_feature (21)..(208): Homolog of NCBI NO: 18396925 NR Description: expressed protein
  misc_feature (53)..(206): Homolog of NCBI NO: 7486025 NR Description: hypothetical protein F23E12.50 - Arabidopsis
  misc_feature (14)..(206): Homolog of NCBI NO: 30690333 NR Description: expressed protein [Arabidopsis thaliana]
  misc_feature (49)..(206): Homolog of NCBI NO: 15226945 NR Description: putative AT-hook DNA-binding protein; protein id:
  misc_feature (50)..(206): Homolog of NCBI NO: 15235815 NR Description: putative DNA binding protein; protein id:
  misc_feature (50)..(206): Homolog of NCBI NO: 15234404 NR Description: putative DNA-binding protein; protein id:
  misc_feature (48)..(206): Homolog of NCBI NO: 15225475 NR Description: putative AT-hook DNA-binding protein; protein id:
  misc_feature (51)..(214): Homolog of NCBI NO: 38346718 NR Description: OSJNBa0086O06.16 [Oryza sativa (japonica
  misc_feature (1)..(246): Homolog of NCBI NO: 15228036 NR Description: putative DNA binding protein; protein id:
MAGGTALTPTSVGSKSVPMRNHEATERGNTNNNLRALPKAVQPVSSIEGEMAKRPRGRPAGSKNKPKPPIIVTHDSPNSLRANAVEISSGCDICETLSDFARRKQRGLCILSANGCVTNVTLRQPASSGAIVTLHGRYEILSLLGSILPPPAPLGITGLTIYLAGPQGQVVGGGVVGGLIASGPVVLMAASFMNAVFDRLPMDDDEAASMQNQQYYQNGRSRPLDDIHGLPQNLLTNGNSASDIYSW

SEQ ID NO: 44173 - protein, 229 aa, Arabidopsis thaliana
  peptide (1)..(229): Ceres Seq. ID no. 12466022
  misc_feature (33)..(188): Homolog of NCBI NO: 15236657 NR Description: hypothetical protein
  misc_feature (3)..(190): Homolog of NCBI NO: 18396925 NR Description: expressed protein
  misc_feature (35)..(188): Homolog of NCBI NO: 7486025 NR Description: hypothetical protein F23E12.50 - Arabidopsis
  misc_feature (1)..(188): Homolog of NCBI NO: 30690333 NR Description: expressed protein [Arabidopsis thaliana]
  misc_feature (31)..(188): Homolog of NCBI NO: 15226945 NR Description: putative AT-hook DNA-binding protein; protein id:
  misc_feature (32)..(188): Homolog of NCBI NO: 15235815 NR Description: putative DNA binding protein; protein id:
  misc_feature (32)..(188): Homolog of NCBI NO: 15234404 NR Description: putative DNA-binding protein; protein id:
  misc_feature (30)..(188): Homolog of NCBI NO: 15225475 NR Description: putative AT-hook DNA-binding protein; protein id:
  misc_feature (33)..(196): Homolog of NCBI NO: 38346718 NR Description: OSJNBa0086O06.16 [Oryza sativa (japonica
  misc_feature (1)..(228): Homolog of NCBI NO: 15228036 NR Description: putative DNA binding protein; protein id:
MRNHEATERGNTNNNLRALPKAVQPVSSIEGEMAKRPRGRPAGSKNKPKPPIIVTHDSPNSLRANAVEISSGCDICETLSDFARRKQRGLCILSANGCVTNVTLRQPASSGAIVTLHGRYEILSLLGSILPPPAPLGITGLTIYLAGPQGQVVGGGVVGGLIASGPVVLMAASFMNAVFDRLPMDDDEAASMQNQQYYQNGRSRPLDDIHGLPQNLLTNGNSASDIYSW

SEQ ID NO: 44174 - DNA, 1434 bp, Arabidopsis thaliana
  misc_feature (1)..(1434): Ceres Seq. ID no. 13593341
  misc_feature: MA Experiment ID: 108464 Result: Down-regulated in Transcription
  misc_feature: MA Experiment 108464 PARAMETER Experiment Name: At_Germinating_Seeds_cDNA_P Parameter: Age (day) Value: 4 vs. 0
  misc_feature: MA Experiment 108464 PARAMETER Experiment Name: At_Germinating_Seeds_cDNA_P Parameter: Tissue Value: Germinating Seeds
  misc_feature: MA Experiment ID: 108573 Result: Up-regulated in Transcription
  misc_feature: MA Experiment 108573 PARAMETER Experiment Name: At_Drought_cDNA_P Parameter: Timepoint (hr) Value: 6
  misc_feature: MA Experiment 108573 PARAMETER Experiment Name: At_Drought_cDNA_P Parameter: Tissue Value: Aerial
  misc_feature: MA Experiment 108573 PARAMETER Experiment Name: At_Drought_cDNA_P Parameter: Treatment Value: Drought vs. No Drought
  misc_feature: MA Experiment ID: 108576 Result: Down-regulated in Transcription
  misc_feature: MA Experiment 108576 PARAMETER Experiment Name: At_42deg_Heat_cDNA_P Parameter: Temperature (deg C) Value: 42 vs. 22
  misc_feature: MA Experiment 108576 PARAMETER Experiment Name: At_42deg_Heat_cDNA_P Parameter: Timepoint (hr) Value: 1
  misc_feature: MA Experiment 108576 PARAMETER Experiment Name: At_42deg_Heat_cDNA_P Parameter: Tissue Value: Aerial
  misc_feature: MA Experiment ID: 108577 Result: Down-regulated in Transcription
  misc_feature: MA Experiment 108577 PARAMETER Experiment Name: At_42deg_Heat_cDNA_P Parameter: Temperature (deg C) Value: 42 vs. 22
  misc_feature: MA Experiment 108577 PARAMETER Experiment Name: At_42deg_Heat_cDNA_P Parameter: Timepoint (hr) Value: 6
  misc_feature: MA Experiment 108577 PARAMETER Experiment Name: At_42deg_Heat_cDNA_P Parameter: Tissue Value: Aerial
  misc_feature: MA Experiment ID: 108595 Result: Down-regulated in Transcription
  misc_feature: MA Experiment 108595 PARAMETER Experiment Name: At_Ler-pi_Ovule_cDNA_P Parameter: Plant Line Value: null
  misc_feature: MA Experiment ID: 20000224 Result: Down-regulated in Transcription
  misc_feature: MA Experiment ID: 20000286 Result: Up-regulated in Transcription
  misc_feature: MA Experiment 20000286 PARAMETER Experiment Name: At_Open_Flower_P Parameter: Age (day) Value: 21
  misc_feature: MA Experiment 20000286 PARAMETER Experiment Name: At_Open_Flower_P Parameter: Plant Line Value: WS
  misc_feature: MA Experiment 20000286 PARAMETER Experiment Name: At_Open_Flower_P Parameter: Tissue Value: Half Open vs. Whole Plant
  misc_feature: MA Experiment ID: 20000573 Result: Up-regulated in Transcription
  misc_feature: MA Experiment 20000573 PARAMETER Experiment Name: At_100uM_ABA_Mutants__P Parameter: Organism Value: A. thaliana
  misc_feature: MA Experiment 20000573 PARAMETER Experiment Name: At_100uM_ABA_Mutants__P Parameter: Plant Line Value: CS22 vs. Ler wt
  misc_feature: MA Experiment 20000573 PARAMETER Experiment Name: At_100uM_ABA_Mutants__P Parameter: Timepoint (hr) Value: N/A
  misc_feature: MA Experiment 20000573 PARAMETER Experiment Name: At_100uM_ABA_Mutants__P Parameter: Tissue Value: Whole Plant
  misc_feature: MA Experiment 20000573 PARAMETER Experiment Name: At_100uM_ABA_Mutants__P Parameter: Treatment Value: None
actctctcttcttgtgttttttttttcttatcttctttctcataaaaagtctctctcctctctcttccttgcgtcttctctttccccaatctctctcaggtttctctttcctctctcaccagaagggcaaaaaaattcccttaaagagtcccccgtttttgtttaaccccctcttctctcatatctttgaaatggatgacgatgggtttcgtaattggggttactatgaaccagctgctgctacctttaaaggtaatctcggtttgcagctaatgtctaccattgatcggaacactaaaccgtttttacctgggcgggatccgaatctaatgatggggcctaacgggtcatatcaccaccaagagcctcctatccacatgagctacaattggattaaccaacagaaggataagttcttcaatatgttgcctgttacaacagccactcctaactacggtaatgtccttcccgaaacttcgtctgctccgtcgatgcagatgaatctccatcatcatcttcaaaccgaggagaatccggttaagttggaagaagagattgttgttcagactaagaagagaaagaccaatgcaaaagctggctcgactccaaaggctaagaagccaaggaaaccaaaggatgagaacagtaacaacaacaacaacaacaacacgaatgttactcgagttaaacccgctaagaaaagtgttgacttggtgatcaatggagtgagtatggacatttcgggtcttcctgttcctatctgcacttgcactggagctcctcagcaatgctaccgttggggatgtggcggttggcagtctgcttgttgtaccacaaacatctcaatgcatccattaccaatgagtactaaacgccgtggagcgaggatctcgggaaggaagatgagtcaaggcgcgtttaagaaggttcttgagaaacttgcttctgatgggtttaactttgggaatccgattgatcttaagagccattgggcaagacatggaactaacaagttcgtcacaatcagatgattagttgcttgattagtaaaacagaacaagtgagtgtttctcttccgggatggaatctctcaatgatggtgtatgtatatacaacaaatctgaaatctgtgaccttttcaaaaattctgtctgcaatctgagttcgattctgttttcaggtaaaccatcttcgttgtagggtttggaagcagagttctctgttttctttaccacttttttttatcacacttttgctttgttttttgtttgtttgtctatctgtgtgtctgaggaagaagaaggtgtctgagaaaaaatctgcagggaaatttatttttttgtacttttttttttcttccttttgttatctttttataaacattttactgacttgtaacagatattcttttaattaaatgtttttatttttcag

SEQ ID NO: 44175 - protein, 342 aa, Arabidopsis thaliana
  peptide (1)..(342): Ceres Seq. ID no. 15221212
  misc_feature (64)..(342): Homolog of NCBI NO: 21594368 NR Description: unknown [Arabidopsis thaliana]
  misc_feature (64)..(342): Homolog of NCBI NO: 18391534 NR Description: expressed protein [Arabidopsis thaliana]
  misc_feature (64)..(342): Homolog of NCBI NO: 18394147 NR Description: expressed protein [Arabidopsis thaliana]
SLFLCFFFLIFFLIKSLSPLSSLRLLFPQSLSGFSFLSHQKGKKIPLKSPPFLFNPLFSHIFEMDDDGFRNWGYYEPAAATFKGNLGLQLMSTIDRNTKPFLPGRDPNLMMGPNGSYHHQEPPIHMSYNWINQQKDKFFNMLPVTTATPNYGNVLPETSSAPSMQMNLHHHLQTEENPVKLEEEIVVQTKKRKTNAKAGSTPKAKKPRKPKDENSNNNNNNNTNVTRVKPAKKSVDLVINGVSMDISGLPVPICTCTGAPQQCYRWGCGGWQSACCTTNISMHPLPMSTKRRGARISGRKMSQGAFKKVLEKLASDGFNFGNPIDLKSHWARHGTNKFVTIR

SEQ ID NO: 44176 - protein, 279 aa, Arabidopsis thaliana
  peptide (1)..(279): Ceres Seq. ID no. 15221213
  misc_feature (1)..(279): Homolog of NCBI NO: 21594368 NR Description: unknown [Arabidopsis thaliana]
  misc_feature (1)..(279): Homolog of NCBI NO: 18391534 NR Description: expressed protein [Arabidopsis thaliana]
  misc_feature (1)..(279): Homolog of NCBI NO: 18394147 NR Description: expressed protein [Arabidopsis thaliana]
MDDDGFRNWGYYEPAAATFKGNLGLQLMSTIDRNTKPFLPGRDPNLMMGPNGSYHHQEPPIHMSYNWINQQKDKFFNMLPVTTATPNYGNVLPETSSAPSMQMNLHHHLQTEENPVKLEEEIVVQTKKRKTNAKAGSTPKAKKPRKPKDENSNNNNNNNTNVTRVKPAKKSVDLVINGVSMDISGLPVPICTCTGAPQQCYRWGCGGWQSACCTTNISMHPLPMSTKRRGARISGRKMSQGAFKKVLEKLASDGFNFGNPIDLKSHWARHGTNKFVTIR

SEQ ID NO: 44177 - protein, 252 aa, Arabidopsis thaliana
  peptide (1)..(252): Ceres Seq. ID no. 15221214
  misc_feature (1)..(252): Homolog of NCBI NO: 21594368 NR Description: unknown [Arabidopsis thaliana]
  misc_feature (1)..(252): Homolog of NCBI NO: 18391534 NR Description: expressed protein [Arabidopsis thaliana]
  misc_feature (1)..(252): Homolog of NCBI NO: 18394147 NR Description: expressed protein [Arabidopsis thaliana]
MSTIDRNTKPFLPGRDPNLMMGPNGSYHHQEPPIHMSYNWINQQKDKFFNMLPVTTATPNYGNVLPETSSAPSMQMNLHHHLQTEENPVKLEEEIVVQTKKRKTNAKAGSTPKAKKPRKPKDENSNNNNNNNTNVTRVKPAKKSVDLVINGVSMDISGLPVPICTCTGAPQQCYRWGCGGWQSACCTTNISMHPLPMSTKRRGARISGRKMSQGAFKKVLEKLASDGFNFGNPIDLKSHWARHGTNKFVTIR

SEQ ID NO: 44178 - DNA, 1889 bp, Arabidopsis thaliana
  misc_feature (1)..(1889): Ceres Seq. ID no. 13509347
  misc_feature: MA Experiment ID: 20000328 Result: Down-regulated in Transcription
  misc_feature: MA Experiment 20000328 PARAMETER Experiment Name: At_42deg_Heat_Sub_P Parameter: Age (day) Value: 14
  misc_feature: MA Experiment 20000328 PARAMETER Experiment Name: At_42deg_Heat_Sub_P Parameter: Organism Value: A. thaliana
  misc_feature: MA Experiment 20000328 PARAMETER Experiment Name: At_42deg_Heat_Sub_P Parameter: Plant Line Value: WS
  misc_feature: MA Experiment 20000328 PARAMETER Experiment Name: At_42deg_Heat_Sub_P Parameter: Temperature (deg C) Value: 42 vs. 22
  misc_feature: MA Experiment 20000328 PARAMETER Experiment Name: At_42deg_Heat_Sub_P Parameter: Timepoint (hr) Value: 6
  misc_feature: MA Experiment 20000328 PARAMETER Experiment Name: At_42deg_Heat_Sub_P Parameter: Tissue Value: Aerial
  misc_feature: MA Experiment ID: 20000347 Result: Up-regulated in Transcription
  misc_feature: MA Experiment 20000347 PARAMETER Experiment Name: At_2mM_SA_Sub_P Parameter: Age (day) Value: 14
  misc_feature: MA Experiment 20000347 PARAMETER Experiment Name: At_2mM_SA_Sub_P Parameter: Organism Value: A. thaliana
  misc_feature: MA Experiment 20000347 PARAMETER Experiment Name: At_2mM_SA_Sub_P Parameter: Plant Line Value: WS
  misc_feature: MA Experiment 20000347 PARAMETER Experiment Name: At_2mM_SA_Sub_P Parameter: Timepoint (hr) Value: 6
  misc_feature: MA Experiment 20000347 PARAMETER Experiment Name: At_2mM_SA_Sub_P Parameter: Tissue Value: Aerial
  misc_feature: MA Experiment 20000347 PARAMETER Experiment Name: At_2mM_SA_Sub_P Parameter: Treatment Value: 2mM SA vs. No Treatment
acaaagcaaaagtcataacctttgacacttttttatctcaccatctctatctctctctcactctcacaaagaaacaaacaagacaaatctttctttctctttattttatcctaaaatttcctatctgatttcttcctcttgagctaaatttgttaccttctgggtattcaaaaagatctcattttttcttctagctctaaattttcagggagtttctttcttcttcttttgaagaccctttgtcatgagctaatttttatcctctgtgtgttgagaaagatctcattttttagctttaggattgagggagtttcgatttttacttagcacttttccttggaagtgatttggtggaactcatggtgattggtttcttcctagggttattagagattgagttctggatttttcacgcgccttggatttgatctaatgtactctcttttttcatgtcttaatctggtttagatttttattttgagatcttttgttatataggttgcaagttctgtattttgttaggctttttagtttctgtgttgattatgattctcttggtctaggagagatttgggtgttgttaactgtttgagtttgagaattgtgaaattaggttttttttttttggttctctgatctgaaacttgggtagaagaaaaacatggaggaagttgaagctgctaacagatcagctatagaaagctgtcatggagtgttaaatctcttgtcacaacgaaccagtgatcccaaatccttaacggttgaaacaggagaagtagtttccaagttcaaaagagtagcttctctgttaactagagggttaggccatggaaagtttaggagtaccaacaagtttaggtcatcttttcctcaacacatcttcttagagagtcctatttgctgcggtaatgatctaagtggtgattacactcaagttcttgcaccagagccacttcagatggttccagcttctgctgtttataatgaaatggagccaaaacaccaattgggtcatccttcattaatgcttagtcacaaaatgtgtgttgacaagtcgtttctggagttaaagccacctccttttcgtgctccttatcagttaatccacaaccaccagcagatagcttactccaggagtaatagcggtgtaaaccttaagtttgatggatctggtagtagttgctatactccgagtgtatcaaacggatcaagatcatttgtgtcatctcttagcatggatgctagtgtaacagactacgataggaactcgttccatttgaccggattgtcccgtgggtctgaccaacagcatacccggaagatgtgctctggtagtttgaaatgcggaagtcgaagcaaatgtcactgttccaagaaaaggaaactgagggtaaaacgatcaatcaaggtgcctgcaatcagtaacaagattgcagacattcctccagatgagtattcttggaggaagtatggacagaaaccgataaagggttcaccgcatccacggggatactataaatgcagcagtgtgagaggttgtccagcaaggaagcatgtggagcgatgtattgatgaaacttcaatgttaattgtaacttacgaaggcgagcataaccattcaagaatattgtcttcacaatcagctcacacttgatgatacagagtcaatatgtatgtccttttggcgtctactcttggatttgaagaaagaatgaatttgattcaagaaaccggtctttgtagctctgatttgcaattgtatatttccactctgacagaagttataagagcacttgtgaactcggattatgtggcagaggcagtaccaagaaacatcaacaatttggtttcaactgagctttttcttcaatatatgtatcaatgcatgc

SEQ ID NO: 44179 - protein, 330 aa, Arabidopsis thaliana
  peptide (1)..(330): Ceres Seq. ID no. 13509348
  misc_feature (261)..(321): Pfam Name: WRKY DNA -binding domain Pfam Description: WRKY DNA -binding domain
  misc_feature (138)..(329): Homolog of NCBI NO: 10798760 NR Description: WRKY transcription factor Nt-SubD48 [Nicotiana
  misc_feature (1)..(325): Homolog of NCBI NO: 15233752 NR Description: WRKY family transcription factor [Arabidopsis
  misc_feature (67)..(328): Homolog of NCBI NO: 40539044 NR Description: putative somatic embryogenesis related protein
  misc_feature (1)..(148): Homolog of NCBI NO: 11993901 NR Description: somatic embryogenesis related protein [Dactylis
  misc_feature (159)..(321): Homolog of NCBI NO: 11993901 NR Description: somatic embryogenesis related protein [Dactylis
  misc_feature (1)..(76): Homolog of NCBI NO: 18402397 NR Description: WRKY family transcription factor [Arabidopsis
  misc_feature (146)..(330): Homolog of NCBI NO: 18402397 NR Description: WRKY family transcription factor [Arabidopsis
  misc_feature (1)..(330): Homolog of NCBI NO: 29839595 NR Description: Probable WRKY transcription factor 74 (WRKY
  misc_feature (1)..(330): Homolog of NCBI NO: 15241875 NR Description: WRKY family transcription factor [Arabidopsis
  misc_feature (1)..(330): Homolog of NCBI NO: 18396971 NR Description: WRKY family transcription factor [Arabidopsis
MEEVEAANRSAIESCHGVLNLLSQRTSDPKSLTVETGEVVSKFKRVASLLTRGLGHGKFRSTNKFRSSFPQHIFLESPICCGNDLSGDYTQVLAPEPLQMVPASAVYNEMEPKHQLGHPSLMLSHKMCVDKSFLELKPPPFRAPYQLIHNHQQIAYSRSNSGVNLKFDGSGSSCYTPSVSNGSRSFVSSLSMDASVTDYDRNSFHLTGLSRGSDQQHTRKMCSGSLKCGSRSKCHCSKKRKLRVKRSIKVPAISNKIADIPPDEYSWRKYGQKPIKGSPHPRGYYKCSSVRGCPARKHVERCIDETSMLIVTYEGEHNHSRILSSQSAHT

SEQ ID NO: 44180 - protein, 231 aa, Arabidopsis thaliana
  peptide (1)..(231): Ceres Seq. ID no. 13509349
  misc_feature (162)..(222): Pfam Name: WRKY DNA -binding domain Pfam Description: WRKY DNA -binding domain
  misc_feature (45)..(231): Homolog of NCBI NO: 7488950 NR Description: DNA-binding protein WRKY3 - parsley
  misc_feature (39)..(230): Homolog of NCBI NO: 10798760 NR Description: WRKY transcription factor Nt-SubD48 [Nicotiana
  misc_feature (1)..(226): Homolog of NCBI NO: 15233752 NR Description: WRKY family transcription factor [Arabidopsis
  misc_feature (1)..(229): Homolog of NCBI NO: 40539044 NR Description: putative somatic embryogenesis related protein
  misc_feature (1)..(49): Homolog of NCBI NO: 11993901 NR Description: somatic embryogenesis related protein [Dactylis
  misc_feature (60)..(222): Homolog of NCBI NO: 11993901 NR Description: somatic embryogenesis related protein [Dactylis
  misc_feature (47)..(231): Homolog of NCBI NO: 18402397 NR Description: WRKY family transcription factor [Arabidopsis
  misc_feature (1)..(231): Homolog of NCBI NO: 29839595 NR Description: Probable WRKY transcription factor 74 (WRKY
  misc_feature (1)..(231): Homolog of NCBI NO: 15241875 NR Description: WRKY family transcription factor [Arabidopsis
  misc_feature (1)..(231): Homolog of NCBI NO: 18396971 NR Description: WRKY family transcription factor [Arabidopsis
MVPASAVYNEMEPKHQLGHPSLMLSHKMCVDKSFLELKPPPFRAPYQLIHNHQQIAYSRSNSGVNLKFDGSGSSCYTPSVSNGSRSFVSSLSMDASVTDYDRNSFHLTGLSRGSDQQHTRKMCSGSLKCGSRSKCHCSKKRKLRVKRSIKVPAISNKIADIPPDEYSWRKYGQKPIKGSPHPRGYYKCSSVRGCPARKHVERCIDETSMLIVTYEGEHNHSRILSSQSAHT

SEQ ID NO: 44181 - protein, 221 aa, Arabidopsis thaliana
  peptide (1)..(221): Ceres Seq. ID no. 13509350
  misc_feature (152)..(212): Pfam Name: WRKY DNA -binding domain Pfam Description: WRKY DNA -binding domain
  misc_feature (35)..(221): Homolog of NCBI NO: 7488950 NR Description: DNA-binding protein WRKY3 - parsley
  misc_feature (29)..(220): Homolog of NCBI NO: 10798760 NR Description: WRKY transcription factor Nt-SubD48 [Nicotiana
  misc_feature (1)..(216): Homolog of NCBI NO: 15233752 NR Description: WRKY family transcription factor [Arabidopsis
  misc_feature (1)..(219): Homolog of NCBI NO: 40539044 NR Description: putative somatic embryogenesis related protein
  misc_feature (1)..(39): Homolog of NCBI NO: 11993901 NR Description: somatic embryogenesis related protein [Dactylis
  misc_feature (50)..(212): Homolog of NCBI NO: 11993901 NR Description: somatic embryogenesis related protein [Dactylis
  misc_feature (37)..(221): Homolog of NCBI NO: 18402397 NR Description: WRKY family transcription factor [Arabidopsis
  misc_feature (1)..(221): Homolog of NCBI NO: 29839595 NR Description: Probable WRKY transcription factor 74 (WRKY
  misc_feature (1)..(221): Homolog of NCBI NO: 15241875 NR Description: WRKY family transcription factor [Arabidopsis
  misc_feature (1)..(221): Homolog of NCBI NO: 18396971 NR Description: WRKY family transcription factor [Arabidopsis
MEPKHQLGHPSLMLSHKMCVDKSFLELKPPPFRAPYQLIHNHQQIAYSRSNSGVNLKFDGSGSSCYTPSVSNGSRSFVSSLSMDASVTDYDRNSFHLTGLSRGSDQQHTRKMCSGSLKCGSRSKCHCSKKRKLRVKRSIKVPAISNKIADIPPDEYSWRKYGQKPIKGSPHPRGYYKCSSVRGCPARKHVERCIDETSMLIVTYEGEHNHSRILSSQSAHT

SEQ ID NO: 44182 - DNA, 1529 bp, Arabidopsis thaliana
  misc_feature (1)..(1529): Ceres Seq. ID no. 13646297
  misc_feature: MA Experiment ID: 20000180 Result: Up-regulated in Transcription
  misc_feature: MA Experiment 20000180 PARAMETER Experiment Name: At_Germinating_Seeds_P Parameter: Age (hr) Value: 24 vs. 0
  misc_feature: MA Experiment 20000180 PARAMETER Experiment Name: At_Germinating_Seeds_P Parameter: Tissue Value: Germinating Seeds
  misc_feature: MA Experiment ID: 20000227 Result: Up-regulated in Transcription
  misc_feature: MA Experiment 20000227 PARAMETER Experiment Name: At_Root-Tips-vs-Tops_P Parameter: Tissue Value: Root Tips vs. Root Tops
  misc_feature: MA Experiment ID: 20000234 Result: Up-regulated in Transcription
  misc_feature: MA Experiment 20000234 PARAMETER Experiment Name: At_Siliques_P Parameter: Age (day) Value: 21
  misc_feature: MA Experiment 20000234 PARAMETER Experiment Name: At_Siliques_P Parameter: Organism Value: A. thaliana
  misc_feature: MA Experiment 20000234 PARAMETER Experiment Name: At_Siliques_P Parameter: Plant Line Value: WS
  misc_feature: MA Experiment 20000234 PARAMETER Experiment Name: At_Siliques_P Parameter: Tissue Value: Less Than 5mm Siliques vs. Whole Plant
  misc_feature: MA Experiment ID: 20000265 Result: Up-regulated in Transcription
  misc_feature: MA Experiment 20000265 PARAMETER Experiment Name: At_Open_Flower_P Parameter: Age (day) Value: 21
  misc_feature: MA Experiment 20000265 PARAMETER Experiment Name: At_Open_Flower_P Parameter: Plant Line Value: WS
  misc_feature: MA Experiment 20000265 PARAMETER Experiment Name: At_Open_Flower_P Parameter: Tissue Value: Closed Flower vs. Whole Plant
  misc_feature: MA Experiment ID: 20000286 Result: Up-regulated in Transcription
  misc_feature: MA Experiment 20000286 PARAMETER Experiment Name: At_Open_Flower_P Parameter: Age (day) Value: 21
  misc_feature: MA Experiment 20000286 PARAMETER Experiment Name: At_Open_Flower_P Parameter: Plant Line Value: WS
  misc_feature: MA Experiment 20000286 PARAMETER Experiment Name: At_Open_Flower_P Parameter: Tissue Value: Half Open vs. Whole Plant
  misc_feature: MA Experiment ID: 20000495 Result: Up-regulated in Transcription
  misc_feature: MA Experiment 20000495 PARAMETER Experiment Name: At_Guard_Cells_P Parameter: Harvest Date Value: 8/2/2002
  misc_feature: MA Experiment 20000495 PARAMETER Experiment Name: At_Guard_Cells_P Parameter: Organism Value: A. thaliana
  misc_feature: MA Experiment 20000495 PARAMETER Experiment Name: At_Guard_Cells_P Parameter: Tissue Value: Guard Cells vs. Leaves
  misc_feature: MA Experiment ID: 20000496 Result: Up-regulated in Transcription
  misc_feature: MA Experiment 20000496 PARAMETER Experiment Name: At_Guard_Cells_P Parameter: Harvest Date Value: 7/19/2002
  misc_feature: MA Experiment 20000496 PARAMETER Experiment Name: At_Guard_Cells_P Parameter: Organism Value: Canola
  misc_feature: MA Experiment 20000496 PARAMETER Experiment Name: At_Guard_Cells_P Parameter: Tissue Value: Guard Cells vs. Leaves
  misc_feature: MA Experiment ID: 20001558 Result: Up-regulated in Transcription
  misc_feature: MA Experiment 20001558 PARAMETER Experiment Name: At_Drought_Soil_Dry_P Parameter: Age (day) Value: 27
  misc_feature: MA Experiment 20001558 PARAMETER Experiment Name: At_Drought_Soil_Dry_P Parameter: Organism Value: A. thaliana
  misc_feature: MA Experiment 20001558 PARAMETER Experiment Name: At_Drought_Soil_Dry_P Parameter: Plant Line Value: WS
  misc_feature: MA Experiment 20001558 PARAMETER Experiment Name: At_Drought_Soil_Dry_P Parameter: Post Timepoint (hr) Value: 6
  misc_feature: MA Experiment 20001558 PARAMETER Experiment Name: At_Drought_Soil_Dry_P Parameter: Post-Treatment Value: Re-Water vs. No Drought
  misc_feature: MA Experiment 20001558 PARAMETER Experiment Name: At_Drought_Soil_Dry_P Parameter: Timepoint (day) Value: 13
  misc_feature: MA Experiment 20001558 PARAMETER Experiment Name: At_Drought_Soil_Dry_P Parameter: Treatment Value: Drought vs. No Drought
atcaaaccatttagcctctccacactcacaaagggctcacaagtctcaaatacaaaaccatgaagaacatactagcttgcatagttaccatcataaccctctcaaacctcataaccatttctcaaggaagaagggtatcacagtcatttgaaacatttgagtacacagcaattatttgcagatcccacagtgcctccataacagagtacggtggtgtaggagacggcaagacgctaaacacaaaggccttccagagcgccgttgatcatctcagccaatactcatctgaaggcggagcacagctctttgtacccgccgggaaatggctcaccggaagtttcaacctcacaagccatttcactctgtttcttcacaaagacgcaattcttctcgctgctcaagacttaaacgaatacccaattctaaaggctttgccttcgtacggacgaggacgtgacgccgccggtggaagattcgctagtctcatcttcggcactaatctctccgacgtaattatcaccgggaacaacggcacaatcgacggtcaaggatcgttttggtggcaaaagttccacggtggcaagctaaaatacactcgcccgtacctgattgagttaatgttctcagatacaattcagatttcaaatctaacgttccttgattctccatcgtggaacatccacccagtgtatagtagcaatatcatcgtaaaaggcgttacgatcatcgccccggtaaaatctccgaacaccgacggaatcaatccagattcttgcacgaacacgaggatcgaagactgttacatcatatccggcgacgattgcatcgccgtgaaaagcggatgggacgaatacggaatctcattcggaatgccgacgaagcacctcgtgatccgtagattaacctgtatctcaccgtacagcgccgcgatcgctctcggaagcgaaatgtccggcggaatcgaagacgtgagagcggaagatatcaccgcataccaaacagaatccggcgtacggataaaaaccgccgtaggaagaggagctttcgtgaagaacatatacgtaaaaggaatgaatctacacacgatgaaatgggttttttggatgaccggaaattacaaagctcatgctgattctcattacgatcctcacgctctaccggagataaccgggattaattacagagatattgtagctgagaatgtttctatggctggaaggttagagggaatctctggagatccttttactgggatttgtatttcgaatgcaacgatttctatggcggctaagcataagaaagcgatttggatgtgtagtgatgttgaaggagttacgagtggtgttgatcctaagccttgtgatttgcttgatggacaagaatcagagacgacgaagaagaagatgattgacggtggatgtgattttcctactgatgtgttggagattgataatgttgagcttaagacttgtagttatcaaatgagttagcaatcttgtaatctttttctttaacctaatttcatattt

SEQ ID NO: 44183 - protein, 476 aa, Arabidopsis thaliana
  peptide (1)..(476): Ceres Seq. ID no. 15218696
  misc_feature (77)..(434): Pfam Name: Glycosyl hydrolases family 28 Pfam Description: Glycosyl hydrolases family 28
  misc_feature (76)..(437): Homolog of NCBI NO: 34393209 NR Description: putative polygalacturonase
  misc_feature (34)..(437): Homolog of NCBI NO: 11263971 NR Description: hypothetical protein T17J13.70 - Arabidopsis
  misc_feature (34)..(437): Homolog of NCBI NO: 18412253 NR Description: polygalacturonase, putative [Arabidopsis
  misc_feature (3)..(437): Homolog of NCBI NO: 40714685 NR Description: putative polygalacturonase
  misc_feature (7)..(472): Homolog of NCBI NO: 15224072 NR Description: polygalacturonase, putative [Arabidopsis
  misc_feature (34)..(471): Homolog of NCBI NO: 15229058 NR Description: polygalacturonase, putative [Arabidopsis
  misc_feature (35)..(475): Homolog of NCBI NO: 34897760 NR Description: ESTs AU029388(E30287),D49277(S16474) correspond a region of the predicted gene.~Similar to Arabidopsis thaliana
  misc_feature (31)..(471): Homolog of NCBI NO: 15236514 NR Description: polygalacturonase, putative [Arabidopsis
  misc_feature (1)..(473): Homolog of NCBI NO: 30692538 NR Description: polygalacturonase-like protein [Fragaria x
  misc_feature (1)..(476): Homolog of NCBI NO: 15233124 NR Description: polygalacturonase, putative [Arabidopsis
MKNILACIVTIITLSNLITISQGRRVSQSFETFEYTAIICRSHSASITEYGGVGDGKTLNTKAFQSAVDHLSQYSSEGGAQLFVPAGKWLTGSFNLTSHFTLFLHKDAILLAAQDLNEYPILKALPSYGRGRDAAGGRFASLIFGTNLSDVIITGNNGTIDGQGSFWWQKFHGGKLKYTRPYLIELMFSDTIQISNLTFLDSPSWNIHPVYSSNIIVKGVTIIAPVKSPNTDGINPDSCTNTRIEDCYIISGDDCIAVKSGWDEYGISFGMPTKHLVIRRLTCISPYSAAIALGSEMSGGIEDVRAEDITAYQTESGVRIKTAVGRGAFVKNIYVKGMNLHTMKWVFWMTGNYKAHADSHYDPHALPEITGINYRDIVAENVSMAGRLEGISGDPFTGICISNATISMAAKHKKAIWMCSDVEGVTSGVDPKPCDLLDGQESETTKKKMIDGGCDFPTDVLEIDNVELKTCSYQMS

SEQ ID NO: 44184 - protein, 290 aa, Arabidopsis thaliana
  peptide (1)..(290): Ceres Seq. ID no. 15218697
  misc_feature (1)..(248): Pfam Name: Glycosyl hydrolases family 28 Pfam Description: Glycosyl hydrolases family 28
  misc_feature (1)..(251): Homolog of NCBI NO: 34393209 NR Description: putative polygalacturonase
  misc_feature (1)..(251): Homolog of NCBI NO: 11263971 NR Description: hypothetical protein T17J13.70 - Arabidopsis
  misc_feature (1)..(251): Homolog of NCBI NO: 18412253 NR Description: polygalacturonase, putative [Arabidopsis
  misc_feature (1)..(251): Homolog of NCBI NO: 40714685 NR Description: putative polygalacturonase
  misc_feature (1)..(286): Homolog of NCBI NO: 15224072 NR Description: polygalacturonase, putative [Arabidopsis
  misc_feature (1)..(285): Homolog of NCBI NO: 15229058 NR Description: polygalacturonase, putative [Arabidopsis
  misc_feature (1)..(289): Homolog of NCBI NO: 34897760 NR Description: ESTs AU029388(E30287),D49277(S16474) correspond a region of the predicted gene.~Similar to Arabidopsis thaliana
  misc_feature (1)..(285): Homolog of NCBI NO: 15236514 NR Description: polygalacturonase, putative [Arabidopsis
  misc_feature (1)..(287): Homolog of NCBI NO: 30692538 NR Description: polygalacturonase-like protein [Fragaria x
  misc_feature (1)..(290): Homolog of NCBI NO: 15233124 NR Description: polygalacturonase, putative [Arabidopsis
MFSDTIQISNLTFLDSPSWNIHPVYSSNIIVKGVTIIAPVKSPNTDGINPDSCTNTRIEDCYIISGDDCIAVKSGWDEYGISFGMPTKHLVIRRLTCISPYSAAIALGSEMSGGIEDVRAEDITAYQTESGVRIKTAVGRGAFVKNIYVKGMNLHTMKWVFWMTGNYKAHADSHYDPHALPEITGINYRDIVAENVSMAGRLEGISGDPFTGICISNATISMAAKHKKAIWMCSDVEGVTSGVDPKPCDLLDGQESETTKKKMIDGGCDFPTDVLEIDNVELKTCSYQMS

SEQ ID NO: 44185 - DNA, 1610 bp, Arabidopsis thaliana
  misc_feature (1)..(1610): Ceres Seq. ID no. 13509351
  misc_feature: MA Experiment ID: 20000307 Result: Up-regulated in Transcription
  misc_feature: MA Experiment 20000307 PARAMETER Experiment Name: At_Germinating_Seeds_Sub_P Parameter: Age (hr) Value: 24 vs. 0
  misc_feature: MA Experiment 20000307 PARAMETER Experiment Name: At_Germinating_Seeds_Sub_P Parameter: Organism Value: A. thaliana
  misc_feature: MA Experiment 20000307 PARAMETER Experiment Name: At_Germinating_Seeds_Sub_P Parameter: Plant Line Value: WS
  misc_feature: MA Experiment 20000307 PARAMETER Experiment Name: At_Germinating_Seeds_Sub_P Parameter: Tissue Value: Germinating Seeds
  misc_feature: MA Experiment ID: 20000315 Result: Down-regulated in Transcription
  misc_feature: MA Experiment 20000315 PARAMETER Experiment Name: At_14day_Shoots-Roots_Sub_P Parameter: Age (day) Value: 14
  misc_feature: MA Experiment 20000315 PARAMETER Experiment Name: At_14day_Shoots-Roots_Sub_P Parameter: Organism Value: A. thaliana
  misc_feature: MA Experiment 20000315 PARAMETER Experiment Name: At_14day_Shoots-Roots_Sub_P Parameter: Plant Line Value: WS
  misc_feature: MA Experiment 20000315 PARAMETER Experiment Name: At_14day_Shoots-Roots_Sub_P Parameter: Tissue Value: Shoots vs. Whole Plant
  misc_feature: MA Experiment ID: 20000328 Result: Down-regulated in Transcription
  misc_feature: MA Experiment 20000328 PARAMETER Experiment Name: At_42deg_Heat_Sub_P Parameter: Age (day) Value: 14
  misc_feature: MA Experiment 20000328 PARAMETER Experiment Name: At_42deg_Heat_Sub_P Parameter: Organism Value: A. thaliana
  misc_feature: MA Experiment 20000328 PARAMETER Experiment Name: At_42deg_Heat_Sub_P Parameter: Plant Line Value: WS
  misc_feature: MA Experiment 20000328 PARAMETER Experiment Name: At_42deg_Heat_Sub_P Parameter: Temperature (deg C) Value: 42 vs. 22
  misc_feature: MA Experiment 20000328 PARAMETER Experiment Name: At_42deg_Heat_Sub_P Parameter: Timepoint (hr) Value: 6
  misc_feature: MA Experiment 20000328 PARAMETER Experiment Name: At_42deg_Heat_Sub_P Parameter: Tissue Value: Aerial
  misc_feature: MA Experiment ID: 20000346 Result: Up-regulated in Transcription
  misc_feature: MA Experiment 20000346 PARAMETER Experiment Name: At_2mM_SA_Sub_P Parameter: Age (day) Value: 14
  misc_feature: MA Experiment 20000346 PARAMETER Experiment Name: At_2mM_SA_Sub_P Parameter: Organism Value: A. thaliana
  misc_feature: MA Experiment 20000346 PARAMETER Experiment Name: At_2mM_SA_Sub_P Parameter: Plant Line Value: WS
  misc_feature: MA Experiment 20000346 PARAMETER Experiment Name: At_2mM_SA_Sub_P Parameter: Timepoint (hr) Value: 1
  misc_feature: MA Experiment 20000346 PARAMETER Experiment Name: At_2mM_SA_Sub_P Parameter: Tissue Value: Aerial
  misc_feature: MA Experiment 20000346 PARAMETER Experiment Name: At_2mM_SA_Sub_P Parameter: Treatment Value: 2mM SA vs. No Treatment
  misc_feature: MA Experiment ID: 20000347 Result: Up-regulated in Transcription
  misc_feature: MA Experiment 20000347 PARAMETER Experiment Name: At_2mM_SA_Sub_P Parameter: Age (day) Value: 14
  misc_feature: MA Experiment 20000347 PARAMETER Experiment Name: At_2mM_SA_Sub_P Parameter: Organism Value: A. thaliana
  misc_feature: MA Experiment 20000347 PARAMETER Experiment Name: At_2mM_SA_Sub_P Parameter: Plant Line Value: WS
  misc_feature: MA Experiment 20000347 PARAMETER Experiment Name: At_2mM_SA_Sub_P Parameter: Timepoint (hr) Value: 6
  misc_feature: MA Experiment 20000347 PARAMETER Experiment Name: At_2mM_SA_Sub_P Parameter: Tissue Value: Aerial
  misc_feature: MA Experiment 20000347 PARAMETER Experiment Name: At_2mM_SA_Sub_P Parameter: Treatment Value: 2mM SA vs. No Treatment
  misc_feature: MA Experiment ID: 20000355 Result: Down-regulated in Transcription
  misc_feature: MA Experiment 20000355 PARAMETER Experiment Name: At_Siliques_Sub_P Parameter: Age (day) Value: 21
  misc_feature: MA Experiment 20000355 PARAMETER Experiment Name: At_Siliques_Sub_P Parameter: Organism Value: A. thaliana
  misc_feature: MA Experiment 20000355 PARAMETER Experiment Name: At_Siliques_Sub_P Parameter: Plant Line Value: WS
  misc_feature: MA Experiment 20000355 PARAMETER Experiment Name: At_Siliques_Sub_P Parameter: Tissue Value: Less Than 5mm Siliques vs. Whole Plant
  misc_feature: MA Experiment ID: 20000440 Result: Down-regulated in Transcription
  misc_feature: MA Experiment 20000440 PARAMETER Experiment Name: At_Closed-Flower__Sub_P Parameter: Tissue Value: Closed Flower vs. Whole Plant
tccaatcctcagcccaaacccaaacccgctcctcctcctcctccgtcaacatcctccggttcacaaatcggtccaatcctaaaccgaccaatgatcgatctctcagctctctacgacctccacaaagaactcggccgtggccaattcggaatcacttacaaatgcacggacaaatccaacggtcgagaatacgcctgcaaatccatctcaaaacgtaaactcatacgtcgcaaagacatcgaagacgtgagacgtgaggtcatgatcttgcaacaccttactggtcaaccaaacatagtcgagtttcgaggcgcgtatgaagacaaagacaatcttcatttggttatggagctctgttctggaggagagctttttgatcgtattatcaagaaaggaagttactctgagaaagaagctgctaatatcttcagacagatcgttaatgttgttcatgtttgtcacttcatgggcgttgttcatagagacttaaagcctgagaatttcttgcttgttagtaacgaagaagattctccaatcaaagcaacagattttggactctctgttttcatcgaagaaggtaaagtgtatagagatatagttgggagcgcatactacgttgcacctgaagttctacatcgaaactacgggaaagaaatcgatgtatggagcgcgggtgttatgctttacattcttctcagtggtgttcctccattttggggagagaccgagaagactatatttgaggcgatcttagaaggaaagctggatcttgaaacttctccttggcctactatatcggaaagcgcaaaagatttgataagaaagatgttgataagagatcctaaaaaaaggataaccgcagctgaagcacttgagcatccatggatgacagacaccaaaatttctgataaaccaatcaatagtgctgttcttgttaggatgaagcaattccgcgcgatgaacaagctcaagaaacttgccttgaaggtgatagcggaaaacttatcggaagaagagataaaaggattaaagcaaacgtttaagaacatggatacagatgaaagtggcaccatcacttttgatgaactaagaaacgggttacatcgtcttggatctaagcttacggagtctgaaatcaaacaactcatggaagctgctgatgtggacaaaagtgggacgattgattacattgagtttgtaactgcaacaatgcatcgtcatagattggagaaagaagagaatttgatagaagcatttaaatacttcgacaaagacagaagcggttttatcacaagggacgagcttaaacactccatgactgagtatggcatgggtgatgatgcgaccatagatgaagttatcaatgatgttgataccgacaatgatgggaggataaactacgaggaatttgtggcgatgatgaggaaaggaactacagattcagatccaaagctgatcagatgatatatattcaactacagtgacgaatgcttttgcttcatatataataattaaaataaactaataataaacacgaatncaatgagaattaatgcattcctatgttttttcccttnagatgtataaataataaatatgatgnattgcgc

SEQ ID NO: 44186 - protein, 487 aa, Arabidopsis thaliana
  peptide (1)..(487): Ceres Seq. ID no. 13509352
  misc_feature (38)..(296): Pfam Name: Protein kinase domain Pfam Description: Protein kinase domain
  misc_feature (2)..(477): Homolog of NCBI NO: 23616997 NR Description: CDP2_ORYSA Calcium-dependent protein kinase
  misc_feature (3)..(486): Homolog of NCBI NO: 4336426 NR Description: Ca2+-dependent protein kinase [Mesembryanthemum
  misc_feature (3)..(485): Homolog of NCBI NO: 7428009 NR Description: calcium-dependent protein kinase (EC 2.7.1.-) 1 -
  misc_feature (3)..(485): Homolog of NCBI NO: 19171502 NR Description: calcium-dependent protein kinase [Lycopersicon
  misc_feature (1)..(461): Homolog of NCBI NO: 6721111 NR Description: T4O12.25 [Arabidopsis thaliana]
SNPQPKPKPAPPPPPSTSSGSQIGPILNRPMIDLSALYDLHKELGRGQFGITYKCTDKSNGREYACKSISKRKLIRRKDIEDVRREVMILQHLTGQPNIVEFRGAYEDKDNLHLVMELCSGGELFDRIIKKGSYSEKEAANIFRQIVNVVHVCHFMGVVHRDLKPENFLLVSNEEDSPIKATDFGLSVFIEEGKVYRDIVGSAYYVAPEVLHRNYGKEIDVWSAGVMLYILLSGVPPFWGETEKTIFEAILEGKLDLETSPWPTISESAKDLIRKMLIRDPKKRITAAEALEHPWMTDTKISDKPINSAVLVRMKQFRAMNKLKKLALKVIAENLSEEEIKGLKQTFKNMDTDESGTITFDELRNGLHRLGSKLTESEIKQLMEAADVDKSGTIDYIEFVTATMHRHRLEKEENLIEAFKYFDKDRSGFITRDELKHSMTEYGMGDDATIDEVINDVDTDNDGRINYEEFVAMMRKGTTDSDPKLIR

SEQ ID NO: 44187 - protein, 457 aa, Arabidopsis thaliana
  peptide (1)..(457): Ceres Seq. ID no. 13509353
  misc_feature (8)..(266): Pfam Name: Protein kinase domain Pfam Description: Protein kinase domain
  misc_feature (1)..(447): Homolog of NCBI NO: 23616997 NR Description: CDP2_ORYSA Calcium-dependent protein kinase
  misc_feature (1)..(456): Homolog of NCBI NO: 4336426 NR Description: Ca2+-dependent protein kinase [Mesembryanthemum
  misc_feature (1)..(455): Homolog of NCBI NO: 7428009 NR Description: calcium-dependent protein kinase (EC 2.7.1.-) 1 -
  misc_feature (1)..(455): Homolog of NCBI NO: 19171502 NR Description: calcium-dependent protein kinase [Lycopersicon
  misc_feature (1)..(431): Homolog of NCBI NO: 6721111 NR Description: T4O12.25 [Arabidopsis thaliana]
MIDLSALYDLHKELGRGQFGITYKCTDKSNGREYACKSISKRKLIRRKDIEDVRREVMILQHLTGQPNIVEFRGAYEDKDNLHLVMELCSGGELFDRIIKKGSYSEKEAANIFRQIVNVVHVCHFMGVVHRDLKPENFLLVSNEEDSPIKATDFGLSVFIEEGKVYRDIVGSAYYVAPEVLHRNYGKEIDVWSAGVMLYILLSGVPPFWGETEKTIFEAILEGKLDLETSPWPTISESAKDLIRKMLIRDPKKRITAAEALEHPWMTDTKISDKPINSAVLVRMKQFRAMNKLKKLALKVIAENLSEEEIKGLKQTFKNMDTDESGTITFDELRNGLHRLGSKLTESEIKQLMEAADVDKSGTIDYIEFVTATMHRHRLEKEENLIEAFKYFDKDRSGFITRDELKHSMTEYGMGDDATIDEVINDVDTDNDGRINYEEFVAMMRKGTTDSDPKLIR

SEQ ID NO: 44188 - protein, 400 aa, Arabidopsis thaliana
  peptide (1)..(400): Ceres Seq. ID no. 13509354
  misc_feature (1)..(209): Pfam Name: Protein kinase domain Pfam Description: Protein kinase domain
  misc_feature (1)..(390): Homolog of NCBI NO: 23616997 NR Description: CDP2_ORYSA Calcium-dependent protein kinase
  misc_feature (1)..(399): Homolog of NCBI NO: 4336426 NR Description: Ca2+-dependent protein kinase [Mesembryanthemum
  misc_feature (1)..(398): Homolog of NCBI NO: 7428009 NR Description: calcium-dependent protein kinase (EC 2.7.1.-) 1 -
  misc_feature (1)..(398): Homolog of NCBI NO: 19171502 NR Description: calcium-dependent protein kinase [Lycopersicon
  misc_feature (1)..(374): Homolog of NCBI NO: 6721111 NR Description: T4O12.25 [Arabidopsis thaliana]
MILQHLTGQPNIVEFRGAYEDKDNLHLVMELCSGGELFDRIIKKGSYSEKEAANIFRQIVNVVHVCHFMGVVHRDLKPENFLLVSNEEDSPIKATDFGLSVFIEEGKVYRDIVGSAYYVAPEVLHRNYGKEIDVWSAGVMLYILLSGVPPFWGETEKTIFEAILEGKLDLETSPWPTISESAKDLIRKMLIRDPKKRITAAEALEHPWMTDTKISDKPINSAVLVRMKQFRAMNKLKKLALKVIAENLSEEEIKGLKQTFKNMDTDESGTITFDELRNGLHRLGSKLTESEIKQLMEAADVDKSGTIDYIEFVTATMHRHRLEKEENLIEAFKYFDKDRSGFITRDELKHSMTEYGMGDDATIDEVINDVDTDNDGRINYEEFVAMMRKGTTDSDPKLIR

SEQ ID NO: 44189 - DNA, 953 bp, Arabidopsis thaliana
  misc_feature (1)..(953): Ceres Seq. ID no. 12482261
aagctctcgcatcactttcatcgatttttcctctctgcgtcgatccttcagacatcggcgtcggagtttccgacaggaatctaaaaatgtcacgtggaagaggagttcctatgatggacctgaaacgaagttatgatgttgaagacagggtggtgtccgtgtctataccatcaataatcgaagctgatgaggctgatctgtggccactacctgagattgataccaagaagtcgaaatttccttgctgtatagtttggactcctcttcctgttgtctcttggttggctcctttcattggtcatattggactttgcagagaagatggagtcattttggactttgctggatctaacttcatcaatgttgatgattttgcatttggtcctcctgctcgctatctccaactcgatagaaccaagtgttgcttaccaccaaatatgggtggacatacttgcaagtatggattcaaacacaccgactttggaacagcgcgtacatgggataatgcactgagctcgagcacacgtagctttgagcataaaacctacaacatcttcacttgtaactgccattcgtttgttgcaaactgtttgaaccgtctttgctatggtggctcaatggagtggaatatggtgaatgttgctattttacttatgatcaaagggaaatggatcaatggttcatcagtagtccgctcgtttctgccatgtgctgtggtcacgtctttgggggtggtgcttgtcggctggccattcctcatcggtctctcttcgttctcgctactactctttgcctggttcataattgctacttactgttttaagaacataattacttgaagcagtatgagagaaatataaatatgatgtatcaccaaaattatgttaatcttaagaattgttctcttttcctttcggcaccatctagctttcaactccaaaattatgttaatc

SEQ ID NO: 44190 - protein, 278 aa, Arabidopsis thaliana
  peptide (1)..(278): Ceres Seq. ID no. 12482262
  misc_feature (71)..(252): Pfam Name: Protein of unknown function (DUF778) Pfam Description: Protein of unknown function (DUF778)
  misc_feature (69)..(135): Homolog of NCBI NO: 19920918 NR Description: CG8372-PA [Drosophila melanogaster]
  misc_feature (156)..(246): Homolog of NCBI NO: 24582738 NR Description: CG8372-PB [Drosophila melanogaster]
  misc_feature (156)..(246): Homolog of NCBI NO: 19920918 NR Description: CG8372-PA [Drosophila melanogaster]
  misc_feature (71)..(277): Homolog of NCBI NO: 21592754 NR Description: unknown [Arabidopsis thaliana]
  misc_feature (71)..(277): Homolog of NCBI NO: 15230386 NR Description: putative protein
  misc_feature (68)..(277): Homolog of NCBI NO: 34897172 NR Description: hypothetical protein [Oryza sativa (japonica
  misc_feature (35)..(277): Homolog of NCBI NO: 34910502 NR Description: P0456F08.26 [Oryza sativa (japonica
  misc_feature (88)..(278): Homolog of NCBI NO: 26449550 NR Description: unknown protein [Arabidopsis thaliana]
  misc_feature (29)..(278): Homolog of NCBI NO: 30682996 NR Description: expressed protein [Arabidopsis thaliana]
  misc_feature (16)..(278): Homolog of NCBI NO: 7452462 NR Description: hypothetical protein At2g26070 [imported] -
ALASLSSIFPLCVDPSDIGVGVSDRNLKMSRGRGVPMMDLKRSYDVEDRVVSVSIPSIIEADEADLWPLPEIDTKKSKFPCCIVWTPLPVVSWLAPFIGHIGLCREDGVILDFAGSNFINVDDFAFGPPARYLQLDRTKCCLPPNMGGHTCKYGFKHTDFGTARTWDNALSSSTRSFEHKTYNIFTCNCHSFVANCLNRLCYGGSMEWNMVNVAILLMIKGKWINGSSVVRSFLPCAVVTSLGVVLVGWPFLIGLSSFSLLLFAWFIIATYCFKNIIT

SEQ ID NO: 44191 - protein, 250 aa, Arabidopsis thaliana
  peptide (1)..(250): Ceres Seq. ID no. 12482263
  misc_feature (43)..(224): Pfam Name: Protein of unknown function (DUF778) Pfam Description: Protein of unknown function (DUF778)
  misc_feature (41)..(107): Homolog of NCBI NO: 19920918 NR Description: CG8372-PA [Drosophila melanogaster]
  misc_feature (128)..(218): Homolog of NCBI NO: 24582738 NR Description: CG8372-PB [Drosophila melanogaster]
  misc_feature (128)..(218): Homolog of NCBI NO: 19920918 NR Description: CG8372-PA [Drosophila melanogaster]
  misc_feature (43)..(249): Homolog of NCBI NO: 21592754 NR Description: unknown [Arabidopsis thaliana]
  misc_feature (43)..(249): Homolog of NCBI NO: 15230386 NR Description: putative protein
  misc_feature (40)..(249): Homolog of NCBI NO: 34897172 NR Description: hypothetical protein [Oryza sativa (japonica
  misc_feature (7)..(249): Homolog of NCBI NO: 34910502 NR Description: P0456F08.26 [Oryza sativa (japonica
  misc_feature (60)..(250): Homolog of NCBI NO: 26449550 NR Description: unknown protein [Arabidopsis thaliana]
  misc_feature (1)..(250): Homolog of NCBI NO: 30682996 NR Description: expressed protein [Arabidopsis thaliana]
  misc_feature (1)..(250): Homolog of NCBI NO: 7452462 NR Description: hypothetical protein At2g26070 [imported] -
MSRGRGVPMMDLKRSYDVEDRVVSVSIPSIIEADEADLWPLPEIDTKKSKFPCCIVWTPLPVVSWLAPFIGHIGLCREDGVILDFAGSNFINVDDFAFGPPARYLQLDRTKCCLPPNMGGHTCKYGFKHTDFGTARTWDNALSSSTRSFEHKTYNIFTCNCHSFVANCLNRLCYGGSMEWNMVNVAILLMIKGKWINGSSVVRSFLPCAVVTSLGVVLVGWPFLIGLSSFSLLLFAWFIIATYCFKNIIT

SEQ ID NO: 44192 - protein, 242 aa, Arabidopsis thaliana
  peptide (1)..(242): Ceres Seq. ID no. 12482264
  misc_feature (35)..(216): Pfam Name: Protein of unknown function (DUF778) Pfam Description: Protein of unknown function (DUF778)
  misc_feature (33)..(99): Homolog of NCBI NO: 19920918 NR Description: CG8372-PA [Drosophila melanogaster]
  misc_feature (120)..(210): Homolog of NCBI NO: 24582738 NR Description: CG8372-PB [Drosophila melanogaster]
  misc_feature (120)..(210): Homolog of NCBI NO: 19920918 NR Description: CG8372-PA [Drosophila melanogaster]
  misc_feature (35)..(241): Homolog of NCBI NO: 21592754 NR Description: unknown [Arabidopsis thaliana]
  misc_feature (35)..(241): Homolog of NCBI NO: 15230386 NR Description: putative protein
  misc_feature (32)..(241): Homolog of NCBI NO: 34897172 NR Description: hypothetical protein [Oryza sativa (japonica
  misc_feature (1)..(241): Homolog of NCBI NO: 34910502 NR Description: P0456F08.26 [Oryza sativa (japonica
  misc_feature (52)..(242): Homolog of NCBI NO: 26449550 NR Description: unknown protein [Arabidopsis thaliana]
  misc_feature (1)..(242): Homolog of NCBI NO: 30682996 NR Description: expressed protein [Arabidopsis thaliana]
  misc_feature (1)..(242): Homolog of NCBI NO: 7452462 NR Description: hypothetical protein At2g26070 [imported] -
MMDLKRSYDVEDRVVSVSIPSIIEADEADLWPLPEIDTKKSKFPCCIVWTPLPVVSWLAPFIGHIGLCREDGVILDFAGSNFINVDDFAFGPPARYLQLDRTKCCLPPNMGGHTCKYGFKHTDFGTARTWDNALSSSTRSFEHKTYNIFTCNCHSFVANCLNRLCYGGSMEWNMVNVAILLMIKGKWINGSSVVRSFLPCAVVTSLGVVLVGWPFLIGLSSFSLLLFAWFIIATYCFKNIIT

SEQ ID NO: 44193 - DNA, 598 bp, Arabidopsis thaliana
  misc_feature (1)..(598): Ceres Seq. ID no. 13503058
  misc_feature: MA Experiment ID: 20000179 Result: Up-regulated in Transcription
  misc_feature: MA Experiment 20000179 PARAMETER Experiment Name: At_Germinating_Seeds_P Parameter: Age (hr) Value: 6 vs. 0
  misc_feature: MA Experiment 20000179 PARAMETER Experiment Name: At_Germinating_Seeds_P Parameter: Tissue Value: Germinating Seeds
  misc_feature: MA Experiment ID: 20000180 Result: Up-regulated in Transcription
  misc_feature: MA Experiment 20000180 PARAMETER Experiment Name: At_Germinating_Seeds_P Parameter: Age (hr) Value: 24 vs. 0
  misc_feature: MA Experiment 20000180 PARAMETER Experiment Name: At_Germinating_Seeds_P Parameter: Tissue Value: Germinating Seeds
  misc_feature: MA Experiment ID: 20000794 Result: Down-regulated in Transcription
  misc_feature: MA Experiment 20000794 PARAMETER Experiment Name: At_Petals_P Parameter: Age (day) Value: 23-25 days
  misc_feature: MA Experiment 20000794 PARAMETER Experiment Name: At_Petals_P Parameter: Plant Line Value: WS
  misc_feature: MA Experiment 20000794 PARAMETER Experiment Name: At_Petals_P Parameter: Tissue Value: Petals vs. Whole plant
  misc_feature: MA Experiment ID: 20001911 Result: Down-regulated in Transcription
  misc_feature: MA Experiment 20001911 PARAMETER Experiment Name: At_Drought_Reproduction_P Parameter: Age (day) Value: 40
  misc_feature: MA Experiment 20001911 PARAMETER Experiment Name: At_Drought_Reproduction_P Parameter: Organism Value: A. thaliana
  misc_feature: MA Experiment 20001911 PARAMETER Experiment Name: At_Drought_Reproduction_P Parameter: Plant Line Value: WS
  misc_feature: MA Experiment 20001911 PARAMETER Experiment Name: At_Drought_Reproduction_P Parameter: Timepoint (day) Value: 10
  misc_feature: MA Experiment 20001911 PARAMETER Experiment Name: At_Drought_Reproduction_P Parameter: Tissue Value: Flowers
  misc_feature: MA Experiment 20001911 PARAMETER Experiment Name: At_Drought_Reproduction_P Parameter: Treatment Value: Drought vs. No Drought
aagaagaagagcaatcgaagaaaagagggatttgtgtttgtttgttgttcttcgattgaaaatggtgaaatcgacgagtaaggatgctcaggatctatttcgatctcttcggtctgcttattctgctactccgactaatcttaagatcatcgacttgtatgtcgttttcgctgtcttcaccgctctgattcaggtggtttatatggctttggtgggatcatttccatttaactcgttcctatctggagttctctcttgtatcgggacagcagttcttgctgtttgcctccggattcaagtgaacaaagaaaacaaggaattcaaggatttagcacctgagagagcttttgctgattttgttctctgcaacttagtcctccatttggtgatcatcaacttcctcggatagaggtttcactctcctgtctacaagttgctttcatgctttaatgtactggagtttttaggtgtcacttggaatcaaaactctagtttgagatatttttgttgttgtcgaagtatcaaacttttattagtgtctctctcactcaataacagagtctcctgcagtaatggcctaatgggaccctttgattcg

SEQ ID NO: 44194 - protein, 135 aa, Arabidopsis thaliana
  peptide (1)..(135): Ceres Seq. ID no. 13503059
  misc_feature (24)..(135): Pfam Name: DAD family Pfam Description: DAD family
  misc_feature (21)..(135): Homolog of NCBI NO: 20138057 NR Description: Defender against cell death 1 (DAD-1)
  misc_feature (21)..(135): Homolog of NCBI NO: 20138097 NR Description: Defender against cell death 1 (DAD-1)
  misc_feature (21)..(135): Homolog of NCBI NO: 29423681 NR Description: DAD1 [Petunia x hybrida]
  misc_feature (21)..(135): Homolog of NCBI NO: 20138029 NR Description: Defender against cell death 1 (DAD-1)
  misc_feature (21)..(135): Homolog of NCBI NO: 4106446 NR Description: defender against apoptotic death 1 homolog
  misc_feature (21)..(135): Homolog of NCBI NO: 30686440 NR Description: defender against cell death protein [Arabidopsis
  misc_feature (21)..(135): Homolog of NCBI NO: 18403864 NR Description: defender against cell death protein [Arabidopsis
  misc_feature (1)..(135): Homolog of NCBI NO: 25313138 NR Description: defender against cell death protein
  misc_feature (21)..(135): Homolog of NCBI NO: 6014897 NR Description: Defender against cell death 1 (DAD-1) (AtDAD1)
  misc_feature (21)..(135): Homolog of NCBI NO: 15222602 NR Description: defender against cell death protein -related
RRRAIEEKRDLCLFVVLRLKMVKSTSKDAQDLFRSLRSAYSATPTNLKIIDLYVVFAVFTALIQVVYMALVGSFPFNSFLSGVLSCIGTAVLAVCLRIQVNKENKEFKDLAPERAFADFVLCNLVLHLVIINFLG

SEQ ID NO: 44195 - protein, 115 aa, Arabidopsis thaliana
  peptide (1)..(115): Ceres Seq. ID no. 13503060
  misc_feature (4)..(115): Pfam Name: DAD family Pfam Description: DAD family
  misc_feature (1)..(115): Homolog of NCBI NO: 20138057 NR Description: Defender against cell death 1 (DAD-1)
  misc_feature (1)..(115): Homolog of NCBI NO: 20138097 NR Description: Defender against cell death 1 (DAD-1)
  misc_feature (1)..(115): Homolog of NCBI NO: 29423681 NR Description: DAD1 [Petunia x hybrida]
  misc_feature (1)..(115): Homolog of NCBI NO: 20138029 NR Description: Defender against cell death 1 (DAD-1)
  misc_feature (1)..(115): Homolog of NCBI NO: 4106446 NR Description: defender against apoptotic death 1 homolog
  misc_feature (1)..(115): Homolog of NCBI NO: 30686440 NR Description: defender against cell death protein [Arabidopsis
  misc_feature (1)..(115): Homolog of NCBI NO: 18403864 NR Description: defender against cell death protein [Arabidopsis
  misc_feature (1)..(115): Homolog of NCBI NO: 25313138 NR Description: defender against cell death protein
  misc_feature (1)..(115): Homolog of NCBI NO: 6014897 NR Description: Defender against cell death 1 (DAD-1) (AtDAD1)
  misc_feature (1)..(115): Homolog of NCBI NO: 15222602 NR Description: defender against cell death protein -related
MVKSTSKDAQDLFRSLRSAYSATPTNLKIIDLYVVFAVFTALIQVVYMALVGSFPFNSFLSGVLSCIGTAVLAVCLRIQVNKENKEFKDLAPERAFADFVLCNLVLHLVIINFLG

SEQ ID NO: 44196 - protein, 68 aa, Arabidopsis thaliana
  peptide (1)..(68): Ceres Seq. ID no. 13503061
  misc_feature (1)..(68): Pfam Name: DAD family Pfam Description: DAD family
  misc_feature (1)..(68): Homolog of NCBI NO: 20138057 NR Description: Defender against cell death 1 (DAD-1)
  misc_feature (1)..(68): Homolog of NCBI NO: 20138097 NR Description: Defender against cell death 1 (DAD-1)
  misc_feature (1)..(68): Homolog of NCBI NO: 29423681 NR Description: DAD1 [Petunia x hybrida]
  misc_feature (1)..(68): Homolog of NCBI NO: 20138029 NR Description: Defender against cell death 1 (DAD-1)
  misc_feature (1)..(68): Homolog of NCBI NO: 4106446 NR Description: defender against apoptotic death 1 homolog
  misc_feature (1)..(68): Homolog of NCBI NO: 30686440 NR Description: defender against cell death protein [Arabidopsis
  misc_feature (1)..(68): Homolog of NCBI NO: 18403864 NR Description: defender against cell death protein [Arabidopsis
  misc_feature (1)..(68): Homolog of NCBI NO: 25313138 NR Description: defender against cell death protein
  misc_feature (1)..(68): Homolog of NCBI NO: 6014897 NR Description: Defender against cell death 1 (DAD-1) (AtDAD1)
  misc_feature (1)..(68): Homolog of NCBI NO: 15222602 NR Description: defender against cell death protein -related
MALVGSFPFNSFLSGVLSCIGTAVLAVCLRIQVNKENKEFKDLAPERAFADFVLCNLVLHLVIINFLG

SEQ ID NO: 44197 - DNA, 892 bp, Arabidopsis thaliana
  misc_feature (1)..(892): Ceres Seq. ID no. 13509761
  misc_feature: MA Experiment ID: 20000180 Result: Up-regulated in Transcription
  misc_feature: MA Experiment 20000180 PARAMETER Experiment Name: At_Germinating_Seeds_P Parameter: Age (hr) Value: 24 vs. 0
  misc_feature: MA Experiment 20000180 PARAMETER Experiment Name: At_Germinating_Seeds_P Parameter: Tissue Value: Germinating Seeds
  misc_feature: MA Experiment ID: 20000182 Result: Up-regulated in Transcription
  misc_feature: MA Experiment 20000182 PARAMETER Experiment Name: At_2mM_SA_P Parameter: Age (day) Value: 14
  misc_feature: MA Experiment 20000182 PARAMETER Experiment Name: At_2mM_SA_P Parameter: Organism Value: A. thaliana
  misc_feature: MA Experiment 20000182 PARAMETER Experiment Name: At_2mM_SA_P Parameter: Plant Line Value: WS
  misc_feature: MA Experiment 20000182 PARAMETER Experiment Name: At_2mM_SA_P Parameter: Timepoint (hr) Value: 6
  misc_feature: MA Experiment 20000182 PARAMETER Experiment Name: At_2mM_SA_P Parameter: Tissue Value: Aerial
  misc_feature: MA Experiment 20000182 PARAMETER Experiment Name: At_2mM_SA_P Parameter: Treatment Value: 2mM SA vs. No Treatment
  misc_feature: MA Experiment ID: 20000184 Result: Up-regulated in Transcription
  misc_feature: MA Experiment 20000184 PARAMETER Experiment Name: At_Shoots__P Parameter: Age (day) Value: 7
  misc_feature: MA Experiment 20000184 PARAMETER Experiment Name: At_Shoots__P Parameter: Tissue Value: Shoots vs. Whole Plant
  misc_feature: MA Experiment ID: 20000185 Result: Up-regulated in Transcription
  misc_feature: MA Experiment 20000185 PARAMETER Experiment Name: At_Roots__P Parameter: Age (day) Value: 7 vs. 21
  misc_feature: MA Experiment 20000185 PARAMETER Experiment Name: At_Roots__P Parameter: Organism Value: A. thaliana
  misc_feature: MA Experiment 20000185 PARAMETER Experiment Name: At_Roots__P Parameter: Tissue Value: Roots vs. Whole Plant
  misc_feature: MA Experiment ID: 20000234 Result: Up-regulated in Transcription
  misc_feature: MA Experiment 20000234 PARAMETER Experiment Name: At_Siliques_P Parameter: Age (day) Value: 21
  misc_feature: MA Experiment 20000234 PARAMETER Experiment Name: At_Siliques_P Parameter: Organism Value: A. thaliana
  misc_feature: MA Experiment 20000234 PARAMETER Experiment Name: At_Siliques_P Parameter: Plant Line Value: WS
  misc_feature: MA Experiment 20000234 PARAMETER Experiment Name: At_Siliques_P Parameter: Tissue Value: Less Than 5mm Siliques vs. Whole Plant
  misc_feature: MA Experiment ID: 20000437 Result: Down-regulated in Transcription
  misc_feature: MA Experiment 20000437 PARAMETER Experiment Name: At_Drought_P Parameter: Age (day) Value: 8
  misc_feature: MA Experiment 20000437 PARAMETER Experiment Name: At_Drought_P Parameter: Organism Value: A. thaliana
  misc_feature: MA Experiment 20000437 PARAMETER Experiment Name: At_Drought_P Parameter: Plant Line Value: WS
  misc_feature: MA Experiment 20000437 PARAMETER Experiment Name: At_Drought_P Parameter: Timepoint (hr) Value: 24
  misc_feature: MA Experiment 20000437 PARAMETER Experiment Name: At_Drought_P Parameter: Tissue Value: Whole Plant
  misc_feature: MA Experiment 20000437 PARAMETER Experiment Name: At_Drought_P Parameter: Treatment Value: Drought vs. No Drought
  misc_feature: MA Experiment ID: 20000438 Result: Up-regulated in Transcription
  misc_feature: MA Experiment 20000438 PARAMETER Experiment Name: At_Shoots__P Parameter: Age (day) Value: 14
  misc_feature: MA Experiment 20000438 PARAMETER Experiment Name: At_Shoots__P Parameter: Tissue Value: Shoots vs. Whole Plant
  misc_feature: MA Experiment ID: 20000439 Result: Up-regulated in Transcription
  misc_feature: MA Experiment 20000439 PARAMETER Experiment Name: At_Roots__P Parameter: Age (day) Value: 14 vs. 21
  misc_feature: MA Experiment 20000439 PARAMETER Experiment Name: At_Roots__P Parameter: Organism Value: A. thaliana
  misc_feature: MA Experiment 20000439 PARAMETER Experiment Name: At_Roots__P Parameter: Tissue Value: Roots vs. Whole Plant
  misc_feature: MA Experiment ID: 20000709 Result: Down-regulated in Transcription
  misc_feature: MA Experiment 20000709 PARAMETER Experiment Name: At_15mM_NH4NO3_L-to-H_P Parameter: Age (hr) Value: 14
  misc_feature: MA Experiment 20000709 PARAMETER Experiment Name: At_15mM_NH4NO3_L-to-H_P Parameter: Organism Value: A. thaliana
  misc_feature: MA Experiment 20000709 PARAMETER Experiment Name: At_15mM_NH4NO3_L-to-H_P Parameter: Plant Line Value: WS
  misc_feature: MA Experiment 20000709 PARAMETER Experiment Name: At_15mM_NH4NO3_L-to-H_P Parameter: Timepoint (hr) Value: 4
  misc_feature: MA Experiment 20000709 PARAMETER Experiment Name: At_15mM_NH4NO3_L-to-H_P Parameter: Tissue Value: Aerial
  misc_feature: MA Experiment 20000709 PARAMETER Experiment Name: At_15mM_NH4NO3_L-to-H_P Parameter: Treatment Value: 15mM NH4NO3 vs. 30mM Mannitol
  misc_feature: MA Experiment ID: 20001555 Result: Down-regulated in Transcription
  misc_feature: MA Experiment 20001555 PARAMETER Experiment Name: At_Drought_Soil_Dry_P Parameter: Age (day) Value: 24
  misc_feature: MA Experiment 20001555 PARAMETER Experiment Name: At_Drought_Soil_Dry_P Parameter: Organism Value: A. thaliana
  misc_feature: MA Experiment 20001555 PARAMETER Experiment Name: At_Drought_Soil_Dry_P Parameter: Plant Line Value: WS
  misc_feature: MA Experiment 20001555 PARAMETER Experiment Name: At_Drought_Soil_Dry_P Parameter: Post Timepoint (hr) Value: None
  misc_feature: MA Experiment 20001555 PARAMETER Experiment Name: At_Drought_Soil_Dry_P Parameter: Post-Treatment Value: None
  misc_feature: MA Experiment 20001555 PARAMETER Experiment Name: At_Drought_Soil_Dry_P Parameter: Timepoint (day) Value: 10
  misc_feature: MA Experiment 20001555 PARAMETER Experiment Name: At_Drought_Soil_Dry_P Parameter: Treatment Value: Drought vs. No Drought
  misc_feature: MA Experiment ID: 20001556 Result: Down-regulated in Transcription
  misc_feature: MA Experiment 20001556 PARAMETER Experiment Name: At_Drought_Soil_Dry_P Parameter: Age (day) Value: 26
  misc_feature: MA Experiment 20001556 PARAMETER Experiment Name: At_Drought_Soil_Dry_P Parameter: Organism Value: A. thaliana
  misc_feature: MA Experiment 20001556 PARAMETER Experiment Name: At_Drought_Soil_Dry_P Parameter: Plant Line Value: WS
  misc_feature: MA Experiment 20001556 PARAMETER Experiment Name: At_Drought_Soil_Dry_P Parameter: Post Timepoint (hr) Value: None
  misc_feature: MA Experiment 20001556 PARAMETER Experiment Name: At_Drought_Soil_Dry_P Parameter: Post-Treatment Value: None
  misc_feature: MA Experiment 20001556 PARAMETER Experiment Name: At_Drought_Soil_Dry_P Parameter: Timepoint (day) Value: 12
  misc_feature: MA Experiment 20001556 PARAMETER Experiment Name: At_Drought_Soil_Dry_P Parameter: Treatment Value: Drought vs. No Drought
  misc_feature: MA Experiment ID: 20001557 Result: Down-regulated in Transcription
  misc_feature: MA Experiment 20001557 PARAMETER Experiment Name: At_Drought_Soil_Dry_P Parameter: Age (day) Value: 27
  misc_feature: MA Experiment 20001557 PARAMETER Experiment Name: At_Drought_Soil_Dry_P Parameter: Organism Value: A. thaliana
  misc_feature: MA Experiment 20001557 PARAMETER Experiment Name: At_Drought_Soil_Dry_P Parameter: Plant Line Value: WS
  misc_feature: MA Experiment 20001557 PARAMETER Experiment Name: At_Drought_Soil_Dry_P Parameter: Post Timepoint (hr) Value: 3
  misc_feature: MA Experiment 20001557 PARAMETER Experiment Name: At_Drought_Soil_Dry_P Parameter: Post-Treatment Value: Re-Water vs. No Drought
  misc_feature: MA Experiment 20001557 PARAMETER Experiment Name: At_Drought_Soil_Dry_P Parameter: Timepoint (day) Value: 13
  misc_feature: MA Experiment 20001557 PARAMETER Experiment Name: At_Drought_Soil_Dry_P Parameter: Treatment Value: Drought vs. No Drought
  misc_feature: MA Experiment ID: 20001558 Result: Down-regulated in Transcription
  misc_feature: MA Experiment 20001558 PARAMETER Experiment Name: At_Drought_Soil_Dry_P Parameter: Age (day) Value: 27
  misc_feature: MA Experiment 20001558 PARAMETER Experiment Name: At_Drought_Soil_Dry_P Parameter: Organism Value: A. thaliana
  misc_feature: MA Experiment 20001558 PARAMETER Experiment Name: At_Drought_Soil_Dry_P Parameter: Plant Line Value: WS
  misc_feature: MA Experiment 20001558 PARAMETER Experiment Name: At_Drought_Soil_Dry_P Parameter: Post Timepoint (hr) Value: 6
  misc_feature: MA Experiment 20001558 PARAMETER Experiment Name: At_Drought_Soil_Dry_P Parameter: Post-Treatment Value: Re-Water vs. No Drought
  misc_feature: MA Experiment 20001558 PARAMETER Experiment Name: At_Drought_Soil_Dry_P Parameter: Timepoint (day) Value: 13
  misc_feature: MA Experiment 20001558 PARAMETER Experiment Name: At_Drought_Soil_Dry_P Parameter: Treatment Value: Drought vs. No Drought
aaaaagcaaaccaaacatgattcaagacaagtctaaaggtgcaaagcaaacgcttctagagcggccatggttcctcgctgtggctctagctggtcttataggtggcgcaatgctcatcacaagcttcatccgagctacggacaacaccttgtcactctgctccacggctaagaacacagctgcgtctatagccaaatacacagccaccccaatccaactccaatccatcgtccactacgccacttcacacaccgtccctcaacaatctttcgaggagatctcgatctctttaaacgtcctcaaggagcgtctcccttgtaactttctagtctttggcctcggccgcgactccctcatgtgggcctccctcaatccaggtggcacaactgtgttcttggaagaggatcctgagtggatagaggccgtcctcaaggacgccccatccctcagggcccaccatgttcagtaccggacccacctttctgaggccggccgccttctctcgacttacaagaacgaacccatgtgtttaccagctaaagctttcccgatccgctacaacgaaaagtgtcccttggcgttgacttctctccctgatgagttctatgataccgagtgggatctgatcatggtggacgcaccaaaagggtacttcccagaggcgccaggaaggatggcggcgatattttcctcggccatcatggcacgtaaccggaaaggtgatggcacgactcacgtcttccttcatgacgttaaccgcaaagtggagaacgcttttgccaatgagttcctttgtgagaagtataaggtcaactccgtaggtaggctctggcacttcgagatacctaacgccgctaacatgaccgaccagcctggtgaccggttttgctag

SEQ ID NO: 44198 - protein, 296 aa, Arabidopsis thaliana
  peptide (1)..(296): Ceres Seq. ID no. 13509762
  misc_feature (53)..(296): Pfam Name: Protein of unknown function (DUF579) Pfam Description: Protein of unknown function (DUF579)
  misc_feature (38)..(296): Homolog of NCBI NO: 18397819 NR Description: expressed protein [Arabidopsis thaliana]
  misc_feature (67)..(283): Homolog of NCBI NO: 15234881 NR Description: expressed protein [Arabidopsis thaliana]
  misc_feature (74)..(296): Homolog of NCBI NO: 25402555 NR Description: hypothetical protein [imported] - Arabidopsis
  misc_feature (40)..(296): Homolog of NCBI NO: 25354648 NR Description: hypothetical protein F14O23.3 [imported] -
  misc_feature (40)..(296): Homolog of NCBI NO: 18409879 NR Description: expressed protein [Arabidopsis thaliana]
  misc_feature (67)..(296): Homolog of NCBI NO: 18398986 NR Description: expressed protein [Arabidopsis thaliana]
  misc_feature (25)..(296): Homolog of NCBI NO: 15217566 NR Description: hypothetical protein [Arabidopsis thaliana]
  misc_feature (20)..(296): Homolog of NCBI NO: 21537399 NR Description: unknown [Arabidopsis thaliana]
  misc_feature (20)..(296): Homolog of NCBI NO: 18396558 NR Description: expressed protein [Arabidopsis thaliana]
  misc_feature (6)..(296): Homolog of NCBI NO: 15220402 NR Description: expressed protein [Arabidopsis thaliana]
KSKPNMIQDKSKGAKQTLLERPWFLAVALAGLIGGAMLITSFIRATDNTLSLCSTAKNTAASIAKYTATPIQLQSIVHYATSHTVPQQSFEEISISLNVLKERLPCNFLVFGLGRDSLMWASLNPGGTTVFLEEDPEWIEAVLKDAPSLRAHHVQYRTHLSEAGRLLSTYKNEPMCLPAKAFPIRYNEKCPLALTSLPDEFYDTEWDLIMVDAPKGYFPEAPGRMAAIFSSAIMARNRKGDGTTHVFLHDVNRKVENAFANEFLCEKYKVNSVGRLWHFEIPNAANMTDQPGDRFC

SEQ ID NO: 44199 - protein, 291 aa, Arabidopsis thaliana
  peptide (1)..(291): Ceres Seq. ID no. 13509763
  misc_feature (48)..(291): Pfam Name: Protein of unknown function (DUF579) Pfam Description: Protein of unknown function (DUF579)
  misc_feature (33)..(291): Homolog of NCBI NO: 18397819 NR Description: expressed protein [Arabidopsis thaliana]
  misc_feature (62)..(278): Homolog of NCBI NO: 15234881 NR Description: expressed protein [Arabidopsis thaliana]
  misc_feature (69)..(291): Homolog of NCBI NO: 25402555 NR Description: hypothetical protein [imported] - Arabidopsis
  misc_feature (35)..(291): Homolog of NCBI NO: 25354648 NR Description: hypothetical protein F14O23.3 [imported] -
  misc_feature (35)..(291): Homolog of NCBI NO: 18409879 NR Description: expressed protein [Arabidopsis thaliana]
  misc_feature (62)..(291): Homolog of NCBI NO: 18398986 NR Description: expressed protein [Arabidopsis thaliana]
  misc_feature (20)..(291): Homolog of NCBI NO: 15217566 NR Description: hypothetical protein [Arabidopsis thaliana]
  misc_feature (15)..(291): Homolog of NCBI NO: 21537399 NR Description: unknown [Arabidopsis thaliana]
  misc_feature (15)..(291): Homolog of NCBI NO: 18396558 NR Description: expressed protein [Arabidopsis thaliana]
  misc_feature (1)..(291): Homolog of NCBI NO: 15220402 NR Description: expressed protein [Arabidopsis thaliana]
MIQDKSKGAKQTLLERPWFLAVALAGLIGGAMLITSFIRATDNTLSLCSTAKNTAASIAKYTATPIQLQSIVHYATSHTVPQQSFEEISISLNVLKERLPCNFLVFGLGRDSLMWASLNPGGTTVFLEEDPEWIEAVLKDAPSLRAHHVQYRTHLSEAGRLLSTYKNEPMCLPAKAFPIRYNEKCPLALTSLPDEFYDTEWDLIMVDAPKGYFPEAPGRMAAIFSSAIMARNRKGDGTTHVFLHDVNRKVENAFANEFLCEKYKVNSVGRLWHFEIPNAANMTDQPGDRFC

SEQ ID NO: 44200 - protein, 260 aa, Arabidopsis thaliana
  peptide (1)..(260): Ceres Seq. ID no. 13509764
  misc_feature (17)..(260): Pfam Name: Protein of unknown function (DUF579) Pfam Description: Protein of unknown function (DUF579)
  misc_feature (2)..(260): Homolog of NCBI NO: 18397819 NR Description: expressed protein [Arabidopsis thaliana]
  misc_feature (31)..(247): Homolog of NCBI NO: 15234881 NR Description: expressed protein [Arabidopsis thaliana]
  misc_feature (38)..(260): Homolog of NCBI NO: 25402555 NR Description: hypothetical protein [imported] - Arabidopsis
  misc_feature (4)..(260): Homolog of NCBI NO: 25354648 NR Description: hypothetical protein F14O23.3 [imported] -
  misc_feature (4)..(260): Homolog of NCBI NO: 18409879 NR Description: expressed protein [Arabidopsis thaliana]
  misc_feature (31)..(260): Homolog of NCBI NO: 18398986 NR Description: expressed protein [Arabidopsis thaliana]
  misc_feature (1)..(260): Homolog of NCBI NO: 15217566 NR Description: hypothetical protein [Arabidopsis thaliana]
  misc_feature (1)..(260): Homolog of NCBI NO: 21537399 NR Description: unknown [Arabidopsis thaliana]
  misc_feature (1)..(260): Homolog of NCBI NO: 18396558 NR Description: expressed protein [Arabidopsis thaliana]
  misc_feature (1)..(260): Homolog of NCBI NO: 15220402 NR Description: expressed protein [Arabidopsis thaliana]
MLITSFIRATDNTLSLCSTAKNTAASIAKYTATPIQLQSIVHYATSHTVPQQSFEEISISLNVLKERLPCNFLVFGLGRDSLMWASLNPGGTTVFLEEDPEWIEAVLKDAPSLRAHHVQYRTHLSEAGRLLSTYKNEPMCLPAKAFPIRYNEKCPLALTSLPDEFYDTEWDLIMVDAPKGYFPEAPGRMAAIFSSAIMARNRKGDGTTHVFLHDVNRKVENAFANEFLCEKYKVNSVGRLWHFEIPNAANMTDQPGDRFC

SEQ ID NO: 44201 - DNA, 649 bp, Arabidopsis thaliana
  misc_feature (1)..(649): Ceres Seq. ID no. 13646229
  misc_feature: MA Experiment ID: 20000307 Result: Up-regulated in Transcription
  misc_feature: MA Experiment 20000307 PARAMETER Experiment Name: At_Germinating_Seeds_Sub_P Parameter: Age (hr) Value: 24 vs. 0
  misc_feature: MA Experiment 20000307 PARAMETER Experiment Name: At_Germinating_Seeds_Sub_P Parameter: Organism Value: A. thaliana
  misc_feature: MA Experiment 20000307 PARAMETER Experiment Name: At_Germinating_Seeds_Sub_P Parameter: Plant Line Value: WS
  misc_feature: MA Experiment 20000307 PARAMETER Experiment Name: At_Germinating_Seeds_Sub_P Parameter: Tissue Value: Germinating Seeds
  misc_feature: MA Experiment ID: 20000314 Result: Down-regulated in Transcription
  misc_feature: MA Experiment 20000314 PARAMETER Experiment Name: At_14day_Shoots-Roots_Sub_P Parameter: Age (day) Value: 14
  misc_feature: MA Experiment 20000314 PARAMETER Experiment Name: At_14day_Shoots-Roots_Sub_P Parameter: Organism Value: A. thaliana
  misc_feature: MA Experiment 20000314 PARAMETER Experiment Name: At_14day_Shoots-Roots_Sub_P Parameter: Plant Line Value: WS
  misc_feature: MA Experiment 20000314 PARAMETER Experiment Name: At_14day_Shoots-Roots_Sub_P Parameter: Tissue Value: Roots vs. Whole Plant
  misc_feature: MA Experiment ID: 20000329 Result: Up-regulated in Transcription
  misc_feature: MA Experiment 20000329 PARAMETER Experiment Name: At_4deg_Cold_Sub_P Parameter: Age (day) Value: 14
  misc_feature: MA Experiment 20000329 PARAMETER Experiment Name: At_4deg_Cold_Sub_P Parameter: Organism Value: A. thaliana
  misc_feature: MA Experiment 20000329 PARAMETER Experiment Name: At_4deg_Cold_Sub_P Parameter: Plant Line Value: WS
  misc_feature: MA Experiment 20000329 PARAMETER Experiment Name: At_4deg_Cold_Sub_P Parameter: Temperature (deg C) Value: 4 vs. 22
  misc_feature: MA Experiment 20000329 PARAMETER Experiment Name: At_4deg_Cold_Sub_P Parameter: Timepoint (hr) Value: 6
  misc_feature: MA Experiment 20000329 PARAMETER Experiment Name: At_4deg_Cold_Sub_P Parameter: Tissue Value: Aerial
atcgcttctataaactttttcgatctaaggttcgtgatctccttcttctctacgaagtttacactttttcttcaaaggaaacaatgmgcttctagtacaactttttcrayctmmsgttsgtgwtcctccttcctyrakgttmtccaccggtaakggatatccaaaagatgcttatccaccacaaggatatcctcctcagggatatcctcagcaaggctatccacctcagggatatcctcaacaaggttatcctcagcaaggatatcctccaccgtacgcgcctcaatatcctccaccaccgcagcatcagcaacaacagagcagtcctggctttctagaaggatgtcttgctgctctgtgttgttgctgtctcttggatgcttgcttctgattggagtctctctctctctgcataaagcttcgggatttatttgtaagagggttttggttaaacaaaaaccttaattgatttgtggggcattaaaaatgaatctctcgatgattctctttcgttttatgtgtaatgttcttcggttcataacattttaactattgtctatcgacgttctgccttagtttgtatttgattatgggaatgtaaattggttgggagacactattctatgccatagtttattgcttggatctc

SEQ ID NO: 44202 - protein, 56 aa, Arabidopsis thaliana
  peptide (1)..(56): Ceres Seq. ID no. 15218735
  misc_feature (1)..(56): Homolog of NCBI NO: 30694583 NR Description: expressed protein [Arabidopsis thaliana]
MLIHHKDILLRDILSKAIHLRDILNKVILSKDILHRTRLNILHHRSISNNRAVLAF

SEQ ID NO: 44203 - protein, 50 aa, Arabidopsis thaliana
  peptide (1)..(50): Ceres Seq. ID no. 15218736
  misc_feature (29)..(29): Xaa is any aa, unknown or other
  misc_feature (36)..(36): Xaa is any aa, unknown or other
  misc_feature (37)..(37): Xaa is any aa, unknown or other
  misc_feature (38)..(38): Xaa is any aa, unknown or other
  misc_feature (39)..(39): Xaa is any aa, unknown or other
  misc_feature (40)..(40): Xaa is any aa, unknown or other
  misc_feature (41)..(41): Xaa is any aa, unknown or other
  misc_feature (45)..(45): Xaa is any aa, unknown or other
  misc_feature (46)..(46): Xaa is any aa, unknown or other
  misc_feature (48)..(48): Xaa is any aa, unknown or other
IASINFFDLRFVISFFSTKFTLFLQRKQXASSTTFXXXXXXSSFXXVXHR

SEQ ID NO: 44204 - protein, 40 aa, Arabidopsis thaliana
  peptide (1)..(40): Ceres Seq. ID no. 15218737
MSCCSVLLLSLGCLLLIGVSLSLHKASGFICKRVLVKQKP

SEQ ID NO: 44205 - DNA, 1775 bp, Arabidopsis thaliana
  misc_feature (1)..(1775): Ceres Seq. ID no. 13575443
  misc_feature: MA Experiment ID: 20001904 Result: Up-regulated in Transcription
  misc_feature: MA Experiment 20001904 PARAMETER Experiment Name: At_Drought_Reproduction_P Parameter: Age (day) Value: 37
  misc_feature: MA Experiment 20001904 PARAMETER Experiment Name: At_Drought_Reproduction_P Parameter: Organism Value: A. thaliana
  misc_feature: MA Experiment 20001904 PARAMETER Experiment Name: At_Drought_Reproduction_P Parameter: Plant Line Value: WS
  misc_feature: MA Experiment 20001904 PARAMETER Experiment Name: At_Drought_Reproduction_P Parameter: Timepoint (day) Value: 7
  misc_feature: MA Experiment 20001904 PARAMETER Experiment Name: At_Drought_Reproduction_P Parameter: Tissue Value: Rosettes
  misc_feature: MA Experiment 20001904 PARAMETER Experiment Name: At_Drought_Reproduction_P Parameter: Treatment Value: Drought vs. No Drought
acaattcctagactgtttctctttactctgtttttttgctctgttttttttgtttgtttgttaatggccgaagactctaattcttccgaatcaatcattgttaacgtcaccggagatgataataagtcggctttgttcggtaagtacgatctcggtaagctcctcggtagcggcgcgtttgccaaagtctaccaagcggaggatcttcaaaacggcggcgaaagcgttgcgatcaaagtcgtacaaaaaaaacgtttgaaagacggtttaacggcgcacgttaagagagaaatatctgtcatgcgccgcctccgtcatcctcatatcgtgctcctctccgaagtcctcgccacaaagacgaagatctacttcgtcatggagctagccaaaggtggtgagctcttctcaagagtcaccagcaaccgtttcacagagagtcttagccggaaatatttccggcaattgatctccgccgtgagatactgccacgcaagaggagttttccaccgtgatttgaagccggagaatctcctcctcgacgagaatcgagatctgaaggtttcagacttcggtctcagtgcgatgaaggagcagatccaccccgacggaatgctacatacgctctgtggaactccggcttacgtagcaccggagcttcttttgaagaaaggctacgacggttctaaagctgatatttggtcatgcggcgtcgttttgtttcttctcaacgcaggctacttgccgtttcgtgatccaaacatcatgggactctaccggaaaatccacaaggctcaatacaagttaccggattggacatcttcagatctgcggaaactcctccgccgtctcttggagccaaatccggaactgcgaatcaccgtggaggagattctaaaggatccgtggttcaatcatggagtagatccaagcgaaatcatcggaatccaagccgatgattacgatctggaagaaaacggtaaaattctaaacgcgttcgatttgatttcttcggcgtcgagctcgaatctctccggtttgtttggaaatttcgtgacgccggatcattgcgaccagtttgtatccgatgagagtacggccgttattatgaggaaggtcgaggaagttgcgaagcagttaaatttgagaatcgcgaagaagaaggagagagcgataaagcttgaaggtccacatggagtagctaatgtcgtcgttaaagttcgccggctaacaaatgaactagtgatggtggagatgaagaacaagcaaagagacgtgggcttggtttgggccgatgctcttagacaaaagttacgtcgtttgattaaccaaccggtttataaagttcctgacaaaccgtaaaacggtttcaacactaaaccaacaatccgtgcgttttacttttagaattttcaacgtactacactcgggatcgagacgcattgtggttaaccggttcggtttacattggagcagggagagtaatgggacgatccgcctctttgtatataaaaatgacaagaagaaagaaaaaaacaaaccgggattcaattatttttgtttatttattttcggagtataatttaaacacaaaaattatttgctttattcatcggagagaatttgaataaaactctgatttgaactttgtagccttttatgtgtgaccgtgtgtgtttgcaaacttgggccttattttgcgctaagggacatgctacaccgtttgtaatatttatcgttgttgattttgtttggcaatcgtacgaagtatttcagga

SEQ ID NO: 44206 - protein, 452 aa, Arabidopsis thaliana
  peptide (1)..(452): Ceres Seq. ID no. 13575444
  misc_feature (49)..(303): Pfam Name: Protein kinase domain Pfam Description: Protein kinase domain
  misc_feature (39)..(309): Homolog of NCBI NO: 30683398 NR Description: CBL-interacting protein kinase 5 [Arabidopsis
  misc_feature (39)..(309): Homolog of NCBI NO: 24899813 NR Description: serine/threonine protein kinase-like protein
  misc_feature (39)..(452): Homolog of NCBI NO: 15242509 NR Description: CBL-interacting protein kinase 20 [Arabidopsis
  misc_feature (329)..(424): Homolog of NCBI NO: 34903780 NR Description: unnamed protein product [Oryza sativa (japonica
  misc_feature (43)..(324): Homolog of NCBI NO: 34903780 NR Description: unnamed protein product [Oryza sativa (japonica
  misc_feature (40)..(363): Homolog of NCBI NO: 16226430 NR Description: At2g30360/T9D9.17 [Arabidopsis thaliana]
  misc_feature (45)..(450): Homolog of NCBI NO: 30013673 NR Description: Avr9/Cf-9 rapidly elicited protein 216 [Nicotiana
  misc_feature (40)..(443): Homolog of NCBI NO: 15227739 NR Description: CBL-interacting protein kinase 11 [Arabidopsis
  misc_feature (39)..(443): Homolog of NCBI NO: 15241067 NR Description: CBL-interacting protein kinase 14 [Arabidopsis
  misc_feature (22)..(452): Homolog of NCBI NO: 15224888 NR Description: CBL-interacting protein kinase 22 [Arabidopsis
TIPRLFLFTLFFCSVFFVCLLMAEDSNSSESIIVNVTGDDNKSALFGKYDLGKLLGSGAFAKVYQAEDLQNGGESVAIKVVQKKRLKDGLTAHVKREISVMRRLRHPHIVLLSEVLATKTKIYFVMELAKGGELFSRVTSNRFTESLSRKYFRQLISAVRYCHARGVFHRDLKPENLLLDENRDLKVSDFGLSAMKEQIHPDGMLHTLCGTPAYVAPELLLKKGYDGSKADIWSCGVVLFLLNAGYLPFRDPNIMGLYRKIHKAQYKLPDWTSSDLRKLLRRLLEPNPELRITVEEILKDPWFNHGVDPSEIIGIQADDYDLEENGKILNAFDLISSASSSNLSGLFGNFVTPDHCDQFVSDESTAVIMRKVEEVAKQLNLRIAKKKERAIKLEGPHGVANVVVKVRRLTNELVMVEMKNKQRDVGLVWADALRQKLRRLINQPVYKVPDKP

SEQ ID NO: 44207 - protein, 431 aa, Arabidopsis thaliana
  peptide (1)..(431): Ceres Seq. ID no. 13575445
  misc_feature (28)..(282): Pfam Name: Protein kinase domain Pfam Description: Protein kinase domain
  misc_feature (18)..(288): Homolog of NCBI NO: 30683398 NR Description: CBL-interacting protein kinase 5 [Arabidopsis
  misc_feature (18)..(288): Homolog of NCBI NO: 24899813 NR Description: serine/threonine protein kinase-like protein
  misc_feature (18)..(431): Homolog of NCBI NO: 15242509 NR Description: CBL-interacting protein kinase 20 [Arabidopsis
  misc_feature (308)..(403): Homolog of NCBI NO: 34903780 NR Description: unnamed protein product [Oryza sativa (japonica
  misc_feature (22)..(303): Homolog of NCBI NO: 34903780 NR Description: unnamed protein product [Oryza sativa (japonica
  misc_feature (19)..(342): Homolog of NCBI NO: 16226430 NR Description: At2g30360/T9D9.17 [Arabidopsis thaliana]
  misc_feature (24)..(429): Homolog of NCBI NO: 30013673 NR Description: Avr9/Cf-9 rapidly elicited protein 216 [Nicotiana
  misc_feature (19)..(422): Homolog of NCBI NO: 15227739 NR Description: CBL-interacting protein kinase 11 [Arabidopsis
  misc_feature (18)..(422): Homolog of NCBI NO: 15241067 NR Description: CBL-interacting protein kinase 14 [Arabidopsis
  misc_feature (1)..(431): Homolog of NCBI NO: 15224888 NR Description: CBL-interacting protein kinase 22 [Arabidopsis
MAEDSNSSESIIVNVTGDDNKSALFGKYDLGKLLGSGAFAKVYQAEDLQNGGESVAIKVVQKKRLKDGLTAHVKREISVMRRLRHPHIVLLSEVLATKTKIYFVMELAKGGELFSRVTSNRFTESLSRKYFRQLISAVRYCHARGVFHRDLKPENLLLDENRDLKVSDFGLSAMKEQIHPDGMLHTLCGTPAYVAPELLLKKGYDGSKADIWSCGVVLFLLNAGYLPFRDPNIMGLYRKIHKAQYKLPDWTSSDLRKLLRRLLEPNPELRITVEEILKDPWFNHGVDPSEIIGIQADDYDLEENGKILNAFDLISSASSSNLSGLFGNFVTPDHCDQFVSDESTAVIMRKVEEVAKQLNLRIAKKKERAIKLEGPHGVANVVVKVRRLTNELVMVEMKNKQRDVGLVWADALRQKLRRLINQPVYKVPDKP

SEQ ID NO: 44208 - protein, 352 aa, Arabidopsis thaliana
  peptide (1)..(352): Ceres Seq. ID no. 13575446
  misc_feature (1)..(203): Pfam Name: Protein kinase domain Pfam Description: Protein kinase domain
  misc_feature (1)..(209): Homolog of NCBI NO: 30683398 NR Description: CBL-interacting protein kinase 5 [Arabidopsis
  misc_feature (1)..(209): Homolog of NCBI NO: 24899813 NR Description: serine/threonine protein kinase-like protein
  misc_feature (1)..(352): Homolog of NCBI NO: 15242509 NR Description: CBL-interacting protein kinase 20 [Arabidopsis
  misc_feature (229)..(324): Homolog of NCBI NO: 34903780 NR Description: unnamed protein product [Oryza sativa (japonica
  misc_feature (1)..(224): Homolog of NCBI NO: 34903780 NR Description: unnamed protein product [Oryza sativa (japonica
  misc_feature (1)..(263): Homolog of NCBI NO: 16226430 NR Description: At2g30360/T9D9.17 [Arabidopsis thaliana]
  misc_feature (1)..(350): Homolog of NCBI NO: 30013673 NR Description: Avr9/Cf-9 rapidly elicited protein 216 [Nicotiana
  misc_feature (1)..(343): Homolog of NCBI NO: 15227739 NR Description: CBL-interacting protein kinase 11 [Arabidopsis
  misc_feature (1)..(343): Homolog of NCBI NO: 15241067 NR Description: CBL-interacting protein kinase 14 [Arabidopsis
  misc_feature (1)..(352): Homolog of NCBI NO: 15224888 NR Description: CBL-interacting protein kinase 22 [Arabidopsis
MRRLRHPHIVLLSEVLATKTKIYFVMELAKGGELFSRVTSNRFTESLSRKYFRQLISAVRYCHARGVFHRDLKPENLLLDENRDLKVSDFGLSAMKEQIHPDGMLHTLCGTPAYVAPELLLKKGYDGSKADIWSCGVVLFLLNAGYLPFRDPNIMGLYRKIHKAQYKLPDWTSSDLRKLLRRLLEPNPELRITVEEILKDPWFNHGVDPSEIIGIQADDYDLEENGKILNAFDLISSASSSNLSGLFGNFVTPDHCDQFVSDESTAVIMRKVEEVAKQLNLRIAKKKERAIKLEGPHGVANVVVKVRRLTNELVMVEMKNKQRDVGLVWADALRQKLRRLINQPVYKVPDKP

SEQ ID NO: 44209 - DNA, 1319 bp, Arabidopsis thaliana
  misc_feature (1)..(1319): Ceres Seq. ID no. 14304366
  misc_feature: MA Experiment ID: 108433 Result: Down-regulated in Transcription
  misc_feature: MA Experiment 108433 PARAMETER Experiment Name: At_rhl_Mutant2_cDNA_P Parameter: Age (day) Value: 7
  misc_feature: MA Experiment 108433 PARAMETER Experiment Name: At_rhl_Mutant2_cDNA_P Parameter: Organism Value: A. thaliana
  misc_feature: MA Experiment 108433 PARAMETER Experiment Name: At_rhl_Mutant2_cDNA_P Parameter: Plant Line Value: rhl Mutant vs. wt landsburg
  misc_feature: MA Experiment 108433 PARAMETER Experiment Name: At_rhl_Mutant2_cDNA_P Parameter: Tissue Value: Roots
  misc_feature: MA Experiment ID: 108434 Result: Up-regulated in Transcription
  misc_feature: MA Experiment 108434 PARAMETER Experiment Name: At_Root_Tips_cDNA_P Parameter: Tissue Value: Root Tips
  misc_feature: MA Experiment ID: 108569 Result: Up-regulated in Transcription
  misc_feature: MA Experiment 108569 PARAMETER Experiment Name: At_0.001%_MeJA__cDNA_P Parameter: Timepoint (hr) Value: 6
  misc_feature: MA Experiment 108569 PARAMETER Experiment Name: At_0.001%_MeJA__cDNA_P Parameter: Tissue Value: Aerial
  misc_feature: MA Experiment 108569 PARAMETER Experiment Name: At_0.001%_MeJA__cDNA_P Parameter: Treatment Value: 0.001% MeJA vs. No Treatment
  misc_feature: MA Experiment ID: 108595 Result: Down-regulated in Transcription
  misc_feature: MA Experiment 108595 PARAMETER Experiment Name: At_Ler-pi_Ovule_cDNA_P Parameter: Plant Line Value: null
  misc_feature: MA Experiment ID: 20000224 Result: Down-regulated in Transcription
  misc_feature: MA Experiment ID: 20000227 Result: Up-regulated in Transcription
  misc_feature: MA Experiment 20000227 PARAMETER Experiment Name: At_Root-Tips-vs-Tops_P Parameter: Tissue Value: Root Tips vs. Root Tops
  misc_feature: MA Experiment ID: 20000437 Result: Down-regulated in Transcription
  misc_feature: MA Experiment 20000437 PARAMETER Experiment Name: At_Drought_P Parameter: Age (day) Value: 8
  misc_feature: MA Experiment 20000437 PARAMETER Experiment Name: At_Drought_P Parameter: Organism Value: A. thaliana
  misc_feature: MA Experiment 20000437 PARAMETER Experiment Name: At_Drought_P Parameter: Plant Line Value: WS
  misc_feature: MA Experiment 20000437 PARAMETER Experiment Name: At_Drought_P Parameter: Timepoint (hr) Value: 24
  misc_feature: MA Experiment 20000437 PARAMETER Experiment Name: At_Drought_P Parameter: Tissue Value: Whole Plant
  misc_feature: MA Experiment 20000437 PARAMETER Experiment Name: At_Drought_P Parameter: Treatment Value: Drought vs. No Drought
  misc_feature: MA Experiment ID: 20001247 Result: Up-regulated in Transcription
  misc_feature: MA Experiment 20001247 PARAMETER Experiment Name: At_Far-red-induction_P Parameter: Age (day) Value: 7
  misc_feature: MA Experiment 20001247 PARAMETER Experiment Name: At_Far-red-induction_P Parameter: Light Value: Far-red vs. White
  misc_feature: MA Experiment 20001247 PARAMETER Experiment Name: At_Far-red-induction_P Parameter: Organism Value: A. thaliana
  misc_feature: MA Experiment 20001247 PARAMETER Experiment Name: At_Far-red-induction_P Parameter: Plant Line Value: Columbia
  misc_feature: MA Experiment 20001247 PARAMETER Experiment Name: At_Far-red-induction_P Parameter: Timepoint (hr) Value: 1
  misc_feature: MA Experiment 20001247 PARAMETER Experiment Name: At_Far-red-induction_P Parameter: Tissue Value: Whole Plant
  misc_feature: MA Experiment ID: 20001450 Result: Up-regulated in Transcription
  misc_feature: MA Experiment 20001450 PARAMETER Experiment Name: At_Far-red-induction_P Parameter: Age (day) Value: 7
  misc_feature: MA Experiment 20001450 PARAMETER Experiment Name: At_Far-red-induction_P Parameter: Light Value: Far-red vs. White
  misc_feature: MA Experiment 20001450 PARAMETER Experiment Name: At_Far-red-induction_P Parameter: Organism Value: A. thaliana
  misc_feature: MA Experiment 20001450 PARAMETER Experiment Name: At_Far-red-induction_P Parameter: Plant Line Value: Columbia
  misc_feature: MA Experiment 20001450 PARAMETER Experiment Name: At_Far-red-induction_P Parameter: Timepoint (hr) Value: 8
  misc_feature: MA Experiment 20001450 PARAMETER Experiment Name: At_Far-red-induction_P Parameter: Tissue Value: Whole Plant
  misc_feature: MA Experiment ID: 20001557 Result: Up-regulated in Transcription
  misc_feature: MA Experiment 20001557 PARAMETER Experiment Name: At_Drought_Soil_Dry_P Parameter: Age (day) Value: 27
  misc_feature: MA Experiment 20001557 PARAMETER Experiment Name: At_Drought_Soil_Dry_P Parameter: Organism Value: A. thaliana
  misc_feature: MA Experiment 20001557 PARAMETER Experiment Name: At_Drought_Soil_Dry_P Parameter: Plant Line Value: WS
  misc_feature: MA Experiment 20001557 PARAMETER Experiment Name: At_Drought_Soil_Dry_P Parameter: Post Timepoint (hr) Value: 3
  misc_feature: MA Experiment 20001557 PARAMETER Experiment Name: At_Drought_Soil_Dry_P Parameter: Post-Treatment Value: Re-Water vs. No Drought
  misc_feature: MA Experiment 20001557 PARAMETER Experiment Name: At_Drought_Soil_Dry_P Parameter: Timepoint (day) Value: 13
  misc_feature: MA Experiment 20001557 PARAMETER Experiment Name: At_Drought_Soil_Dry_P Parameter: Treatment Value: Drought vs. No Drought
  misc_feature: MA Experiment ID: 20001558 Result: Up-regulated in Transcription
  misc_feature: MA Experiment 20001558 PARAMETER Experiment Name: At_Drought_Soil_Dry_P Parameter: Age (day) Value: 27
  misc_feature: MA Experiment 20001558 PARAMETER Experiment Name: At_Drought_Soil_Dry_P Parameter: Organism Value: A. thaliana
  misc_feature: MA Experiment 20001558 PARAMETER Experiment Name: At_Drought_Soil_Dry_P Parameter: Plant Line Value: WS
  misc_feature: MA Experiment 20001558 PARAMETER Experiment Name: At_Drought_Soil_Dry_P Parameter: Post Timepoint (hr) Value: 6
  misc_feature: MA Experiment 20001558 PARAMETER Experiment Name: At_Drought_Soil_Dry_P Parameter: Post-Treatment Value: Re-Water vs. No Drought
  misc_feature: MA Experiment 20001558 PARAMETER Experiment Name: At_Drought_Soil_Dry_P Parameter: Timepoint (day) Value: 13
  misc_feature: MA Experiment 20001558 PARAMETER Experiment Name: At_Drought_Soil_Dry_P Parameter: Treatment Value: Drought vs. No Drought
  misc_feature: MA Experiment ID: 20001560 Result: Up-regulated in Transcription
  misc_feature: MA Experiment 20001560 PARAMETER Experiment Name: At_Drought_Soil_Dry_P Parameter: Age (day) Value: 28
  misc_feature: MA Experiment 20001560 PARAMETER Experiment Name: At_Drought_Soil_Dry_P Parameter: Organism Value: A. thaliana
  misc_feature: MA Experiment 20001560 PARAMETER Experiment Name: At_Drought_Soil_Dry_P Parameter: Plant Line Value: WS
  misc_feature: MA Experiment 20001560 PARAMETER Experiment Name: At_Drought_Soil_Dry_P Parameter: Post Timepoint (hr) Value: None
  misc_feature: MA Experiment 20001560 PARAMETER Experiment Name: At_Drought_Soil_Dry_P Parameter: Post-Treatment Value: None
  misc_feature: MA Experiment 20001560 PARAMETER Experiment Name: At_Drought_Soil_Dry_P Parameter: Timepoint (day) Value: 14
  misc_feature: MA Experiment 20001560 PARAMETER Experiment Name: At_Drought_Soil_Dry_P Parameter: Treatment Value: Drought vs. No Drought
  misc_feature: MA Experiment ID: 20001911 Result: Down-regulated in Transcription
  misc_feature: MA Experiment 20001911 PARAMETER Experiment Name: At_Drought_Reproduction_P Parameter: Age (day) Value: 40
  misc_feature: MA Experiment 20001911 PARAMETER Experiment Name: At_Drought_Reproduction_P Parameter: Organism Value: A. thaliana
  misc_feature: MA Experiment 20001911 PARAMETER Experiment Name: At_Drought_Reproduction_P Parameter: Plant Line Value: WS
  misc_feature: MA Experiment 20001911 PARAMETER Experiment Name: At_Drought_Reproduction_P Parameter: Timepoint (day) Value: 10
  misc_feature: MA Experiment 20001911 PARAMETER Experiment Name: At_Drought_Reproduction_P Parameter: Tissue Value: Flowers
  misc_feature: MA Experiment 20001911 PARAMETER Experiment Name: At_Drought_Reproduction_P Parameter: Treatment Value: Drought vs. No Drought
acttaacgtctctctctattcctctccttctctctttctccctgtgaaaaaatggactcggtggctctctactgcaccgctggtctcattgccggcgccgtctactggttcatatgcgtcctaggtccagcagaacgaaaaggcaaacgagcctctgatctctccggcggctcaatctccgcagaaaaagtcaaagacaactataaccaatactggtctttcttccgcaaaccaaaagagatcgaatcagccgagaaagtacctgacttcgtcgacacgttctacaatcttgtcactgatatctacgagtggggatggggacaatctttccatttctctcctcatgtccctggaaaatccgacaaagacgccacaagaatccacgaagaaatggccgtcgatctcatcaaagtgaaaccgggacaaaagattcttgacgctggttgcggcgtgggtgggccgatgagagccatcgcggcccattccaaggcccaagtcactggaatcactatcaacgagtaccaagtgcaacgagccaagcttcacaacaagaaagctggacttgattctctctgcaacgtcgtttgtggtaactttttaaagatgccgttcgatgaaaacacgtttgacggagcttactcgatcgaagctacgtgtcacgctcctaagctcgaagaagtatactcggagatcttcagagtgatgaaaccaggatctttgttcgtgtcctacgaatgggtcaccactgaaaaatacagagacgatgacgaagaacacaaggacgtgattcaagggatcgagagaggagacgcacttcctggactaagaagctacgctgatatagccgtgacggcgaagaaagttgggtttgaggtagtgaaggagaaagatttggctaaaccaccgtctaaaccgtggtggaaccggttaaagatgggaaggattgcttattggagaaaccatgttgtggttgtgattctttctgctattggggttgctcctaaaggaactgttgatgttcataagatgttgtttaagactgctgattatttgaccagaggtggtgagactggaatcttctctccgatgcatatgattctctgtagaaaaccagagaaagcttctgaatgaatgattgagaatcttcttccttgttctcgtttttcttcttctttctttctaagttcatgttttgccccttaagaatctctttgtcgtcgtattaatgttatcactttgttgtttattgtatttttttttttttcaatttgatttgtttaaattgatgatggatcactggaaattagtttttcgctctt

SEQ ID NO: 44210 - protein, 359 aa, Arabidopsis thaliana; identical to SEQ ID NO: 38169
  peptide (1)..(359): Ceres Seq. ID no. 14304367
  misc_feature (82)..(281): Pfam Name: ubiE/COQ5 methyltransferase family Pfam Description: ubiE/COQ5 methyltransferase family
  misc_feature (1)..(354): Homolog of NCBI NO: 3560533 NR Description: 24-methylene lophenol C24(1)methyltransferase
  misc_feature (9)..(356): Homolog of NCBI NO: 7443717 NR Description: probable sterol 24-C-methyltransferase (EC
  misc_feature (1)..(356): Homolog of NCBI NO: 7443718 NR Description: probable sterol 24-C-methyltransferase (EC
  misc_feature (1)..(359): Homolog of NCBI NO: 21555010 NR Description: sterol-C-methyltransferase [Arabidopsis thaliana]
  misc_feature (1)..(359): Homolog of NCBI NO: 1061040 NR Description: sterol-C-methyltransferase [Arabidopsis thaliana]
  misc_feature (1)..(359): Homolog of NCBI NO: 23397216 NR Description: putative sterol-C-methyltransferase [Arabidopsis
  misc_feature (1)..(359): Homolog of NCBI NO: 22136020 NR Description: 24-sterol C-methyltransferase [Arabidopsis
  misc_feature (1)..(359): Homolog of NCBI NO: 15217917 NR Description: sterol-C-methyltransferase [Arabidopsis thaliana]
  misc_feature (1)..(359): Homolog of NCBI NO: 2246456 NR Description: S-adenosyl-methionine-sterol-C-methyltransferase
  misc_feature (1)..(359): Homolog of NCBI NO: 15222955 NR Description: S-adenosyl-methionine-sterol-C-methyltransferase

SEQ ID NO: 44211 - protein, 246 aa, Arabidopsis thaliana; identical to SEQ ID NO: 38170
  peptide (1)..(246): Ceres Seq. ID no. 14304368
  misc_feature (1)..(168): Pfam Name: ubiE/COQ5 methyltransferase family Pfam Description: ubiE/COQ5 methyltransferase family
  misc_feature (1)..(241): Homolog of NCBI NO: 3560533 NR Description: 24-methylene lophenol C24(1)methyltransferase
  misc_feature (1)..(243): Homolog of NCBI NO: 7443717 NR Description: probable sterol 24-C-methyltransferase (EC
  misc_feature (1)..(243): Homolog of NCBI NO: 7443718 NR Description: probable sterol 24-C-methyltransferase (EC
  misc_feature (1)..(246): Homolog of NCBI NO: 21555010 NR Description: sterol-C-methyltransferase [Arabidopsis thaliana]
  misc_feature (1)..(246): Homolog of NCBI NO: 1061040 NR Description: sterol-C-methyltransferase [Arabidopsis thaliana]
  misc_feature (1)..(246): Homolog of NCBI NO: 23397216 NR Description: putative sterol-C-methyltransferase [Arabidopsis
  misc_feature (1)..(246): Homolog of NCBI NO: 22136020 NR Description: 24-sterol C-methyltransferase [Arabidopsis
  misc_feature (1)..(246): Homolog of NCBI NO: 15217917 NR Description: sterol-C-methyltransferase [Arabidopsis thaliana]
  misc_feature (1)..(246): Homolog of NCBI NO: 2246456 NR Description: S-adenosyl-methionine-sterol-C-methyltransferase
  misc_feature (1)..(246): Homolog of NCBI NO: 15222955 NR Description: S-adenosyl-methionine-sterol-C-methyltransferase

SEQ ID NO: 44212 - protein, 222 aa, Arabidopsis thaliana; identical to SEQ ID NO: 38171
  peptide (1)..(222): Ceres Seq. ID no. 14304369
  misc_feature (1)..(144): Pfam Name: ubiE/COQ5 methyltransferase family Pfam Description: ubiE/COQ5 methyltransferase family
  misc_feature (1)..(217): Homolog of NCBI NO: 3560533 NR Description: 24-methylene lophenol C24(1)methyltransferase
  misc_feature (1)..(219): Homolog of NCBI NO: 7443717 NR Description: probable sterol 24-C-methyltransferase (EC
  misc_feature (1)..(219): Homolog of NCBI NO: 7443718 NR Description: probable sterol 24-C-methyltransferase (EC
  misc_feature (1)..(222): Homolog of NCBI NO: 21555010 NR Description: sterol-C-methyltransferase [Arabidopsis thaliana]
  misc_feature (1)..(222): Homolog of NCBI NO: 1061040 NR Description: sterol-C-methyltransferase [Arabidopsis thaliana]
  misc_feature (1)..(222): Homolog of NCBI NO: 23397216 NR Description: putative sterol-C-methyltransferase [Arabidopsis
  misc_feature (1)..(222): Homolog of NCBI NO: 22136020 NR Description: 24-sterol C-methyltransferase [Arabidopsis
  misc_feature (1)..(222): Homolog of NCBI NO: 15217917 NR Description: sterol-C-methyltransferase [Arabidopsis thaliana]
  misc_feature (1)..(222): Homolog of NCBI NO: 2246456 NR Description: S-adenosyl-methionine-sterol-C-methyltransferase
  misc_feature (1)..(222): Homolog of NCBI NO: 15222955 NR Description: S-adenosyl-methionine-sterol-C-methyltransferase

SEQ ID NO: 44213 - DNA, 1115 bp, Arabidopsis thaliana
  misc_feature (1)..(1115): Ceres Seq. ID no. 13509363
  misc_feature: MA Experiment ID: 20000328 Result: Up-regulated in Transcription
  misc_feature: MA Experiment 20000328 PARAMETER Experiment Name: At_42deg_Heat_Sub_P Parameter: Age (day) Value: 14
  misc_feature: MA Experiment 20000328 PARAMETER Experiment Name: At_42deg_Heat_Sub_P Parameter: Organism Value: A. thaliana
  misc_feature: MA Experiment 20000328 PARAMETER Experiment Name: At_42deg_Heat_Sub_P Parameter: Plant Line Value: WS
  misc_feature: MA Experiment 20000328 PARAMETER Experiment Name: At_42deg_Heat_Sub_P Parameter: Temperature (deg C) Value: 42 vs. 22
  misc_feature: MA Experiment 20000328 PARAMETER Experiment Name: At_42deg_Heat_Sub_P Parameter: Timepoint (hr) Value: 6
  misc_feature: MA Experiment 20000328 PARAMETER Experiment Name: At_42deg_Heat_Sub_P Parameter: Tissue Value: Aerial
  misc_feature: MA Experiment ID: 20000440 Result: Up-regulated in Transcription
  misc_feature: MA Experiment 20000440 PARAMETER Experiment Name: At_Closed-Flower__Sub_P Parameter: Tissue Value: Closed Flower vs. Whole Plant
atgtgtgtgaacatttcttgtctgagtaaagatggctaatactccattgatagtttcctttggtgaaatgcttatcgactttgtccctgacacttctggtgtttctttagctgagtccaccggttttctcaaagcccctggtggtgctcctgctaatgttgcttgtgccatcaccaaactcggtggcaaatcagctttcatcggcaagtttggtgatgatgagtttggacacatgttggttaacatattgaagaagaacggtgtgaacagtgaaggtgtttgctttgataccaatgcaagaaccgcgttggcctttgtgactttgaagaaagatggtgagagagagtttatgttttacaggaaccctagtgcggacatgctcttgaaagaatctgaactcaacaaggatcttatcaagaaagctaagattttccactatggttccattagcttgatctctgagccatgtagaacagctcacatggctgcgatgaaaaccgctaaagatgcgggagtcttactctcttatgacccgaacgttcggttgcctctttggccttctactgaagctgctatagaaggcatcaaaagtatttggaatgaggctgatattatcaaggtaagcgatgatgaggtaacgtttctaacgcgtggagatgcggagaaggatgatgttgttttgtctcttatgcatgataagcttaagctgcttattgttactgatggagagaaaggttgcagatactacacaaagaaattcaaagggagagtgcctggatacgctgtgaaagcagttgacacaactggagctggtgattcatttgttggtgcatttcttgtctcattgggaaaagatggctccatactcgatgatgaagggaagctgaaggaagcacttgcctttgcaaatgcatgtggagcagtgtgtactactcagaaaggagctattcctgcacttcccactccagctgatgctcaaaagctcatgaaatctaagtctaaatagtttcaatcttgttctgttctgtttctgtttctttactcttgtcaatttccttggttttcacagagtattttctctgttatctgaataaatctagtttcaagtttctgcc

SEQ ID NO: 44214 - protein, 324 aa, Arabidopsis thaliana
  peptide (1)..(324): Ceres Seq. ID no. 13509364
  misc_feature (4)..(312): Pfam Name: pfkB family carbohydrate kinase Pfam Description: pfkB family carbohydrate kinase
  misc_feature (3)..(319): Homolog of NCBI NO: 23476263 NR Description: fructokinase [Lycopersicon esculentum]
  misc_feature (2)..(320): Homolog of NCBI NO: 32765547 NR Description: fructokinase 2 [Lycopersicon hirsutum]
  misc_feature (6)..(323): Homolog of NCBI NO: 7434223 NR Description: fructokinase (EC 2.7.1.4) - beet
  misc_feature (6)..(320): Homolog of NCBI NO: 21592495 NR Description: fructokinase-like protein [Arabidopsis thaliana]
  misc_feature (6)..(320): Homolog of NCBI NO: 15231692 NR Description: fructokinase, putative [Arabidopsis thaliana]
  misc_feature (2)..(320): Homolog of NCBI NO: 1915974 NR Description: fructokinase [Lycopersicon esculentum]
  misc_feature (6)..(320): Homolog of NCBI NO: 33329200 NR Description: putative fructokinase 2
  misc_feature (6)..(320): Homolog of NCBI NO: 33329198 NR Description: putative fructokinase
  misc_feature (2)..(323): Homolog of NCBI NO: 16566704 NR Description: putative fructokinase II [Oryza sativa]
  misc_feature (1)..(324): Homolog of NCBI NO: 15234986 NR Description: pfkB type carbohydrate kinase protein family
MANTPLIVSFGEMLIDFVPDTSGVSLAESTGFLKAPGGAPANVACAITKLGGKSAFIGKFGDDEFGHMLVNILKKNGVNSEGVCFDTNARTALAFVTLKKDGEREFMFYRNPSADMLLKESELNKDLIKKAKIFHYGSISLISEPCRTAHMAAMKTAKDAGVLLSYDPNVRLPLWPSTEAAIEGIKSIWNEADIIKVSDDEVTFLTRGDAEKDDVVLSLMHDKLKLLIVTDGEKGCRYYTKKFKGRVPGYAVKAVDTTGAGDSFVGAFLVSLGKDGSILDDEGKLKEALAFANACGAVCTTQKGAIPALPTPADAQKLMKSKSK

SEQ ID NO: 44215 - protein, 312 aa, Arabidopsis thaliana
  peptide (1)..(312): Ceres Seq. ID no. 13509365
  misc_feature (1)..(300): Pfam Name: pfkB family carbohydrate kinase Pfam Description: pfkB family carbohydrate kinase
  misc_feature (1)..(307): Homolog of NCBI NO: 23476263 NR Description: fructokinase [Lycopersicon esculentum]
  misc_feature (1)..(308): Homolog of NCBI NO: 32765547 NR Description: fructokinase 2 [Lycopersicon hirsutum]
  misc_feature (1)..(311): Homolog of NCBI NO: 7434223 NR Description: fructokinase (EC 2.7.1.4) - beet
  misc_feature (1)..(308): Homolog of NCBI NO: 21592495 NR Description: fructokinase-like protein [Arabidopsis thaliana]
  misc_feature (1)..(308): Homolog of NCBI NO: 15231692 NR Description: fructokinase, putative [Arabidopsis thaliana]
  misc_feature (1)..(308): Homolog of NCBI NO: 1915974 NR Description: fructokinase [Lycopersicon esculentum]
  misc_feature (1)..(308): Homolog of NCBI NO: 33329200 NR Description: putative fructokinase 2
  misc_feature (1)..(308): Homolog of NCBI NO: 33329198 NR Description: putative fructokinase
  misc_feature (1)..(311): Homolog of NCBI NO: 16566704 NR Description: putative fructokinase II [Oryza sativa]
  misc_feature (1)..(312): Homolog of NCBI NO: 15234986 NR Description: pfkB type carbohydrate kinase protein family
MLIDFVPDTSGVSLAESTGFLKAPGGAPANVACAITKLGGKSAFIGKFGDDEFGHMLVNILKKNGVNSEGVCFDTNARTALAFVTLKKDGEREFMFYRNPSADMLLKESELNKDLIKKAKIFHYGSISLISEPCRTAHMAAMKTAKDAGVLLSYDPNVRLPLWPSTEAAIEGIKSIWNEADIIKVSDDEVTFLTRGDAEKDDVVLSLMHDKLKLLIVTDGEKGCRYYTKKFKGRVPGYAVKAVDTTGAGDSFVGAFLVSLGKDGSILDDEGKLKEALAFANACGAVCTTQKGAIPALPTPADAQKLMKSKSK

SEQ ID NO: 44216 - protein, 257 aa, Arabidopsis thaliana
  peptide (1)..(257): Ceres Seq. ID no. 13509366
  misc_feature (1)..(245): Pfam Name: pfkB family carbohydrate kinase Pfam Description: pfkB family carbohydrate kinase
  misc_feature (1)..(252): Homolog of NCBI NO: 23476263 NR Description: fructokinase [Lycopersicon esculentum]
  misc_feature (1)..(253): Homolog of NCBI NO: 32765547 NR Description: fructokinase 2 [Lycopersicon hirsutum]
  misc_feature (1)..(256): Homolog of NCBI NO: 7434223 NR Description: fructokinase (EC 2.7.1.4) - beet
  misc_feature (1)..(253): Homolog of NCBI NO: 21592495 NR Description: fructokinase-like protein [Arabidopsis thaliana]
  misc_feature (1)..(253): Homolog of NCBI NO: 15231692 NR Description: fructokinase, putative [Arabidopsis thaliana]
  misc_feature (1)..(253): Homolog of NCBI NO: 1915974 NR Description: fructokinase [Lycopersicon esculentum]
  misc_feature (1)..(253): Homolog of NCBI NO: 33329200 NR Description: putative fructokinase 2
  misc_feature (1)..(253): Homolog of NCBI NO: 33329198 NR Description: putative fructokinase
  misc_feature (1)..(256): Homolog of NCBI NO: 16566704 NR Description: putative fructokinase II [Oryza sativa]
  misc_feature (1)..(257): Homolog of NCBI NO: 15234986 NR Description: pfkB type carbohydrate kinase protein family
MLVNILKKNGVNSEGVCFDTNARTALAFVTLKKDGEREFMFYRNPSADMLLKESELNKDLIKKAKIFHYGSISLISEPCRTAHMAAMKTAKDAGVLLSYDPNVRLPLWPSTEAAIEGIKSIWNEADIIKVSDDEVTFLTRGDAEKDDVVLSLMHDKLKLLIVTDGEKGCRYYTKKFKGRVPGYAVKAVDTTGAGDSFVGAFLVSLGKDGSILDDEGKLKEALAFANACGAVCTTQKGAIPALPTPADAQKLMKSKSK

SEQ ID NO: 44217 - DNA, 1045 bp, Arabidopsis thaliana
  misc_feature (1)..(1045): Ceres Seq. ID no. 13646241
  misc_feature: MA Experiment ID: 108434 Result: Down-regulated in Transcription
  misc_feature: MA Experiment 108434 PARAMETER Experiment Name: At_Root_Tips_cDNA_P Parameter: Tissue Value: Root Tips
  misc_feature: MA Experiment ID: 108435 Result: Down-regulated in Transcription
  misc_feature: MA Experiment 108435 PARAMETER Experiment Name: At_stm_Mutants_cDNA_P Parameter: Plant Line Value: wt Landsburg vs stm
  misc_feature: MA Experiment 108435 PARAMETER Experiment Name: At_stm_Mutants_cDNA_P Parameter: Tissue Value: Shoot Apical Meristem Region
  misc_feature: MA Experiment ID: 108461 Result: Up-regulated in Transcription
  misc_feature: MA Experiment 108461 PARAMETER Experiment Name: At_Germinating_Seeds_cDNA_P Parameter: Age (day) Value: 1 vs. 0
  misc_feature: MA Experiment 108461 PARAMETER Experiment Name: At_Germinating_Seeds_cDNA_P Parameter: Tissue Value: Germinating Seeds
  misc_feature: MA Experiment ID: 108462 Result: Up-regulated in Transcription
  misc_feature: MA Experiment 108462 PARAMETER Experiment Name: At_Germinating_Seeds_cDNA_P Parameter: Age (day) Value: 2 vs. 0
  misc_feature: MA Experiment 108462 PARAMETER Experiment Name: At_Germinating_Seeds_cDNA_P Parameter: Tissue Value: Germinating Seeds
  misc_feature: MA Experiment ID: 108463 Result: Up-regulated in Transcription
  misc_feature: MA Experiment 108463 PARAMETER Experiment Name: At_Germinating_Seeds_cDNA_P Parameter: Age (day) Value: 3 vs. 0
  misc_feature: MA Experiment 108463 PARAMETER Experiment Name: At_Germinating_Seeds_cDNA_P Parameter: Tissue Value: Germinating Seeds
  misc_feature: MA Experiment ID: 108464 Result: Up-regulated in Transcription
  misc_feature: MA Experiment 108464 PARAMETER Experiment Name: At_Germinating_Seeds_cDNA_P Parameter: Age (day) Value: 4 vs. 0
  misc_feature: MA Experiment 108464 PARAMETER Experiment Name: At_Germinating_Seeds_cDNA_P Parameter: Tissue Value: Germinating Seeds
  misc_feature: MA Experiment ID: 108473 Result: Down-regulated in Transcription
  misc_feature: MA Experiment 108473 PARAMETER Experiment Name: At_Drought_Flowers_cDNA_P Parameter: Timepoint (hr) Value: 7 d
  misc_feature: MA Experiment 108473 PARAMETER Experiment Name: At_Drought_Flowers_cDNA_P Parameter: Tissue Value: Flower
  misc_feature: MA Experiment 108473 PARAMETER Experiment Name: At_Drought_Flowers_cDNA_P Parameter: Treatment Value: Drought vs. No Drought
  misc_feature: MA Experiment ID: 108561 Result: Down-regulated in Transcription
  misc_feature: MA Experiment 108561 PARAMETER Experiment Name: At_100uM_ABA_cDNA_P Parameter: Timepoint (hr) Value: 6
  misc_feature: MA Experiment 108561 PARAMETER Experiment Name: At_100uM_ABA_cDNA_P Parameter: Tissue Value: Aerial
  misc_feature: MA Experiment 108561 PARAMETER Experiment Name: At_100uM_ABA_cDNA_P Parameter: Treatment Value: 100uM ABA vs. No Treatment
  misc_feature: MA Experiment ID: 108572 Result: Down-regulated in Transcription
  misc_feature: MA Experiment 108572 PARAMETER Experiment Name: At_Drought_cDNA_P Parameter: Timepoint (hr) Value: 1
  misc_feature: MA Experiment 108572 PARAMETER Experiment Name: At_Drought_cDNA_P Parameter: Tissue Value: Aerial
  misc_feature: MA Experiment 108572 PARAMETER Experiment Name: At_Drought_cDNA_P Parameter: Treatment Value: Drought vs. No Drought
  misc_feature: MA Experiment ID: 108573 Result: Down-regulated in Transcription
  misc_feature: MA Experiment 108573 PARAMETER Experiment Name: At_Drought_cDNA_P Parameter: Timepoint (hr) Value: 6
  misc_feature: MA Experiment 108573 PARAMETER Experiment Name: At_Drought_cDNA_P Parameter: Tissue Value: Aerial
  misc_feature: MA Experiment 108573 PARAMETER Experiment Name: At_Drought_cDNA_P Parameter: Treatment Value: Drought vs. No Drought
  misc_feature: MA Experiment ID: 108577 Result: Down-regulated in Transcription
  misc_feature: MA Experiment 108577 PARAMETER Experiment Name: At_42deg_Heat_cDNA_P Parameter: Temperature (deg C) Value: 42 vs. 22
  misc_feature: MA Experiment 108577 PARAMETER Experiment Name: At_42deg_Heat_cDNA_P Parameter: Timepoint (hr) Value: 6
  misc_feature: MA Experiment 108577 PARAMETER Experiment Name: At_42deg_Heat_cDNA_P Parameter: Tissue Value: Aerial
  misc_feature: MA Experiment ID: 108579 Result: Up-regulated in Transcription
  misc_feature: MA Experiment 108579 PARAMETER Experiment Name: At_4deg_Cold_cDNA_P Parameter: Temperature (deg C) Value: 4 vs. 22
  misc_feature: MA Experiment 108579 PARAMETER Experiment Name: At_4deg_Cold_cDNA_P Parameter: Timepoint (hr) Value: 6
  misc_feature: MA Experiment 108579 PARAMETER Experiment Name: At_4deg_Cold_cDNA_P Parameter: Tissue Value: Aerial
  misc_feature: MA Experiment ID: 108595 Result: Down-regulated in Transcription
  misc_feature: MA Experiment 108595 PARAMETER Experiment Name: At_Ler-pi_Ovule_cDNA_P Parameter: Plant Line Value: null
  misc_feature: MA Experiment ID: 108605 Result: Down-regulated in Transcription
  misc_feature: MA Experiment 108605 PARAMETER Experiment Name: At_100uM_ABA_cDNA_P Parameter: Timepoint (hr) Value: 6
  misc_feature: MA Experiment 108605 PARAMETER Experiment Name: At_100uM_ABA_cDNA_P Parameter: Tissue Value: Aerial
  misc_feature: MA Experiment 108605 PARAMETER Experiment Name: At_100uM_ABA_cDNA_P Parameter: Treatment Value: 100uM ABA vs. No Treatment
  misc_feature: MA Experiment ID: 108668 Result: Down-regulated in Transcription
  misc_feature: MA Experiment 108668 PARAMETER Experiment Name: At_2mM_SA_cDNA_P Parameter: Plant Line Value: WS
  misc_feature: MA Experiment 108668 PARAMETER Experiment Name: At_2mM_SA_cDNA_P Parameter: Timepoint (hr) Value: 6
  misc_feature: MA Experiment 108668 PARAMETER Experiment Name: At_2mM_SA_cDNA_P Parameter: Treatment Value: 2mM SA vs. No Treatment
  misc_feature: MA Experiment ID: 20000069 Result: Down-regulated in Transcription
  misc_feature: MA Experiment 20000069 PARAMETER Experiment Name: At_100uM_ABA_Mutants_cDNA_P Parameter: Plant Line Value: CS23
  misc_feature: MA Experiment 20000069 PARAMETER Experiment Name: At_100uM_ABA_Mutants_cDNA_P Parameter: Timepoint (hr) Value: 6
  misc_feature: MA Experiment 20000069 PARAMETER Experiment Name: At_100uM_ABA_Mutants_cDNA_P Parameter: Tissue Value: Aerial
  misc_feature: MA Experiment 20000069 PARAMETER Experiment Name: At_100uM_ABA_Mutants_cDNA_P Parameter: Treatment Value: 100uM ABA vs. No Treatment
  misc_feature: MA Experiment ID: 20000070 Result: Down-regulated in Transcription
  misc_feature: MA Experiment 20000070 PARAMETER Experiment Name: At_100uM_ABA_Mutants_cDNA_P Parameter: Plant Line Value: CS24
  misc_feature: MA Experiment 20000070 PARAMETER Experiment Name: At_100uM_ABA_Mutants_cDNA_P Parameter: Timepoint (hr) Value: 6
  misc_feature: MA Experiment 20000070 PARAMETER Experiment Name: At_100uM_ABA_Mutants_cDNA_P Parameter: Tissue Value: Aerial
  misc_feature: MA Experiment 20000070 PARAMETER Experiment Name: At_100uM_ABA_Mutants_cDNA_P Parameter: Treatment Value: 100uM ABA vs. No Treatment
  misc_feature: MA Experiment ID: 20000071 Result: Down-regulated in Transcription
  misc_feature: MA Experiment 20000071 PARAMETER Experiment Name: At_100uM_ABA_Mutants_cDNA_P Parameter: Plant Line Value: CS8104
  misc_feature: MA Experiment 20000071 PARAMETER Experiment Name: At_100uM_ABA_Mutants_cDNA_P Parameter: Timepoint (hr) Value: 6
  misc_feature: MA Experiment 20000071 PARAMETER Experiment Name: At_100uM_ABA_Mutants_cDNA_P Parameter: Tissue Value: Aerial
  misc_feature: MA Experiment 20000071 PARAMETER Experiment Name: At_100uM_ABA_Mutants_cDNA_P Parameter: Treatment Value: 100uM ABA vs. No Treatment
  misc_feature: MA Experiment ID: 20000072 Result: Down-regulated in Transcription
  misc_feature: MA Experiment 20000072 PARAMETER Experiment Name: At_100uM_ABA_Mutants_cDNA_P Parameter: Plant Line Value: CS8105
  misc_feature: MA Experiment 20000072 PARAMETER Experiment Name: At_100uM_ABA_Mutants_cDNA_P Parameter: Timepoint (hr) Value: 6
  misc_feature: MA Experiment 20000072 PARAMETER Experiment Name: At_100uM_ABA_Mutants_cDNA_P Parameter: Tissue Value: Aerial
  misc_feature: MA Experiment 20000072 PARAMETER Experiment Name: At_100uM_ABA_Mutants_cDNA_P Parameter: Treatment Value: 100uM ABA vs. No Treatment
  misc_feature: MA Experiment ID: 20000086 Result: Down-regulated in Transcription
  misc_feature: MA Experiment 20000086 PARAMETER Experiment Name: At_100uM_ABA_Mutants_cDNA_P Parameter: Plant Line Value: CS22
  misc_feature: MA Experiment 20000086 PARAMETER Experiment Name: At_100uM_ABA_Mutants_cDNA_P Parameter: Timepoint (hr) Value: 6
  misc_feature: MA Experiment 20000086 PARAMETER Experiment Name: At_100uM_ABA_Mutants_cDNA_P Parameter: Tissue Value: Aerial
  misc_feature: MA Experiment 20000086 PARAMETER Experiment Name: At_100uM_ABA_Mutants_cDNA_P Parameter: Treatment Value: 100uM ABA vs. No Treatment
  misc_feature: MA Experiment ID: 20000087 Result: Down-regulated in Transcription
  misc_feature: MA Experiment 20000087 PARAMETER Experiment Name: At_100uM_ABA_Mutants_cDNA_P Parameter: Plant Line Value: WS
  misc_feature: MA Experiment 20000087 PARAMETER Experiment Name: At_100uM_ABA_Mutants_cDNA_P Parameter: Timepoint (hr) Value: 6
  misc_feature: MA Experiment 20000087 PARAMETER Experiment Name: At_100uM_ABA_Mutants_cDNA_P Parameter: Tissue Value: Aerial
  misc_feature: MA Experiment 20000087 PARAMETER Experiment Name: At_100uM_ABA_Mutants_cDNA_P Parameter: Treatment Value: 100uM ABA vs. No Treatment
  misc_feature: MA Experiment ID: 20000088 Result: Down-regulated in Transcription
  misc_feature: MA Experiment 20000088 PARAMETER Experiment Name: At_100uM_ABA_Mutants_cDNA_P Parameter: Plant Line Value: Landsberg
  misc_feature: MA Experiment 20000088 PARAMETER Experiment Name: At_100uM_ABA_Mutants_cDNA_P Parameter: Timepoint (hr) Value: 6
  misc_feature: MA Experiment 20000088 PARAMETER Experiment Name: At_100uM_ABA_Mutants_cDNA_P Parameter: Tissue Value: Aerial
  misc_feature: MA Experiment 20000088 PARAMETER Experiment Name: At_100uM_ABA_Mutants_cDNA_P Parameter: Treatment Value: 100uM ABA vs. No Treatment
  misc_feature: MA Experiment ID: 20000090 Result: Down-regulated in Transcription
  misc_feature: MA Experiment ID: 20000111 Result: Down-regulated in Transcription
  misc_feature: MA Experiment 20000111 PARAMETER Experiment Name: At_42deg_Heat_cDNA_P Parameter: Temperature (deg C) Value: 42 vs. 22
  misc_feature: MA Experiment 20000111 PARAMETER Experiment Name: At_42deg_Heat_cDNA_P Parameter: Timepoint (hr) Value: 6
  misc_feature: MA Experiment 20000111 PARAMETER Experiment Name: At_42deg_Heat_cDNA_P Parameter: Tissue Value: Aerial
  misc_feature: MA Experiment ID: 20000112 Result: Down-regulated in Transcription
  misc_feature: MA Experiment 20000112 PARAMETER Experiment Name: At_42deg_Heat_cDNA_P Parameter: Temperature (deg C) Value: 42 vs. 22
  misc_feature: MA Experiment 20000112 PARAMETER Experiment Name: At_42deg_Heat_cDNA_P Parameter: Timepoint (hr) Value: 2
  misc_feature: MA Experiment 20000112 PARAMETER Experiment Name: At_42deg_Heat_cDNA_P Parameter: Tissue Value: Aerial
  misc_feature: MA Experiment ID: 20000113 Result: Down-regulated in Transcription
  misc_feature: MA Experiment 20000113 PARAMETER Experiment Name: At_42deg_Heat_cDNA_P Parameter: Temperature (deg C) Value: 42 vs. 22
  misc_feature: MA Experiment 20000113 PARAMETER Experiment Name: At_42deg_Heat_cDNA_P Parameter: Timepoint (hr) Value: 8
  misc_feature: MA Experiment 20000113 PARAMETER Experiment Name: At_42deg_Heat_cDNA_P Parameter: Tissue Value: Aerial
  misc_feature: MA Experiment ID: 20000117 Result: Down-regulated in Transcription
  misc_feature: MA Experiment 20000117 PARAMETER Experiment Name: At_100uM_ABA_Mutants_cDNA_P Parameter: Plant Line Value: Columbia
  misc_feature: MA Experiment 20000117 PARAMETER Experiment Name: At_100uM_ABA_Mutants_cDNA_P Parameter: Timepoint (hr) Value: 6
  misc_feature: MA Experiment 20000117 PARAMETER Experiment Name: At_100uM_ABA_Mutants_cDNA_P Parameter: Tissue Value: Aerial
  misc_feature: MA Experiment 20000117 PARAMETER Experiment Name: At_100uM_ABA_Mutants_cDNA_P Parameter: Treatment Value: 100uM ABA vs. No Treatment
  misc_feature: MA Experiment ID: 20000169 Result: Down-regulated in Transcription
  misc_feature: MA Experiment 20000169 PARAMETER Experiment Name: At_100uM_ABA_P Parameter: Age (day) Value: 14
  misc_feature: MA Experiment 20000169 PARAMETER Experiment Name: At_100uM_ABA_P Parameter: Organism Value: A. thaliana
  misc_feature: MA Experiment 20000169 PARAMETER Experiment Name: At_100uM_ABA_P Parameter: Plant Line Value: WS
  misc_feature: MA Experiment 20000169 PARAMETER Experiment Name: At_100uM_ABA_P Parameter: Timepoint (hr) Value: 6
  misc_feature: MA Experiment 20000169 PARAMETER Experiment Name: At_100uM_ABA_P Parameter: Tissue Value: Aerial
  misc_feature: MA Experiment 20000169 PARAMETER Experiment Name: At_100uM_ABA_P Parameter: Treatment Value: 100uM ABA vs. No Treatment
  misc_feature: MA Experiment ID: 20000180 Result: Up-regulated in Transcription
  misc_feature: MA Experiment 20000180 PARAMETER Experiment Name: At_Germinating_Seeds_P Parameter: Age (hr) Value: 24 vs. 0
  misc_feature: MA Experiment 20000180 PARAMETER Experiment Name: At_Germinating_Seeds_P Parameter: Tissue Value: Germinating Seeds
  misc_feature: MA Experiment ID: 20000182 Result: Down-regulated in Transcription
  misc_feature: MA Experiment 20000182 PARAMETER Experiment Name: At_2mM_SA_P Parameter: Age (day) Value: 14
  misc_feature: MA Experiment 20000182 PARAMETER Experiment Name: At_2mM_SA_P Parameter: Organism Value: A. thaliana
  misc_feature: MA Experiment 20000182 PARAMETER Experiment Name: At_2mM_SA_P Parameter: Plant Line Value: WS
  misc_feature: MA Experiment 20000182 PARAMETER Experiment Name: At_2mM_SA_P Parameter: Timepoint (hr) Value: 6
  misc_feature: MA Experiment 20000182 PARAMETER Experiment Name: At_2mM_SA_P Parameter: Tissue Value: Aerial
  misc_feature: MA Experiment 20000182 PARAMETER Experiment Name: At_2mM_SA_P Parameter: Treatment Value: 2mM SA vs. No Treatment
  misc_feature: MA Experiment ID: 20000184 Result: Up-regulated in Transcription
  misc_feature: MA Experiment 20000184 PARAMETER Experiment Name: At_Shoots__P Parameter: Age (day) Value: 7
  misc_feature: MA Experiment 20000184 PARAMETER Experiment Name: At_Shoots__P Parameter: Tissue Value: Shoots vs. Whole Plant
  misc_feature: MA Experiment ID: 20000185 Result: Down-regulated in Transcription
  misc_feature: MA Experiment 20000185 PARAMETER Experiment Name: At_Roots__P Parameter: Age (day) Value: 7 vs. 21
  misc_feature: MA Experiment 20000185 PARAMETER Experiment Name: At_Roots__P Parameter: Organism Value: A. thaliana
  misc_feature: MA Experiment 20000185 PARAMETER Experiment Name: At_Roots__P Parameter: Tissue Value: Roots vs. Whole Plant
  misc_feature: MA Experiment ID: 20000214 Result: Up-regulated in Transcription
  misc_feature: MA Experiment 20000214 PARAMETER Experiment Name: At_4deg_Cold_P Parameter: Timepoint (hr) Value: 6
  misc_feature: MA Experiment ID: 20000234 Result: Up-regulated in Transcription
  misc_feature: MA Experiment 20000234 PARAMETER Experiment Name: At_Siliques_P Parameter: Age (day) Value: 21
  misc_feature: MA Experiment 20000234 PARAMETER Experiment Name: At_Siliques_P Parameter: Organism Value: A. thaliana
  misc_feature: MA Experiment 20000234 PARAMETER Experiment Name: At_Siliques_P Parameter: Plant Line Value: WS
  misc_feature: MA Experiment 20000234 PARAMETER Experiment Name: At_Siliques_P Parameter: Tissue Value: Less Than 5mm Siliques vs. Whole Plant
  misc_feature: MA Experiment ID: 20000267 Result: Down-regulated in Transcription
  misc_feature: MA Experiment 20000267 PARAMETER Experiment Name: At_Drought_P Parameter: Age (day) Value: 7
  misc_feature: MA Experiment 20000267 PARAMETER Experiment Name: At_Drought_P Parameter: Organism Value: A. thaliana
  misc_feature: MA Experiment 20000267 PARAMETER Experiment Name: At_Drought_P Parameter: Plant Line Value: WS
  misc_feature: MA Experiment 20000267 PARAMETER Experiment Name: At_Drought_P Parameter: Timepoint (hr) Value: 6
  misc_feature: MA Experiment 20000267 PARAMETER Experiment Name: At_Drought_P Parameter: Tissue Value: Whole Plant
  misc_feature: MA Experiment 20000267 PARAMETER Experiment Name: At_Drought_P Parameter: Treatment Value: Drought vs. No Drought
  misc_feature: MA Experiment ID: 20000268 Result: Down-regulated in Transcription
  misc_feature: MA Experiment 20000268 PARAMETER Experiment Name: At_100mM_NaCl__P Parameter: Age (day) Value: 14
  misc_feature: MA Experiment 20000268 PARAMETER Experiment Name: At_100mM_NaCl__P Parameter: Organism Value: A. thaliana
  misc_feature: MA Experiment 20000268 PARAMETER Experiment Name: At_100mM_NaCl__P Parameter: Plant Line Value: WS
  misc_feature: MA Experiment 20000268 PARAMETER Experiment Name: At_100mM_NaCl__P Parameter: Timepoint (hr) Value: 6
  misc_feature: MA Experiment 20000268 PARAMETER Experiment Name: At_100mM_NaCl__P Parameter: Tissue Value: Whole Plant
  misc_feature: MA Experiment 20000268 PARAMETER Experiment Name: At_100mM_NaCl__P Parameter: Treatment Value: 100mM NaCl vs. No Treatment
  misc_feature: MA Experiment ID: 20000286 Result: Up-regulated in Transcription
  misc_feature: MA Experiment 20000286 PARAMETER Experiment Name: At_Open_Flower_P Parameter: Age (day) Value: 21
  misc_feature: MA Experiment 20000286 PARAMETER Experiment Name: At_Open_Flower_P Parameter: Plant Line Value: WS
  misc_feature: MA Experiment 20000286 PARAMETER Experiment Name: At_Open_Flower_P Parameter: Tissue Value: Half Open vs. Whole Plant
  misc_feature: MA Experiment ID: 20000436 Result: Down-regulated in Transcription
  misc_feature: MA Experiment 20000436 PARAMETER Experiment Name: At_Drought_P Parameter: Age (day) Value: 7
  misc_feature: MA Experiment 20000436 PARAMETER Experiment Name: At_Drought_P Parameter: Organism Value: A. thaliana
  misc_feature: MA Experiment 20000436 PARAMETER Experiment Name: At_Drought_P Parameter: Plant Line Value: WS
  misc_feature: MA Experiment 20000436 PARAMETER Experiment Name: At_Drought_P Parameter: Timepoint (hr) Value: 12
  misc_feature: MA Experiment 20000436 PARAMETER Experiment Name: At_Drought_P Parameter: Tissue Value: Whole Plant
  misc_feature: MA Experiment 20000436 PARAMETER Experiment Name: At_Drought_P Parameter: Treatment Value: Drought vs. No Drought
  misc_feature: MA Experiment ID: 20000438 Result: Up-regulated in Transcription
  misc_feature: MA Experiment 20000438 PARAMETER Experiment Name: At_Shoots__P Parameter: Age (day) Value: 14
  misc_feature: MA Experiment 20000438 PARAMETER Experiment Name: At_Shoots__P Parameter: Tissue Value: Shoots vs. Whole Plant
  misc_feature: MA Experiment ID: 20000439 Result: Down-regulated in Transcription
  misc_feature: MA Experiment 20000439 PARAMETER Experiment Name: At_Roots__P Parameter: Age (day) Value: 14 vs. 21
  misc_feature: MA Experiment 20000439 PARAMETER Experiment Name: At_Roots__P Parameter: Organism Value: A. thaliana
  misc_feature: MA Experiment 20000439 PARAMETER Experiment Name: At_Roots__P Parameter: Tissue Value: Roots vs. Whole Plant
  misc_feature: MA Experiment ID: 20000451 Result: Up-regulated in Transcription
  misc_feature: MA Experiment 20000451 PARAMETER Experiment Name: At_CS6879_Shoots-Roots_P Parameter: Age (day) Value: 14
  misc_feature: MA Experiment 20000451 PARAMETER Experiment Name: At_CS6879_Shoots-Roots_P Parameter: Organism Value: A. thaliana
  misc_feature: MA Experiment 20000451 PARAMETER Experiment Name: At_CS6879_Shoots-Roots_P Parameter: Plant Line Value: CS6879 vs. WS
  misc_feature: MA Experiment 20000451 PARAMETER Experiment Name: At_CS6879_Shoots-Roots_P Parameter: Tissue Value: Roots
  misc_feature: MA Experiment ID: 20001247 Result: Up-regulated in Transcription
  misc_feature: MA Experiment 20001247 PARAMETER Experiment Name: At_Far-red-induction_P Parameter: Age (day) Value: 7
  misc_feature: MA Experiment 20001247 PARAMETER Experiment Name: At_Far-red-induction_P Parameter: Light Value: Far-red vs. White
  misc_feature: MA Experiment 20001247 PARAMETER Experiment Name: At_Far-red-induction_P Parameter: Organism Value: A. thaliana
  misc_feature: MA Experiment 20001247 PARAMETER Experiment Name: At_Far-red-induction_P Parameter: Plant Line Value: Columbia
  misc_feature: MA Experiment 20001247 PARAMETER Experiment Name: At_Far-red-induction_P Parameter: Timepoint (hr) Value: 1
  misc_feature: MA Experiment 20001247 PARAMETER Experiment Name: At_Far-red-induction_P Parameter: Tissue Value: Whole Plant
  misc_feature: MA Experiment ID: 20001554 Result: Down-regulated in Transcription
  misc_feature: MA Experiment 20001554 PARAMETER Experiment Name: At_Drought_Soil_Dry_P Parameter: Age (day) Value: 21
  misc_feature: MA Experiment 20001554 PARAMETER Experiment Name: At_Drought_Soil_Dry_P Parameter: Organism Value: A. thaliana
  misc_feature: MA Experiment 20001554 PARAMETER Experiment Name: At_Drought_Soil_Dry_P Parameter: Plant Line Value: WS
  misc_feature: MA Experiment 20001554 PARAMETER Experiment Name: At_Drought_Soil_Dry_P Parameter: Post Timepoint (hr) Value: None
  misc_feature: MA Experiment 20001554 PARAMETER Experiment Name: At_Drought_Soil_Dry_P Parameter: Post-Treatment Value: None
  misc_feature: MA Experiment 20001554 PARAMETER Experiment Name: At_Drought_Soil_Dry_P Parameter: Timepoint (day) Value: 7
  misc_feature: MA Experiment 20001554 PARAMETER Experiment Name: At_Drought_Soil_Dry_P Parameter: Treatment Value: Drought vs. No Drought
  misc_feature: MA Experiment ID: 20001555 Result: Down-regulated in Transcription
  misc_feature: MA Experiment 20001555 PARAMETER Experiment Name: At_Drought_Soil_Dry_P Parameter: Age (day) Value: 24
  misc_feature: MA Experiment 20001555 PARAMETER Experiment Name: At_Drought_Soil_Dry_P Parameter: Organism Value: A. thaliana
  misc_feature: MA Experiment 20001555 PARAMETER Experiment Name: At_Drought_Soil_Dry_P Parameter: Plant Line Value: WS
  misc_feature: MA Experiment 20001555 PARAMETER Experiment Name: At_Drought_Soil_Dry_P Parameter: Post Timepoint (hr) Value: None
  misc_feature: MA Experiment 20001555 PARAMETER Experiment Name: At_Drought_Soil_Dry_P Parameter: Post-Treatment Value: None
  misc_feature: MA Experiment 20001555 PARAMETER Experiment Name: At_Drought_Soil_Dry_P Parameter: Timepoint (day) Value: 10
  misc_feature: MA Experiment 20001555 PARAMETER Experiment Name: At_Drought_Soil_Dry_P Parameter: Treatment Value: Drought vs. No Drought
  misc_feature: MA Experiment ID: 20001556 Result: Down-regulated in Transcription
  misc_feature: MA Experiment 20001556 PARAMETER Experiment Name: At_Drought_Soil_Dry_P Parameter: Age (day) Value: 26
  misc_feature: MA Experiment 20001556 PARAMETER Experiment Name: At_Drought_Soil_Dry_P Parameter: Organism Value: A. thaliana
  misc_feature: MA Experiment 20001556 PARAMETER Experiment Name: At_Drought_Soil_Dry_P Parameter: Plant Line Value: WS
  misc_feature: MA Experiment 20001556 PARAMETER Experiment Name: At_Drought_Soil_Dry_P Parameter: Post Timepoint (hr) Value: None
  misc_feature: MA Experiment 20001556 PARAMETER Experiment Name: At_Drought_Soil_Dry_P Parameter: Post-Treatment Value: None
  misc_feature: MA Experiment 20001556 PARAMETER Experiment Name: At_Drought_Soil_Dry_P Parameter: Timepoint (day) Value: 12
  misc_feature: MA Experiment 20001556 PARAMETER Experiment Name: At_Drought_Soil_Dry_P Parameter: Treatment Value: Drought vs. No Drought
  misc_feature: MA Experiment ID: 20001557 Result: Up-regulated in Transcription
  misc_feature: MA Experiment 20001557 PARAMETER Experiment Name: At_Drought_Soil_Dry_P Parameter: Age (day) Value: 27
  misc_feature: MA Experiment 20001557 PARAMETER Experiment Name: At_Drought_Soil_Dry_P Parameter: Organism Value: A. thaliana
  misc_feature: MA Experiment 20001557 PARAMETER Experiment Name: At_Drought_Soil_Dry_P Parameter: Plant Line Value: WS
  misc_feature: MA Experiment 20001557 PARAMETER Experiment Name: At_Drought_Soil_Dry_P Parameter: Post Timepoint (hr) Value: 3
  misc_feature: MA Experiment 20001557 PARAMETER Experiment Name: At_Drought_Soil_Dry_P Parameter: Post-Treatment Value: Re-Water vs. No Drought
  misc_feature: MA Experiment 20001557 PARAMETER Experiment Name: At_Drought_Soil_Dry_P Parameter: Timepoint (day) Value: 13
  misc_feature: MA Experiment 20001557 PARAMETER Experiment Name: At_Drought_Soil_Dry_P Parameter: Treatment Value: Drought vs. No Drought
  misc_feature: MA Experiment ID: 20001558 Result: Up-regulated in Transcription
  misc_feature: MA Experiment 20001558 PARAMETER Experiment Name: At_Drought_Soil_Dry_P Parameter: Age (day) Value: 27
  misc_feature: MA Experiment 20001558 PARAMETER Experiment Name: At_Drought_Soil_Dry_P Parameter: Organism Value: A. thaliana
  misc_feature: MA Experiment 20001558 PARAMETER Experiment Name: At_Drought_Soil_Dry_P Parameter: Plant Line Value: WS
  misc_feature: MA Experiment 20001558 PARAMETER Experiment Name: At_Drought_Soil_Dry_P Parameter: Post Timepoint (hr) Value: 6
  misc_feature: MA Experiment 20001558 PARAMETER Experiment Name: At_Drought_Soil_Dry_P Parameter: Post-Treatment Value: Re-Water vs. No Drought
  misc_feature: MA Experiment 20001558 PARAMETER Experiment Name: At_Drought_Soil_Dry_P Parameter: Timepoint (day) Value: 13
  misc_feature: MA Experiment 20001558 PARAMETER Experiment Name: At_Drought_Soil_Dry_P Parameter: Treatment Value: Drought vs. No Drought
  misc_feature: MA Experiment ID: 20001560 Result: Up-regulated in Transcription
  misc_feature: MA Experiment 20001560 PARAMETER Experiment Name: At_Drought_Soil_Dry_P Parameter: Age (day) Value: 28
  misc_feature: MA Experiment 20001560 PARAMETER Experiment Name: At_Drought_Soil_Dry_P Parameter: Organism Value: A. thaliana
  misc_feature: MA Experiment 20001560 PARAMETER Experiment Name: At_Drought_Soil_Dry_P Parameter: Plant Line Value: WS
  misc_feature: MA Experiment 20001560 PARAMETER Experiment Name: At_Drought_Soil_Dry_P Parameter: Post Timepoint (hr) Value: None
  misc_feature: MA Experiment 20001560 PARAMETER Experiment Name: At_Drought_Soil_Dry_P Parameter: Post-Treatment Value: None
  misc_feature: MA Experiment 20001560 PARAMETER Experiment Name: At_Drought_Soil_Dry_P Parameter: Timepoint (day) Value: 14
  misc_feature: MA Experiment 20001560 PARAMETER Experiment Name: At_Drought_Soil_Dry_P Parameter: Treatment Value: Drought vs. No Drought
  misc_feature: MA Experiment ID: 20001904 Result: Down-regulated in Transcription
  misc_feature: MA Experiment 20001904 PARAMETER Experiment Name: At_Drought_Reproduction_P Parameter: Age (day) Value: 37
  misc_feature: MA Experiment 20001904 PARAMETER Experiment Name: At_Drought_Reproduction_P Parameter: Organism Value: A. thaliana
  misc_feature: MA Experiment 20001904 PARAMETER Experiment Name: At_Drought_Reproduction_P Parameter: Plant Line Value: WS
  misc_feature: MA Experiment 20001904 PARAMETER Experiment Name: At_Drought_Reproduction_P Parameter: Timepoint (day) Value: 7
  misc_feature: MA Experiment 20001904 PARAMETER Experiment Name: At_Drought_Reproduction_P Parameter: Tissue Value: Rosettes
  misc_feature: MA Experiment 20001904 PARAMETER Experiment Name: At_Drought_Reproduction_P Parameter: Treatment Value: Drought vs. No Drought
  misc_feature: MA Experiment ID: 20001906 Result: Down-regulated in Transcription
  misc_feature: MA Experiment 20001906 PARAMETER Experiment Name: At_Drought_Reproduction_P Parameter: Age (day) Value: 35
  misc_feature: MA Experiment 20001906 PARAMETER Experiment Name: At_Drought_Reproduction_P Parameter: Organism Value: A. thaliana
  misc_feature: MA Experiment 20001906 PARAMETER Experiment Name: At_Drought_Reproduction_P Parameter: Plant Line Value: WS
  misc_feature: MA Experiment 20001906 PARAMETER Experiment Name: At_Drought_Reproduction_P Parameter: Timepoint (day) Value: 5
  misc_feature: MA Experiment 20001906 PARAMETER Experiment Name: At_Drought_Reproduction_P Parameter: Tissue Value: Siliques
  misc_feature: MA Experiment 20001906 PARAMETER Experiment Name: At_Drought_Reproduction_P Parameter: Treatment Value: Drought vs. No Drought
  misc_feature: MA Experiment ID: 20001907 Result: Down-regulated in Transcription
  misc_feature: MA Experiment 20001907 PARAMETER Experiment Name: At_Drought_Reproduction_P Parameter: Age (day) Value: 37
  misc_feature: MA Experiment 20001907 PARAMETER Experiment Name: At_Drought_Reproduction_P Parameter: Organism Value: A. thaliana
  misc_feature: MA Experiment 20001907 PARAMETER Experiment Name: At_Drought_Reproduction_P Parameter: Plant Line Value: WS
  misc_feature: MA Experiment 20001907 PARAMETER Experiment Name: At_Drought_Reproduction_P Parameter: Timepoint (day) Value: 7
  misc_feature: MA Experiment 20001907 PARAMETER Experiment Name: At_Drought_Reproduction_P Parameter: Tissue Value: Siliques
  misc_feature: MA Experiment 20001907 PARAMETER Experiment Name: At_Drought_Reproduction_P Parameter: Treatment Value: Drought vs. No Drought
  misc_feature: MA Experiment ID: 20001908 Result: Down-regulated in Transcription
  misc_feature: MA Experiment 20001908 PARAMETER Experiment Name: At_Drought_Reproduction_P Parameter: Age (day) Value: 40
  misc_feature: MA Experiment 20001908 PARAMETER Experiment Name: At_Drought_Reproduction_P Parameter: Organism Value: A. thaliana
  misc_feature: MA Experiment 20001908 PARAMETER Experiment Name: At_Drought_Reproduction_P Parameter: Plant Line Value: WS
  misc_feature: MA Experiment 20001908 PARAMETER Experiment Name: At_Drought_Reproduction_P Parameter: Timepoint (day) Value: 10
  misc_feature: MA Experiment 20001908 PARAMETER Experiment Name: At_Drought_Reproduction_P Parameter: Tissue Value: Siliques
  misc_feature: MA Experiment 20001908 PARAMETER Experiment Name: At_Drought_Reproduction_P Parameter: Treatment Value: Drought vs. No Drought
  misc_feature: MA Experiment ID: 20001911 Result: Down-regulated in Transcription
  misc_feature: MA Experiment 20001911 PARAMETER Experiment Name: At_Drought_Reproduction_P Parameter: Age (day) Value: 40
  misc_feature: MA Experiment 20001911 PARAMETER Experiment Name: At_Drought_Reproduction_P Parameter: Organism Value: A. thaliana
  misc_feature: MA Experiment 20001911 PARAMETER Experiment Name: At_Drought_Reproduction_P Parameter: Plant Line Value: WS
  misc_feature: MA Experiment 20001911 PARAMETER Experiment Name: At_Drought_Reproduction_P Parameter: Timepoint (day) Value: 10
  misc_feature: MA Experiment 20001911 PARAMETER Experiment Name: At_Drought_Reproduction_P Parameter: Tissue Value: Flowers
  misc_feature: MA Experiment 20001911 PARAMETER Experiment Name: At_Drought_Reproduction_P Parameter: Treatment Value: Drought vs. No Drought
atccactctactcaacatggactcctccaaactctcatctctctctctttgcctcttcctcatttgcattatctatctcccccaacattctctcgcatgcggctcttgcaacccacggaagggcggaaagcactcccctaaagcccctaagctaccagttcctccggtgaccgtccctaagctaccagttcctccggtgaccgtccccaagctacccgttcctccagtgacagtccctaagctacccgttcccccggtaactgtacctaagctacccgttcctccagtgaccgtccctaagctaccccttcctccgatttcagggctacccatacctccagtggtaggtcccaatctgccattgccacctttgccaattgtaggtcctattcttccaccgggaacaaccccaccagccacaggagggaaggactgtcctccaccgccagggagcgtaaagccaccatcagggggcgggaaggcgacatgtccaatagacacgctgaagttaggtgcttgcgtcgacttgttgggaggtttagtaaagatagggcttggggatccagcagttaacaaatgttgtccgttacttaaaggcctcgttgaaatcgaagccgcggcttgtctctgcactaccctcaagctcaaagctcttgacctcaatctttatgtccctgttgctcttcagcttctccttacctgtggcaaaaatccacctccgggctacacttgttccatatgataaactcactccacttataaaggatgctttggagaaaaaagtgagaagagaatggcagagctccaatctttcctgtcttggtttaccaaatacatcatatcaaatcctatccctttgattctttcctctatcgttcccttatgcttgtatcattaattaatgtgtgctttttagattaatgattcttctcttgtattaaagtatgatttgaaatcctttttttttctcmaaaaaaaaaaaaaaaaaaaaaaaaaaaaaaaaaaaaaaycgaaaaaaaaaaaaaaaaaagcttatcgataccgt

SEQ ID NO: 44218 - protein, 246 aa, Arabidopsis thaliana
  peptide (1)..(246): Ceres Seq. ID no. 15218685
  misc_feature (163)..(244): Pfam Name: Protease inhibitor/seed storage/LTP family Pfam Description: Protease inhibitor/seed storage/LTP family
  misc_feature (46)..(244): Homolog of NCBI NO: 7446483 NR Description: probable cell wall protein - garden pea
  misc_feature (45)..(244): Homolog of NCBI NO: 7446482 NR Description: probable cell wall-plasma membrane linker protein
  misc_feature (31)..(246): Homolog of NCBI NO: 17154773 NR Description: extensin-like protein [Cucumis sativus]
  misc_feature (6)..(164): Homolog of NCBI NO: 24417264 NR Description: unknown [Arabidopsis thaliana]
  misc_feature (6)..(220): Homolog of NCBI NO: 18396941 NR Description: protease inhibitor/seed storage/lipid transfer
  misc_feature (49)..(174): Homolog of NCBI NO: 24417264 NR Description: unknown [Arabidopsis thaliana]
  misc_feature (49)..(246): Homolog of NCBI NO: 18396941 NR Description: protease inhibitor/seed storage/lipid transfer
STLLNMDSSKLSSLSLCLFLICIIYLPQHSLACGSCNPRKGGKHSPKAPKLPVPPVTVPKLPVPPVTVPKLPVPPVTVPKLPVPPVTVPKLPVPPVTVPKLPLPPISGLPIPPVVGPNLPLPPLPIVGPILPPGTTPPATGGKDCPPPPGSVKPPSGGGKATCPIDTLKLGACVDLLGGLVKIGLGDPAVNKCCPLLKGLVEIEAAACLCTTLKLKALDLNLYVPVALQLLLTCGKNPPPGYTCSI

SEQ ID NO: 44219 - protein, 241 aa, Arabidopsis thaliana
  peptide (1)..(241): Ceres Seq. ID no. 15218686
  misc_feature (158)..(239): Pfam Name: Protease inhibitor/seed storage/LTP family Pfam Description: Protease inhibitor/seed storage/LTP family
  misc_feature (41)..(239): Homolog of NCBI NO: 7446483 NR Description: probable cell wall protein - garden pea
  misc_feature (40)..(239): Homolog of NCBI NO: 7446482 NR Description: probable cell wall-plasma membrane linker protein
  misc_feature (26)..(241): Homolog of NCBI NO: 17154773 NR Description: extensin-like protein [Cucumis sativus]
  misc_feature (1)..(159): Homolog of NCBI NO: 24417264 NR Description: unknown [Arabidopsis thaliana]
  misc_feature (1)..(215): Homolog of NCBI NO: 18396941 NR Description: protease inhibitor/seed storage/lipid transfer
  misc_feature (44)..(169): Homolog of NCBI NO: 24417264 NR Description: unknown [Arabidopsis thaliana]
  misc_feature (44)..(241): Homolog of NCBI NO: 18396941 NR Description: protease inhibitor/seed storage/lipid transfer
MDSSKLSSLSLCLFLICIIYLPQHSLACGSCNPRKGGKHSPKAPKLPVPPVTVPKLPVPPVTVPKLPVPPVTVPKLPVPPVTVPKLPVPPVTVPKLPLPPISGLPIPPVVGPNLPLPPLPIVGPILPPGTTPPATGGKDCPPPPGSVKPPSGGGKATCPIDTLKLGACVDLLGGLVKIGLGDPAVNKCCPLLKGLVEIEAAACLCTTLKLKALDLNLYVPVALQLLLTCGKNPPPGYTCSI

SEQ ID NO: 44220 - DNA, 1950 bp, Arabidopsis thaliana
  misc_feature (1)..(1950): Ceres Seq. ID no. 12489291
  misc_feature: MA Experiment ID: 20000184 Result: Down-regulated in Transcription
  misc_feature: MA Experiment 20000184 PARAMETER Experiment Name: At_Shoots__P Parameter: Age (day) Value: 7
  misc_feature: MA Experiment 20000184 PARAMETER Experiment Name: At_Shoots__P Parameter: Tissue Value: Shoots vs. Whole Plant
  misc_feature: MA Experiment ID: 20000234 Result: Up-regulated in Transcription
  misc_feature: MA Experiment 20000234 PARAMETER Experiment Name: At_Siliques_P Parameter: Age (day) Value: 21
  misc_feature: MA Experiment 20000234 PARAMETER Experiment Name: At_Siliques_P Parameter: Organism Value: A. thaliana
  misc_feature: MA Experiment 20000234 PARAMETER Experiment Name: At_Siliques_P Parameter: Plant Line Value: WS
  misc_feature: MA Experiment 20000234 PARAMETER Experiment Name: At_Siliques_P Parameter: Tissue Value: Less Than 5mm Siliques vs. Whole Plant
  misc_feature: MA Experiment ID: 20000264 Result: Up-regulated in Transcription
  misc_feature: MA Experiment 20000264 PARAMETER Experiment Name: At_Open_Flower_P Parameter: Age (day) Value: 21
  misc_feature: MA Experiment 20000264 PARAMETER Experiment Name: At_Open_Flower_P Parameter: Plant Line Value: WS
  misc_feature: MA Experiment 20000264 PARAMETER Experiment Name: At_Open_Flower_P Parameter: Tissue Value: Open Flower vs. Whole Plant
  misc_feature: MA Experiment ID: 20000265 Result: Up-regulated in Transcription
  misc_feature: MA Experiment 20000265 PARAMETER Experiment Name: At_Open_Flower_P Parameter: Age (day) Value: 21
  misc_feature: MA Experiment 20000265 PARAMETER Experiment Name: At_Open_Flower_P Parameter: Plant Line Value: WS
  misc_feature: MA Experiment 20000265 PARAMETER Experiment Name: At_Open_Flower_P Parameter: Tissue Value: Closed Flower vs. Whole Plant
  misc_feature: MA Experiment ID: 20000286 Result: Up-regulated in Transcription
  misc_feature: MA Experiment 20000286 PARAMETER Experiment Name: At_Open_Flower_P Parameter: Age (day) Value: 21
  misc_feature: MA Experiment 20000286 PARAMETER Experiment Name: At_Open_Flower_P Parameter: Plant Line Value: WS
  misc_feature: MA Experiment 20000286 PARAMETER Experiment Name: At_Open_Flower_P Parameter: Tissue Value: Half Open vs. Whole Plant
  misc_feature: MA Experiment ID: 20000794 Result: Up-regulated in Transcription
  misc_feature: MA Experiment 20000794 PARAMETER Experiment Name: At_Petals_P Parameter: Age (day) Value: 23-25 days
  misc_feature: MA Experiment 20000794 PARAMETER Experiment Name: At_Petals_P Parameter: Plant Line Value: WS
  misc_feature: MA Experiment 20000794 PARAMETER Experiment Name: At_Petals_P Parameter: Tissue Value: Petals vs. Whole plant
  misc_feature: MA Experiment ID: 20001761 Result: Down-regulated in Transcription
  misc_feature: MA Experiment 20001761 PARAMETER Experiment Name: At_50mM_NH4NO3_L-to-H_P Parameter: Timepoint (hr) Value: 4
  misc_feature: MA Experiment 20001761 PARAMETER Experiment Name: At_50mM_NH4NO3_L-to-H_P Parameter: Tissue Value: Siliques
  misc_feature: MA Experiment 20001761 PARAMETER Experiment Name: At_50mM_NH4NO3_L-to-H_P Parameter: Treatment Value: 50mM NH4NO3 vs 100mM Mannitol
  misc_feature: MA Experiment ID: 20001768 Result: Up-regulated in Transcription
  misc_feature: MA Experiment 20001768 PARAMETER Experiment Name: At_Far-red-enriched-adult_P Parameter: Age (day) Value: 28
  misc_feature: MA Experiment 20001768 PARAMETER Experiment Name: At_Far-red-enriched-adult_P Parameter: Light Value: Far-red enriched vs. White
  misc_feature: MA Experiment 20001768 PARAMETER Experiment Name: At_Far-red-enriched-adult_P Parameter: Organism Value: A. thaliana
  misc_feature: MA Experiment 20001768 PARAMETER Experiment Name: At_Far-red-enriched-adult_P Parameter: Plant Line Value: Columbia
  misc_feature: MA Experiment 20001768 PARAMETER Experiment Name: At_Far-red-enriched-adult_P Parameter: Timepoint (hr) Value: 1
  misc_feature: MA Experiment 20001768 PARAMETER Experiment Name: At_Far-red-enriched-adult_P Parameter: Tissue Value: Aerial
  misc_feature: MA Experiment ID: 20001774 Result: Down-regulated in Transcription
  misc_feature: MA Experiment 20001774 PARAMETER Experiment Name: At_Far-red-enriched-adult_P Parameter: Age (day) Value: 31
  misc_feature: MA Experiment 20001774 PARAMETER Experiment Name: At_Far-red-enriched-adult_P Parameter: Light Value: Far-red enriched vs. White
  misc_feature: MA Experiment 20001774 PARAMETER Experiment Name: At_Far-red-enriched-adult_P Parameter: Organism Value: A. thaliana
  misc_feature: MA Experiment 20001774 PARAMETER Experiment Name: At_Far-red-enriched-adult_P Parameter: Plant Line Value: Columbia
  misc_feature: MA Experiment 20001774 PARAMETER Experiment Name: At_Far-red-enriched-adult_P Parameter: Timepoint (hr) Value: 72
  misc_feature: MA Experiment 20001774 PARAMETER Experiment Name: At_Far-red-enriched-adult_P Parameter: Tissue Value: Aerial
  misc_feature: MA Experiment ID: 20001905 Result: Up-regulated in Transcription
  misc_feature: MA Experiment 20001905 PARAMETER Experiment Name: At_Drought_Reproduction_P Parameter: Age (day) Value: 40
  misc_feature: MA Experiment 20001905 PARAMETER Experiment Name: At_Drought_Reproduction_P Parameter: Organism Value: A. thaliana
  misc_feature: MA Experiment 20001905 PARAMETER Experiment Name: At_Drought_Reproduction_P Parameter: Plant Line Value: WS
  misc_feature: MA Experiment 20001905 PARAMETER Experiment Name: At_Drought_Reproduction_P Parameter: Timepoint (day) Value: 10
  misc_feature: MA Experiment 20001905 PARAMETER Experiment Name: At_Drought_Reproduction_P Parameter: Tissue Value: Rosettes
  misc_feature: MA Experiment 20001905 PARAMETER Experiment Name: At_Drought_Reproduction_P Parameter: Treatment Value: Drought vs. No Drought
  misc_feature: MA Experiment ID: 20001910 Result: Up-regulated in Transcription
  misc_feature: MA Experiment 20001910 PARAMETER Experiment Name: At_Drought_Reproduction_P Parameter: Age (day) Value: 37
  misc_feature: MA Experiment 20001910 PARAMETER Experiment Name: At_Drought_Reproduction_P Parameter: Organism Value: A. thaliana
  misc_feature: MA Experiment 20001910 PARAMETER Experiment Name: At_Drought_Reproduction_P Parameter: Plant Line Value: WS
  misc_feature: MA Experiment 20001910 PARAMETER Experiment Name: At_Drought_Reproduction_P Parameter: Timepoint (day) Value: 7
  misc_feature: MA Experiment 20001910 PARAMETER Experiment Name: At_Drought_Reproduction_P Parameter: Tissue Value: Flowers
  misc_feature: MA Experiment 20001910 PARAMETER Experiment Name: At_Drought_Reproduction_P Parameter: Treatment Value: Drought vs. No Drought
actggcccaagtcattcaacaacttggcttttatctaataaagcccctccctctccgataaaccttaaataaaaccggagggagagcaaaaaataaaaacaaaaatatacaaaaacaaaaacaaaaaatcataaaaaatgattggaaaagttgtggtctcggtggcctccatcctcttaatagttggagttgccataggagtcgttgcctacataaacaaaaatggtgatgctaatctgtctccccaaatgaaagcggtccgaggaatttgcgaggcgacttccgacaaagcctcatgtgtcaaaactctcgagccggtcaagagcgatgacccaaacaagctgatcaaggctttcatgctcgctaccagagatgctataacccaatcatcaaacttcacgggtaaaaccgaaggaaacttgggttcgggcatctcgccaaacaacaaagccgttcttgattactgcaagaaagttttcatgtacgcgcttgaggatctcagcaccattgttgaggaaatgggtgaagatcttaaccagatcgggagcaaaatcgaccagcttaaacaatggttaaccggtgtttacaattaccaaactgattgtcttgacgatatcgaagaagatgatttaagaaagactattggagagggcattgcaagctccaagattctcactagcaacgctattgacatcttccacactgtcgttagcgccatggccaagcttaacttgaaggtcgaggacttcaagaacatgacaggcggaatcttcgctccttcagacaaaggagcagctcccgtcaacaaaggaacccctcctgttgctgatgattctcccgtggccgatccagatggtcctgctcgccgtcttcttgaagacattgacgagaccggaatcccaacatgggtttcaggtgctgacaggaagctcatgactaaggctggacgtggcagtaatgacggtggtgctaggatcagagcaacctttgtggtggctaaggacggaagtggacagtttaagactgttcaacaagccgttaatgcttgtcctgagaaaaacccaggccgttgcatcatccacatcaaggctggtatctacagagagcaagtgatcatccctaagaagaagaacaacatcttcatgttcggagatggtgcaagaaagaccgtcatttcttacaacagaagtgttaaactcagccctggaaccaccacttcccttagtggcacagtccaggttgagtccgaaggattcatggcaaaatggatcggattcaagaacaccgccggtccaatgggacaccaagctgtggctatcagagtgaacggagaccgtgccgtgatcttcaactgcaggttcgacggttaccaagacaccttgtacgtcaacaatggtcgtcagttctacagaaacattgtcgtgtcaggaacagtcgacttcatcttcggcaaatccgcaaccgtgatccaaaactcactcattgttgtccgtaaaggaaacaagggacaattcaacacggtcacagccgatggaaacgaaaagggtctagcgatgaaaatcggtatcgtcctccaaaactgtcgcatcgttcccgacaagaaactagcggcagagagattaatcgtggagtcatacttgggaaggccatggaagaaattctctaccaccgtgattatcaactccgagataggagatgtgattagaccagaaggttggaagatttgggatggggaaagtttccacaagtcatgtaggtacgttgagtacaacaaccgtggaccaggagctatcactaaccgaagagttaactgggttaagatcgccaggtctgcagctgaggtcaatgacttcactgttgctaactggttaggtcctattaactggattcaagaagccaatgttcccgtcacgcttggattataaggcgtataaatcaaatcaaatcaaa

SEQ ID NO: 44221 - protein, 595 aa, Arabidopsis thaliana
  peptide (1)..(595): Ceres Seq. ID no. 12489292
  misc_feature (283)..(581): Pfam Name: Pectinesterase Pfam Description: Pectinesterase
  misc_feature (283)..(581): Pfam Name: Pectinesterase Pfam Description: Pectinesterase
  misc_feature (39)..(201): Homolog of NCBI NO: 15234112 NR Description: pectinesterase family; protein id: At4g33230.1
  misc_feature (238)..(595): Homolog of NCBI NO: 15234112 NR Description: pectinesterase family; protein id: At4g33230.1
  misc_feature (34)..(192): Homolog of NCBI NO: 25313441 NR Description: pectinesterase (EC 3.1.1.11) [imported] - Salix
  misc_feature (249)..(595): Homolog of NCBI NO: 25313441 NR Description: pectinesterase (EC 3.1.1.11) [imported] - Salix
  misc_feature (13)..(595): Homolog of NCBI NO: 6093741 NR Description: Pectinesterase (Pectin methylesterase) (PE)
  misc_feature (39)..(201): Homolog of NCBI NO: 15234112 NR Description: pectinesterase family; protein id: At4g33230.1
  misc_feature (34)..(192): Homolog of NCBI NO: 25313441 NR Description: pectinesterase (EC 3.1.1.11) [imported] - Salix
  misc_feature (13)..(595): Homolog of NCBI NO: 6093741 NR Description: Pectinesterase (Pectin methylesterase) (PE)
  misc_feature (1)..(595): Homolog of NCBI NO: 15226482 NR Description: pectinesterase family
  misc_feature (1)..(595): Homolog of NCBI NO: 25313439 NR Description: pectinesterase (EC 3.1.1.11) precursor,
  misc_feature (2)..(595): Homolog of NCBI NO: 15228697 NR Description: pollen-specific pectin esterase, putative
  misc_feature (1)..(477): Homolog of NCBI NO: 23197964 NR Description: putative pectinesterase [Arabidopsis thaliana]
  misc_feature (2)..(595): Homolog of NCBI NO: 1172538 NR Description: Probable pectinesterase precursor (Pectin
  misc_feature (249)..(595): Homolog of NCBI NO: 25313441 NR Description: pectinesterase (EC 3.1.1.11) [imported] - Salix
  misc_feature (238)..(595): Homolog of NCBI NO: 15234112 NR Description: pectinesterase family; protein id: At4g33230.1
  misc_feature (2)..(595): Homolog of NCBI NO: 1172538 NR Description: Probable pectinesterase precursor (Pectin
  misc_feature (1)..(477): Homolog of NCBI NO: 23197964 NR Description: putative pectinesterase [Arabidopsis thaliana]
  misc_feature (2)..(595): Homolog of NCBI NO: 15228697 NR Description: pollen-specific pectin esterase, putative
  misc_feature (1)..(595): Homolog of NCBI NO: 25313439 NR Description: pectinesterase (EC 3.1.1.11) precursor,
  misc_feature (1)..(595): Homolog of NCBI NO: 15226482 NR Description: pectinesterase family
MIGKVVVSVASILLIVGVAIGVVAYINKNGDANLSPQMKAVRGICEATSDKASCVKTLEPVKSDDPNKLIKAFMLATRDAITQSSNFTGKTEGNLGSGISPNNKAVLDYCKKVFMYALEDLSTIVEEMGEDLNQIGSKIDQLKQWLTGVYNYQTDCLDDIEEDDLRKTIGEGIASSKILTSNAIDIFHTVVSAMAKLNLKVEDFKNMTGGIFAPSDKGAAPVNKGTPPVADDSPVADPDGPARRLLEDIDETGIPTWVSGADRKLMTKAGRGSNDGGARIRATFVVAKDGSGQFKTVQQAVNACPEKNPGRCIIHIKAGIYREQVIIPKKKNNIFMFGDGARKTVISYNRSVKLSPGTTTSLSGTVQVESEGFMAKWIGFKNTAGPMGHQAVAIRVNGDRAVIFNCRFDGYQDTLYVNNGRQFYRNIVVSGTVDFIFGKSATVIQNSLIVVRKGNKGQFNTVTADGNEKGLAMKIGIVLQNCRIVPDKKLAAERLIVESYLGRPWKKFSTTVIINSEIGDVIRPEGWKIWDGESFHKSCRYVEYNNRGPGAITNRRVNWVKIARSAAEVNDFTVANWLGPINWIQEANVPVTLGL

SEQ ID NO: 44222 - protein, 558 aa, Arabidopsis thaliana
  peptide (1)..(558): Ceres Seq. ID no. 12489293
  misc_feature (246)..(544): Pfam Name: Pectinesterase Pfam Description: Pectinesterase
  misc_feature (246)..(544): Pfam Name: Pectinesterase Pfam Description: Pectinesterase
  misc_feature (2)..(164): Homolog of NCBI NO: 15234112 NR Description: pectinesterase family; protein id: At4g33230.1
  misc_feature (201)..(558): Homolog of NCBI NO: 15234112 NR Description: pectinesterase family; protein id: At4g33230.1
  misc_feature (1)..(155): Homolog of NCBI NO: 25313441 NR Description: pectinesterase (EC 3.1.1.11) [imported] - Salix
  misc_feature (212)..(558): Homolog of NCBI NO: 25313441 NR Description: pectinesterase (EC 3.1.1.11) [imported] - Salix
  misc_feature (1)..(558): Homolog of NCBI NO: 6093741 NR Description: Pectinesterase (Pectin methylesterase) (PE)
  misc_feature (2)..(164): Homolog of NCBI NO: 15234112 NR Description: pectinesterase family; protein id: At4g33230.1
  misc_feature (1)..(155): Homolog of NCBI NO: 25313441 NR Description: pectinesterase (EC 3.1.1.11) [imported] - Salix
  misc_feature (1)..(558): Homolog of NCBI NO: 6093741 NR Description: Pectinesterase (Pectin methylesterase) (PE)
  misc_feature (1)..(558): Homolog of NCBI NO: 15226482 NR Description: pectinesterase family
  misc_feature (1)..(558): Homolog of NCBI NO: 25313439 NR Description: pectinesterase (EC 3.1.1.11) precursor,
  misc_feature (1)..(558): Homolog of NCBI NO: 15228697 NR Description: pollen-specific pectin esterase, putative
  misc_feature (1)..(440): Homolog of NCBI NO: 23197964 NR Description: putative pectinesterase [Arabidopsis thaliana]
  misc_feature (1)..(558): Homolog of NCBI NO: 1172538 NR Description: Probable pectinesterase precursor (Pectin
  misc_feature (212)..(558): Homolog of NCBI NO: 25313441 NR Description: pectinesterase (EC 3.1.1.11) [imported] - Salix
  misc_feature (201)..(558): Homolog of NCBI NO: 15234112 NR Description: pectinesterase family; protein id: At4g33230.1
  misc_feature (1)..(558): Homolog of NCBI NO: 1172538 NR Description: Probable pectinesterase precursor (Pectin
  misc_feature (1)..(440): Homolog of NCBI NO: 23197964 NR Description: putative pectinesterase [Arabidopsis thaliana]
  misc_feature (1)..(558): Homolog of NCBI NO: 15228697 NR Description: pollen-specific pectin esterase, putative
  misc_feature (1)..(558): Homolog of NCBI NO: 25313439 NR Description: pectinesterase (EC 3.1.1.11) precursor,
  misc_feature (1)..(558): Homolog of NCBI NO: 15226482 NR Description: pectinesterase family
MKAVRGICEATSDKASCVKTLEPVKSDDPNKLIKAFMLATRDAITQSSNFTGKTEGNLGSGISPNNKAVLDYCKKVFMYALEDLSTIVEEMGEDLNQIGSKIDQLKQWLTGVYNYQTDCLDDIEEDDLRKTIGEGIASSKILTSNAIDIFHTVVSAMAKLNLKVEDFKNMTGGIFAPSDKGAAPVNKGTPPVADDSPVADPDGPARRLLEDIDETGIPTWVSGADRKLMTKAGRGSNDGGARIRATFVVAKDGSGQFKTVQQAVNACPEKNPGRCIIHIKAGIYREQVIIPKKKNNIFMFGDGARKTVISYNRSVKLSPGTTTSLSGTVQVESEGFMAKWIGFKNTAGPMGHQAVAIRVNGDRAVIFNCRFDGYQDTLYVNNGRQFYRNIVVSGTVDFIFGKSATVIQNSLIVVRKGNKGQFNTVTADGNEKGLAMKIGIVLQNCRIVPDKKLAAERLIVESYLGRPWKKFSTTVIINSEIGDVIRPEGWKIWDGESFHKSCRYVEYNNRGPGAITNRRVNWVKIARSAAEVNDFTVANWLGPINWIQEANVPVTLGL

SEQ ID NO: 44223 - protein, 522 aa, Arabidopsis thaliana
  peptide (1)..(522): Ceres Seq. ID no. 12489294
  misc_feature (210)..(508): Pfam Name: Pectinesterase Pfam Description: Pectinesterase
  misc_feature (210)..(508): Pfam Name: Pectinesterase Pfam Description: Pectinesterase
  misc_feature (1)..(128): Homolog of NCBI NO: 15234112 NR Description: pectinesterase family; protein id: At4g33230.1
  misc_feature (165)..(522): Homolog of NCBI NO: 15234112 NR Description: pectinesterase family; protein id: At4g33230.1
  misc_feature (1)..(119): Homolog of NCBI NO: 25313441 NR Description: pectinesterase (EC 3.1.1.11) [imported] - Salix
  misc_feature (176)..(522): Homolog of NCBI NO: 25313441 NR Description: pectinesterase (EC 3.1.1.11) [imported] - Salix
  misc_feature (1)..(522): Homolog of NCBI NO: 6093741 NR Description: Pectinesterase (Pectin methylesterase) (PE)
  misc_feature (1)..(128): Homolog of NCBI NO: 15234112 NR Description: pectinesterase family; protein id: At4g33230.1
  misc_feature (1)..(119): Homolog of NCBI NO: 25313441 NR Description: pectinesterase (EC 3.1.1.11) [imported] - Salix
  misc_feature (1)..(522): Homolog of NCBI NO: 6093741 NR Description: Pectinesterase (Pectin methylesterase) (PE)
  misc_feature (1)..(522): Homolog of NCBI NO: 15226482 NR Description: pectinesterase family
  misc_feature (1)..(522): Homolog of NCBI NO: 25313439 NR Description: pectinesterase (EC 3.1.1.11) precursor,
  misc_feature (1)..(522): Homolog of NCBI NO: 15228697 NR Description: pollen-specific pectin esterase, putative
  misc_feature (1)..(404): Homolog of NCBI NO: 23197964 NR Description: putative pectinesterase [Arabidopsis thaliana]
  misc_feature (1)..(522): Homolog of NCBI NO: 1172538 NR Description: Probable pectinesterase precursor (Pectin
  misc_feature (176)..(522): Homolog of NCBI NO: 25313441 NR Description: pectinesterase (EC 3.1.1.11) [imported] - Salix
  misc_feature (165)..(522): Homolog of NCBI NO: 15234112 NR Description: pectinesterase family; protein id: At4g33230.1
  misc_feature (1)..(522): Homolog of NCBI NO: 1172538 NR Description: Probable pectinesterase precursor (Pectin
  misc_feature (1)..(404): Homolog of NCBI NO: 23197964 NR Description: putative pectinesterase [Arabidopsis thaliana]
  misc_feature (1)..(522): Homolog of NCBI NO: 15228697 NR Description: pollen-specific pectin esterase, putative
  misc_feature (1)..(522): Homolog of NCBI NO: 25313439 NR Description: pectinesterase (EC 3.1.1.11) precursor,
  misc_feature (1)..(522): Homolog of NCBI NO: 15226482 NR Description: pectinesterase family
MLATRDAITQSSNFTGKTEGNLGSGISPNNKAVLDYCKKVFMYALEDLSTIVEEMGEDLNQIGSKIDQLKQWLTGVYNYQTDCLDDIEEDDLRKTIGEGIASSKILTSNAIDIFHTVVSAMAKLNLKVEDFKNMTGGIFAPSDKGAAPVNKGTPPVADDSPVADPDGPARRLLEDIDETGIPTWVSGADRKLMTKAGRGSNDGGARIRATFVVAKDGSGQFKTVQQAVNACPEKNPGRCIIHIKAGIYREQVIIPKKKNNIFMFGDGARKTVISYNRSVKLSPGTTTSLSGTVQVESEGFMAKWIGFKNTAGPMGHQAVAIRVNGDRAVIFNCRFDGYQDTLYVNNGRQFYRNIVVSGTVDFIFGKSATVIQNSLIVVRKGNKGQFNTVTADGNEKGLAMKIGIVLQNCRIVPDKKLAAERLIVESYLGRPWKKFSTTVIINSEIGDVIRPEGWKIWDGESFHKSCRYVEYNNRGPGAITNRRVNWVKIARSAAEVNDFTVANWLGPINWIQEANVPVTLGL

SEQ ID NO: 44224 - DNA, 1585 bp, Arabidopsis thaliana
  misc_feature (1)..(1585): Ceres Seq. ID no. 13509266
  misc_feature: MA Experiment ID: 20000315 Result: Down-regulated in Transcription
  misc_feature: MA Experiment 20000315 PARAMETER Experiment Name: At_14day_Shoots-Roots_Sub_P Parameter: Age (day) Value: 14
  misc_feature: MA Experiment 20000315 PARAMETER Experiment Name: At_14day_Shoots-Roots_Sub_P Parameter: Organism Value: A. thaliana
  misc_feature: MA Experiment 20000315 PARAMETER Experiment Name: At_14day_Shoots-Roots_Sub_P Parameter: Plant Line Value: WS
  misc_feature: MA Experiment 20000315 PARAMETER Experiment Name: At_14day_Shoots-Roots_Sub_P Parameter: Tissue Value: Shoots vs. Whole Plant
aggcatcttttaggtcatatcaatacaaaatacacatatacatatttttcaacacctgaggtgcgcgaagatagacacttcttcatcctctccgtgattctcaaaattagggttttcttccggcagctctctcagttgtactgcaagcattcttttctagatatttaagatgtcaaggacgaggactgctgcttctgaggctcatgactccatggaatctgaggaaagggtagaccttgatggtgacaatgatcctgaggagattctggaggaggaagttgaatacgaagaagttgaagaggaggagattgaagagatagaagaggagatagaggaggaggttgaagtggaagaagaggaggaggaggaggatgctgttgcaacggaagaggaagaagaaaagaaaaggcatgttgaacttcttgcacttcctccacatggttcagaggtttatcttggagggattcctactgatgctactgaaggggacttaaagggcttctgtggatctataggagaagttactgaggttaggataatgagggaaaaggattctggtgatggaaaggggtatgcatttgtaacattcagaagtaaggacttagctgctgaagcaattgatactctaaataacactgacttcagaggtaaaaggataaaatgttcgactacccaagcaaagcatcgtctctttcttggtaatgtccctagaaattggatggagtcagacattaagaaagcagcaaatagaattggtccaggcgttcaaattgtcgaactcccaaaggaaccacaaaatatgggccggaatcgtggatttgctttcatcgagtattacaaccatgcatgtgctgaatactcgaaacaaaaaatgtcaaatccgagttttaagcttgatgataatgccccaactgtaagctgggctgaatcaaggagtggaggaggaggagattcttcggcttcccaggtcaaggcattgtacatcaagaacttacctagagatataacacaagagcgtctaaaggcattatttgaacatcacgggaaaatactgaaagtggtgatcccaccagcaaaaccaggaaaggaagacagtagatacggatttgtgcattatgcagagaggacaagtgtcatgcgagctttgaaaaacactgaaagatatgagattgatggtcatatgttggattgtactctggcaaagcctcaagctgatcaaaagacgaatacaaatacagttcagaatgtgcagaaatcacaattgcaaccaaactatcctcctcttcttagttatggcatggctcctagtccctttggtgctctcggtggatttggagcttctgcctactcacaaccattaatgcatgccggaggtcacgcagccggtggaatgtcgatgatgccaatcatgttacccgatgggagaatcggatacgtcttgcaacagcctggactagcagctatgccgcaaccaccaccaaggcattctccaccgtataggggaggcagcggttcgagcagcagcagcggcagcaaacgaagtagtgacaacggtagaggacgaagccgttacaatccttattag

SEQ ID NO: 44225 - protein, 471 aa, Arabidopsis thaliana
  peptide (1)..(471): Ceres Seq. ID no. 13509267
  misc_feature (174)..(249): Pfam Name: RNA recognition motif. (a.k.a. RRM, RBD, or RNP domain) Pfam Description: RNA recognition motif. (a.k.a. RRM, RBD, or RNP
  misc_feature (184)..(337): Homolog of NCBI NO: 9502153 NR Description: contains similarity to Pfam family PF00076 (RNA motif. (a.k.a. RRM, RBD, or RNP domain)), score=42.1, E=1.3e-08,
  misc_feature (390)..(471): Homolog of NCBI NO: 15241771 NR Description: RNA recognition motif (RRM)-containing protein
  misc_feature (235)..(335): Homolog of NCBI NO: 15241771 NR Description: RNA recognition motif (RRM)-containing protein
  misc_feature (390)..(471): Homolog of NCBI NO: 22327128 NR Description: RNA recognition motif (RRM)-containing protein
  misc_feature (235)..(335): Homolog of NCBI NO: 22327128 NR Description: RNA recognition motif (RRM)-containing protein
  misc_feature (13)..(471): Homolog of NCBI NO: 7485284 NR Description: hypothetical protein A_TM018A10.14 - Arabidopsis
  misc_feature (73)..(471): Homolog of NCBI NO: 37531112 NR Description: putative RNA-binding protein
  misc_feature (16)..(448): Homolog of NCBI NO: 29371361 NR Description: putative RNA-binding protein
  misc_feature (10)..(471): Homolog of NCBI NO: 18411454 NR Description: RNA recognition motif (RRM)-containing protein
  misc_feature (1)..(471): Homolog of NCBI NO: 15231284 NR Description: RNA recognition motif (RRM)-containing protein
MSRTRTAASEAHDSMESEERVDLDGDNDPEEILEEEVEYEEVEEEEIEEIEEEIEEEVEVEEEEEEEDAVATEEEEEKKRHVELLALPPHGSEVYLGGIPTDATEGDLKGFCGSIGEVTEVRIMREKDSGDGKGYAFVTFRSKDLAAEAIDTLNNTDFRGKRIKCSTTQAKHRLFLGNVPRNWMESDIKKAANRIGPGVQIVELPKEPQNMGRNRGFAFIEYYNHACAEYSKQKMSNPSFKLDDNAPTVSWAESRSGGGGDSSASQVKALYIKNLPRDITQERLKALFEHHGKILKVVIPPAKPGKEDSRYGFVHYAERTSVMRALKNTERYEIDGHMLDCTLAKPQADQKTNTNTVQNVQKSQLQPNYPPLLSYGMAPSPFGALGGFGASAYSQPLMHAGGHAAGGMSMMPIMLPDGRIGYVLQQPGLAAMPQPPPRHSPPYRGGSGSSSSSGSKRSSDNGRGRSRYNPY

SEQ ID NO: 44226 - protein, 457 aa, Arabidopsis thaliana
  peptide (1)..(457): Ceres Seq. ID no. 13509268
  misc_feature (160)..(235): Pfam Name: RNA recognition motif. (a.k.a. RRM, RBD, or RNP domain) Pfam Description: RNA recognition motif. (a.k.a. RRM, RBD, or RNP
  misc_feature (170)..(323): Homolog of NCBI NO: 9502153 NR Description: contains similarity to Pfam family PF00076 (RNA motif. (a.k.a. RRM, RBD, or RNP domain)), score=42.1, E=1.3e-08,
  misc_feature (376)..(457): Homolog of NCBI NO: 15241771 NR Description: RNA recognition motif (RRM)-containing protein
  misc_feature (221)..(321): Homolog of NCBI NO: 15241771 NR Description: RNA recognition motif (RRM)-containing protein
  misc_feature (376)..(457): Homolog of NCBI NO: 22327128 NR Description: RNA recognition motif (RRM)-containing protein
  misc_feature (221)..(321): Homolog of NCBI NO: 22327128 NR Description: RNA recognition motif (RRM)-containing protein
  misc_feature (1)..(457): Homolog of NCBI NO: 7485284 NR Description: hypothetical protein A_TM018A10.14 - Arabidopsis
  misc_feature (59)..(457): Homolog of NCBI NO: 37531112 NR Description: putative RNA-binding protein
  misc_feature (2)..(434): Homolog of NCBI NO: 29371361 NR Description: putative RNA-binding protein
  misc_feature (1)..(457): Homolog of NCBI NO: 18411454 NR Description: RNA recognition motif (RRM)-containing protein
  misc_feature (1)..(457): Homolog of NCBI NO: 15231284 NR Description: RNA recognition motif (RRM)-containing protein
MESEERVDLDGDNDPEEILEEEVEYEEVEEEEIEEIEEEIEEEVEVEEEEEEEDAVATEEEEEKKRHVELLALPPHGSEVYLGGIPTDATEGDLKGFCGSIGEVTEVRIMREKDSGDGKGYAFVTFRSKDLAAEAIDTLNNTDFRGKRIKCSTTQAKHRLFLGNVPRNWMESDIKKAANRIGPGVQIVELPKEPQNMGRNRGFAFIEYYNHACAEYSKQKMSNPSFKLDDNAPTVSWAESRSGGGGDSSASQVKALYIKNLPRDITQERLKALFEHHGKILKVVIPPAKPGKEDSRYGFVHYAERTSVMRALKNTERYEIDGHMLDCTLAKPQADQKTNTNTVQNVQKSQLQPNYPPLLSYGMAPSPFGALGGFGASAYSQPLMHAGGHAAGGMSMMPIMLPDGRIGYVLQQPGLAAMPQPPPRHSPPYRGGSGSSSSSGSKRSSDNGRGRSRYNPY

SEQ ID NO: 44227 - protein, 348 aa, Arabidopsis thaliana
  peptide (1)..(348): Ceres Seq. ID no. 13509269
  misc_feature (51)..(126): Pfam Name: RNA recognition motif. (a.k.a. RRM, RBD, or RNP domain) Pfam Description: RNA recognition motif. (a.k.a. RRM, RBD, or RNP
  misc_feature (61)..(214): Homolog of NCBI NO: 9502153 NR Description: contains similarity to Pfam family PF00076 (RNA motif. (a.k.a. RRM, RBD, or RNP domain)), score=42.1, E=1.3e-08,
  misc_feature (267)..(348): Homolog of NCBI NO: 15241771 NR Description: RNA recognition motif (RRM)-containing protein
  misc_feature (112)..(212): Homolog of NCBI NO: 15241771 NR Description: RNA recognition motif (RRM)-containing protein
  misc_feature (267)..(348): Homolog of NCBI NO: 22327128 NR Description: RNA recognition motif (RRM)-containing protein
  misc_feature (112)..(212): Homolog of NCBI NO: 22327128 NR Description: RNA recognition motif (RRM)-containing protein
  misc_feature (1)..(348): Homolog of NCBI NO: 7485284 NR Description: hypothetical protein A_TM018A10.14 - Arabidopsis
  misc_feature (1)..(348): Homolog of NCBI NO: 37531112 NR Description: putative RNA-binding protein
  misc_feature (1)..(325): Homolog of NCBI NO: 29371361 NR Description: putative RNA-binding protein
  misc_feature (1)..(348): Homolog of NCBI NO: 18411454 NR Description: RNA recognition motif (RRM)-containing protein
  misc_feature (1)..(348): Homolog of NCBI NO: 15231284 NR Description: RNA recognition motif (RRM)-containing protein
MREKDSGDGKGYAFVTFRSKDLAAEAIDTLNNTDFRGKRIKCSTTQAKHRLFLGNVPRNWMESDIKKAANRIGPGVQIVELPKEPQNMGRNRGFAFIEYYNHACAEYSKQKMSNPSFKLDDNAPTVSWAESRSGGGGDSSASQVKALYIKNLPRDITQERLKALFEHHGKILKVVIPPAKPGKEDSRYGFVHYAERTSVMRALKNTERYEIDGHMLDCTLAKPQADQKTNTNTVQNVQKSQLQPNYPPLLSYGMAPSPFGALGGFGASAYSQPLMHAGGHAAGGMSMMPIMLPDGRIGYVLQQPGLAAMPQPPPRHSPPYRGGSGSSSSSGSKRSSDNGRGRSRYNPY

SEQ ID NO: 44228 - DNA, 1307 bp, Arabidopsis thaliana; identical to SEQ ID NO: 41421
  misc_feature (1)..(1307): Ceres Seq. ID no. 13580557
  misc_feature: MA Experiment ID: 20000179 Result: Up-regulated in Transcription
  misc_feature: MA Experiment 20000179 PARAMETER Experiment Name: At_Germinating_Seeds_P Parameter: Age (hr) Value: 6 vs. 0
  misc_feature: MA Experiment 20000179 PARAMETER Experiment Name: At_Germinating_Seeds_P Parameter: Tissue Value: Germinating Seeds
  misc_feature: Pfam Name: Mito_carr Pfam Description: Mitochondrial carrier protein

SEQ ID NO: 44229 - protein, 306 aa, Arabidopsis thaliana; identical to SEQ ID NO: 41422
  peptide (1)..(306): Ceres Seq. ID no. 15222731
  misc_feature: Pfam Name: Mito_carr Pfam Description: Mitochondrial carrier protein
  misc_feature (38)..(279): Homolog of NCBI NO: 14599482 NR Description: putative mitochondrial uncoupling protein
  misc_feature (8)..(300): Homolog of NCBI NO: 18424178 NR Description: uncoupling protein (AtUCP2) [Arabidopsis
  misc_feature (6)..(299): Homolog of NCBI NO: 13537347 NR Description: uncoupling protein [Oryza sativa (japonica
  misc_feature (6)..(299): Homolog of NCBI NO: 19401698 NR Description: uncoupling protein [Zea mays]
  misc_feature (18)..(300): Homolog of NCBI NO: 7106157 NR Description: SfUCPa [Symplocarpus foetidus]
  misc_feature (4)..(299): Homolog of NCBI NO: 22002462 NR Description: mitochondrial uncoupling protein [Helicodiceros
  misc_feature (5)..(302): Homolog of NCBI NO: 18921040 NR Description: putative uncoupling protein [Lycopersicon
  misc_feature (5)..(302): Homolog of NCBI NO: 7489287 NR Description: uncoupling protein (clone StUCP7), mitochonrial -
  misc_feature (1)..(306): Homolog of NCBI NO: 25295878 NR Description: uncoupling protein [imported] - Arabidopsis
  misc_feature (1)..(306): Homolog of NCBI NO: 15232420 NR Description: uncoupling protein (ucp/PUMP) [Arabidopsis
  misc_feature (38)..(279): Homolog of NCBI NO: 14599482 NR Description: putative mitochondrial uncoupling protein
  misc_feature (8)..(300): Homolog of NCBI NO: 18424178 NR Description: uncoupling protein (AtUCP2) [Arabidopsis
  misc_feature (6)..(299): Homolog of NCBI NO: 13537347 NR Description: uncoupling protein [Oryza sativa (japonica
  misc_feature (6)..(299): Homolog of NCBI NO: 19401698 NR Description: uncoupling protein [Zea mays]
  misc_feature (18)..(300): Homolog of NCBI NO: 7106157 NR Description: SfUCPa [Symplocarpus foetidus]
  misc_feature (4)..(299): Homolog of NCBI NO: 22002462 NR Description: mitochondrial uncoupling protein [Helicodiceros
  misc_feature (5)..(302): Homolog of NCBI NO: 18921040 NR Description: putative uncoupling protein [Lycopersicon
  misc_feature (5)..(302): Homolog of NCBI NO: 7489287 NR Description: uncoupling protein (clone StUCP7), mitochonrial -
  misc_feature (1)..(306): Homolog of NCBI NO: 25295878 NR Description: uncoupling protein [imported] - Arabidopsis
  misc_feature (1)..(306): Homolog of NCBI NO: 15232420 NR Description: uncoupling protein (ucp/PUMP) [Arabidopsis

SEQ ID NO: 44230 - protein, 212 aa, Arabidopsis thaliana; identical to SEQ ID NO: 41423
  peptide (1)..(212): Ceres Seq. ID no. 15222732
  misc_feature: Pfam Name: Mito_carr Pfam Description: Mitochondrial carrier protein
  misc_feature (1)..(185): Homolog of NCBI NO: 14599482 NR Description: putative mitochondrial uncoupling protein
  misc_feature (1)..(206): Homolog of NCBI NO: 18424178 NR Description: uncoupling protein (AtUCP2) [Arabidopsis
  misc_feature (1)..(205): Homolog of NCBI NO: 13537347 NR Description: uncoupling protein [Oryza sativa (japonica
  misc_feature (1)..(205): Homolog of NCBI NO: 19401698 NR Description: uncoupling protein [Zea mays]
  misc_feature (1)..(206): Homolog of NCBI NO: 7106157 NR Description: SfUCPa [Symplocarpus foetidus]
  misc_feature (1)..(205): Homolog of NCBI NO: 22002462 NR Description: mitochondrial uncoupling protein [Helicodiceros
  misc_feature (1)..(208): Homolog of NCBI NO: 18921040 NR Description: putative uncoupling protein [Lycopersicon
  misc_feature (1)..(208): Homolog of NCBI NO: 7489287 NR Description: uncoupling protein (clone StUCP7), mitochonrial -
  misc_feature (1)..(212): Homolog of NCBI NO: 25295878 NR Description: uncoupling protein [imported] - Arabidopsis
  misc_feature (1)..(212): Homolog of NCBI NO: 15232420 NR Description: uncoupling protein (ucp/PUMP) [Arabidopsis
  misc_feature (1)..(185): Homolog of NCBI NO: 14599482 NR Description: putative mitochondrial uncoupling protein
  misc_feature (1)..(206): Homolog of NCBI NO: 18424178 NR Description: uncoupling protein (AtUCP2) [Arabidopsis
  misc_feature (1)..(205): Homolog of NCBI NO: 13537347 NR Description: uncoupling protein [Oryza sativa (japonica
  misc_feature (1)..(205): Homolog of NCBI NO: 19401698 NR Description: uncoupling protein [Zea mays]
  misc_feature (1)..(206): Homolog of NCBI NO: 7106157 NR Description: SfUCPa [Symplocarpus foetidus]
  misc_feature (1)..(205): Homolog of NCBI NO: 22002462 NR Description: mitochondrial uncoupling protein [Helicodiceros
  misc_feature (1)..(208): Homolog of NCBI NO: 18921040 NR Description: putative uncoupling protein [Lycopersicon
  misc_feature (1)..(208): Homolog of NCBI NO: 7489287 NR Description: uncoupling protein (clone StUCP7), mitochonrial -
  misc_feature (1)..(212): Homolog of NCBI NO: 25295878 NR Description: uncoupling protein [imported] - Arabidopsis
  misc_feature (1)..(212): Homolog of NCBI NO: 15232420 NR Description: uncoupling protein (ucp/PUMP) [Arabidopsis

SEQ ID NO: 44231 - protein, 177 aa, Arabidopsis thaliana; identical to SEQ ID NO: 41424
  peptide (1)..(177): Ceres Seq. ID no. 15222733
  misc_feature: Pfam Name: Mito_carr Pfam Description: Mitochondrial carrier protein
  misc_feature (1)..(150): Homolog of NCBI NO: 14599482 NR Description: putative mitochondrial uncoupling protein
  misc_feature (1)..(171): Homolog of NCBI NO: 18424178 NR Description: uncoupling protein (AtUCP2) [Arabidopsis
  misc_feature (1)..(170): Homolog of NCBI NO: 13537347 NR Description: uncoupling protein [Oryza sativa (japonica
  misc_feature (1)..(170): Homolog of NCBI NO: 19401698 NR Description: uncoupling protein [Zea mays]
  misc_feature (1)..(171): Homolog of NCBI NO: 7106157 NR Description: SfUCPa [Symplocarpus foetidus]
  misc_feature (1)..(170): Homolog of NCBI NO: 22002462 NR Description: mitochondrial uncoupling protein [Helicodiceros
  misc_feature (1)..(173): Homolog of NCBI NO: 18921040 NR Description: putative uncoupling protein [Lycopersicon
  misc_feature (1)..(173): Homolog of NCBI NO: 7489287 NR Description: uncoupling protein (clone StUCP7), mitochonrial -
  misc_feature (1)..(177): Homolog of NCBI NO: 25295878 NR Description: uncoupling protein [imported] - Arabidopsis
  misc_feature (1)..(177): Homolog of NCBI NO: 15232420 NR Description: uncoupling protein (ucp/PUMP) [Arabidopsis
  misc_feature (1)..(150): Homolog of NCBI NO: 14599482 NR Description: putative mitochondrial uncoupling protein
  misc_feature (1)..(171): Homolog of NCBI NO: 18424178 NR Description: uncoupling protein (AtUCP2) [Arabidopsis
  misc_feature (1)..(170): Homolog of NCBI NO: 13537347 NR Description: uncoupling protein [Oryza sativa (japonica
  misc_feature (1)..(170): Homolog of NCBI NO: 19401698 NR Description: uncoupling protein [Zea mays]
  misc_feature (1)..(171): Homolog of NCBI NO: 7106157 NR Description: SfUCPa [Symplocarpus foetidus]
  misc_feature (1)..(170): Homolog of NCBI NO: 22002462 NR Description: mitochondrial uncoupling protein [Helicodiceros
  misc_feature (1)..(173): Homolog of NCBI NO: 18921040 NR Description: putative uncoupling protein [Lycopersicon
  misc_feature (1)..(173): Homolog of NCBI NO: 7489287 NR Description: uncoupling protein (clone StUCP7), mitochonrial -
  misc_feature (1)..(177): Homolog of NCBI NO: 25295878 NR Description: uncoupling protein [imported] - Arabidopsis
  misc_feature (1)..(177): Homolog of NCBI NO: 15232420 NR Description: uncoupling protein (ucp/PUMP) [Arabidopsis

SEQ ID NO: 44232 - DNA, 1639 bp, Arabidopsis thaliana
  misc_feature (1)..(1639): Ceres Seq. ID no. 13509375
  misc_feature: MA Experiment ID: 20000307 Result: Up-regulated in Transcription
  misc_feature: MA Experiment 20000307 PARAMETER Experiment Name: At_Germinating_Seeds_Sub_P Parameter: Age (hr) Value: 24 vs. 0
  misc_feature: MA Experiment 20000307 PARAMETER Experiment Name: At_Germinating_Seeds_Sub_P Parameter: Organism Value: A. thaliana
  misc_feature: MA Experiment 20000307 PARAMETER Experiment Name: At_Germinating_Seeds_Sub_P Parameter: Plant Line Value: WS
  misc_feature: MA Experiment 20000307 PARAMETER Experiment Name: At_Germinating_Seeds_Sub_P Parameter: Tissue Value: Germinating Seeds
  misc_feature: MA Experiment ID: 20000314 Result: Down-regulated in Transcription
  misc_feature: MA Experiment 20000314 PARAMETER Experiment Name: At_14day_Shoots-Roots_Sub_P Parameter: Age (day) Value: 14
  misc_feature: MA Experiment 20000314 PARAMETER Experiment Name: At_14day_Shoots-Roots_Sub_P Parameter: Organism Value: A. thaliana
  misc_feature: MA Experiment 20000314 PARAMETER Experiment Name: At_14day_Shoots-Roots_Sub_P Parameter: Plant Line Value: WS
  misc_feature: MA Experiment 20000314 PARAMETER Experiment Name: At_14day_Shoots-Roots_Sub_P Parameter: Tissue Value: Roots vs. Whole Plant
  misc_feature: MA Experiment ID: 20000315 Result: Up-regulated in Transcription
  misc_feature: MA Experiment 20000315 PARAMETER Experiment Name: At_14day_Shoots-Roots_Sub_P Parameter: Age (day) Value: 14
  misc_feature: MA Experiment 20000315 PARAMETER Experiment Name: At_14day_Shoots-Roots_Sub_P Parameter: Organism Value: A. thaliana
  misc_feature: MA Experiment 20000315 PARAMETER Experiment Name: At_14day_Shoots-Roots_Sub_P Parameter: Plant Line Value: WS
  misc_feature: MA Experiment 20000315 PARAMETER Experiment Name: At_14day_Shoots-Roots_Sub_P Parameter: Tissue Value: Shoots vs. Whole Plant
  misc_feature: MA Experiment ID: 20000327 Result: Down-regulated in Transcription
  misc_feature: MA Experiment 20000327 PARAMETER Experiment Name: At_42deg_Heat_Sub_P Parameter: Age (day) Value: 14
  misc_feature: MA Experiment 20000327 PARAMETER Experiment Name: At_42deg_Heat_Sub_P Parameter: Organism Value: A. thaliana
  misc_feature: MA Experiment 20000327 PARAMETER Experiment Name: At_42deg_Heat_Sub_P Parameter: Plant Line Value: WS
  misc_feature: MA Experiment 20000327 PARAMETER Experiment Name: At_42deg_Heat_Sub_P Parameter: Temperature (deg C) Value: 42 vs. 22
  misc_feature: MA Experiment 20000327 PARAMETER Experiment Name: At_42deg_Heat_Sub_P Parameter: Timepoint (hr) Value: 1
  misc_feature: MA Experiment 20000327 PARAMETER Experiment Name: At_42deg_Heat_Sub_P Parameter: Tissue Value: Aerial
  misc_feature: MA Experiment ID: 20000328 Result: Down-regulated in Transcription
  misc_feature: MA Experiment 20000328 PARAMETER Experiment Name: At_42deg_Heat_Sub_P Parameter: Age (day) Value: 14
  misc_feature: MA Experiment 20000328 PARAMETER Experiment Name: At_42deg_Heat_Sub_P Parameter: Organism Value: A. thaliana
  misc_feature: MA Experiment 20000328 PARAMETER Experiment Name: At_42deg_Heat_Sub_P Parameter: Plant Line Value: WS
  misc_feature: MA Experiment 20000328 PARAMETER Experiment Name: At_42deg_Heat_Sub_P Parameter: Temperature (deg C) Value: 42 vs. 22
  misc_feature: MA Experiment 20000328 PARAMETER Experiment Name: At_42deg_Heat_Sub_P Parameter: Timepoint (hr) Value: 6
  misc_feature: MA Experiment 20000328 PARAMETER Experiment Name: At_42deg_Heat_Sub_P Parameter: Tissue Value: Aerial
  misc_feature: MA Experiment ID: 20000332 Result: Down-regulated in Transcription
  misc_feature: MA Experiment 20000332 PARAMETER Experiment Name: At_4deg_Cold_Sub_P Parameter: Age (day) Value: 14
  misc_feature: MA Experiment 20000332 PARAMETER Experiment Name: At_4deg_Cold_Sub_P Parameter: Organism Value: A. thaliana
  misc_feature: MA Experiment 20000332 PARAMETER Experiment Name: At_4deg_Cold_Sub_P Parameter: Plant Line Value: WS
  misc_feature: MA Experiment 20000332 PARAMETER Experiment Name: At_4deg_Cold_Sub_P Parameter: Temperature (deg C) Value: 4 vs. 22
  misc_feature: MA Experiment 20000332 PARAMETER Experiment Name: At_4deg_Cold_Sub_P Parameter: Timepoint (hr) Value: 2
  misc_feature: MA Experiment 20000332 PARAMETER Experiment Name: At_4deg_Cold_Sub_P Parameter: Tissue Value: Aerial
  misc_feature: MA Experiment ID: 20000347 Result: Down-regulated in Transcription
  misc_feature: MA Experiment 20000347 PARAMETER Experiment Name: At_2mM_SA_Sub_P Parameter: Age (day) Value: 14
  misc_feature: MA Experiment 20000347 PARAMETER Experiment Name: At_2mM_SA_Sub_P Parameter: Organism Value: A. thaliana
  misc_feature: MA Experiment 20000347 PARAMETER Experiment Name: At_2mM_SA_Sub_P Parameter: Plant Line Value: WS
  misc_feature: MA Experiment 20000347 PARAMETER Experiment Name: At_2mM_SA_Sub_P Parameter: Timepoint (hr) Value: 6
  misc_feature: MA Experiment 20000347 PARAMETER Experiment Name: At_2mM_SA_Sub_P Parameter: Tissue Value: Aerial
  misc_feature: MA Experiment 20000347 PARAMETER Experiment Name: At_2mM_SA_Sub_P Parameter: Treatment Value: 2mM SA vs. No Treatment
gctgtgtcttttttataatgatgaagttcctcgctttcaacgccaaccaaaaacctccagaaagctaattagggaaacatttgaaaaaactcagtgatctgctcttctctctaattgcaatggattcattgagattaatatctaagagcatcaagattgaaggaaccccatttggttcctctcaccaacgcaatcaaattttcctcaaatccgtcgctttcttccttttgatcggtctcgcttaccgttttctcatcactaattccaccgtctctccggttcccaccgttcgatcctcgccggaatctctcccgccggatccttcaggtctcactgccatcactcaaacttcagcctctgtcgattccccagcaaacatcacaaccattgcttcacagaatgtttcaaccaagtgtgatatctttatcgggaattgggtaccagacccatcagggccaatctacaccaatgtctcttgccgtcatatccaagattaccaaaattgcttgaaaaacggaaggccagatgtgaattaccttcgatggagatggcaacctcgcgattgcgatctcccgaggtttaaccctgagcaattccttgacaatatgaggaacaaatggttggcttttatcggtgattccatctctcgtaaccatgtccaatccctcctctgcattctctctcaggtagaagaagtagaagatatcttccatgacaaggaatacaaatcaaggatctggagattcccttcttacaacttcacactctctgtcatttggtctcctttccttgtaaaagctgaaacctttgagaacggagttcctttctcagacattcgagtacacctcgacaagctagaccagaaatggactgatcagtacatcaatttcgactacgttgtcatctccggtggaaaatggttcctcaaaacaacaatcttccatgaaaacaacaccgtaaccggatgccattactgccaagggaagaacaatatgaccgaactcggttatctatactcgtaccgaaaggttcttcatttggttttagactttgtcgctgaaccgaaccataaagctcaggttctcttcagaacaacaacacctgatcatttcgagaatggagagtgggactctggtggtttctgtaaccgaacaatgccgtttacggaaggcagcgaaggagagatgaagagcgaggatgtatcgatgcgtgatatcgagcttgaagagttctataagactactactacacaacaagaaggttccaattcaaacattgtattacttgacacaacttcaatgtcgcttctccgaccagatggacatccgggaccgtaccggtatccaaatcctttcgctgggctgaagaacaaggagctgaatcaggttcagaacgattgtcttcattggtgcttacccggtccgattgattcatggaatgatctaatggtcgaggtgatgcttaaccgggaacggcaaagacgagaatagcctctcgacttcacgtgctgttgttttctaattagtttgtttgtttgctcgtaaaaaagcccatttattattggaccttccgtgggtccaaatacaagcactgtcgttttttgatgtgggaatgaaacgccgtgtcgttttacttcctc

SEQ ID NO: 44233 - protein, 456 aa, Arabidopsis thaliana
  peptide (1)..(456): Ceres Seq. ID no. 13509376
  misc_feature (268)..(447): Pfam Name: Arabidopsis proteins of unknown function Pfam Description: Arabidopsis proteins of unknown function
  misc_feature (19)..(447): Homolog of NCBI NO: 15223079 NR Description: expressed protein [Arabidopsis thaliana]
  misc_feature (48)..(447): Homolog of NCBI NO: 15237211 NR Description: expressed protein [Arabidopsis thaliana]
  misc_feature (20)..(449): Homolog of NCBI NO: 15237044 NR Description: expressed protein [Arabidopsis thaliana]
  misc_feature (22)..(449): Homolog of NCBI NO: 7486743 NR Description: hypothetical protein F9D16.260 - Arabidopsis
  misc_feature (20)..(449): Homolog of NCBI NO: 30686312 NR Description: expressed protein [Arabidopsis thaliana]
  misc_feature (84)..(453): Homolog of NCBI NO: 28393189 NR Description: unknown protein [Arabidopsis thaliana]
  misc_feature (8)..(69): Homolog of NCBI NO: 15234058 NR Description: expressed protein [Arabidopsis thaliana]
  misc_feature (84)..(453): Homolog of NCBI NO: 15234058 NR Description: expressed protein [Arabidopsis thaliana]
  misc_feature (1)..(456): Homolog of NCBI NO: 25518737 NR Description: hypothetical protein F6F3.23 [imported] -
  misc_feature (1)..(456): Homolog of NCBI NO: 30678135 NR Description: expressed protein [Arabidopsis thaliana]
MDSLRLISKSIKIEGTPFGSSHQRNQIFLKSVAFFLLIGLAYRFLITNSTVSPVPTVRSSPESLPPDPSGLTAITQTSASVDSPANITTIASQNVSTKCDIFIGNWVPDPSGPIYTNVSCRHIQDYQNCLKNGRPDVNYLRWRWQPRDCDLPRFNPEQFLDNMRNKWLAFIGDSISRNHVQSLLCILSQVEEVEDIFHDKEYKSRIWRFPSYNFTLSVIWSPFLVKAETFENGVPFSDIRVHLDKLDQKWTDQYINFDYVVISGGKWFLKTTIFHENNTVTGCHYCQGKNNMTELGYLYSYRKVLHLVLDFVAEPNHKAQVLFRTTTPDHFENGEWDSGGFCNRTMPFTEGSEGEMKSEDVSMRDIELEEFYKTTTTQQEGSNSNIVLLDTTSMSLLRPDGHPGPYRYPNPFAGLKNKELNQVQNDCLHWCLPGPIDSWNDLMVEVMLNRERQRRE

SEQ ID NO: 44234 - protein, 294 aa, Arabidopsis thaliana
  peptide (1)..(294): Ceres Seq. ID no. 13509377
  misc_feature (106)..(285): Pfam Name: Arabidopsis proteins of unknown function Pfam Description: Arabidopsis proteins of unknown function
  misc_feature (1)..(292): Homolog of NCBI NO: 15237213 NR Description: expressed protein [Arabidopsis thaliana]
  misc_feature (1)..(285): Homolog of NCBI NO: 15223079 NR Description: expressed protein [Arabidopsis thaliana]
  misc_feature (1)..(285): Homolog of NCBI NO: 15237211 NR Description: expressed protein [Arabidopsis thaliana]
  misc_feature (1)..(287): Homolog of NCBI NO: 15237044 NR Description: expressed protein [Arabidopsis thaliana]
  misc_feature (1)..(287): Homolog of NCBI NO: 7486743 NR Description: hypothetical protein F9D16.260 - Arabidopsis
  misc_feature (1)..(287): Homolog of NCBI NO: 30686312 NR Description: expressed protein [Arabidopsis thaliana]
  misc_feature (1)..(291): Homolog of NCBI NO: 28393189 NR Description: unknown protein [Arabidopsis thaliana]
  misc_feature (1)..(291): Homolog of NCBI NO: 15234058 NR Description: expressed protein [Arabidopsis thaliana]
  misc_feature (1)..(294): Homolog of NCBI NO: 25518737 NR Description: hypothetical protein F6F3.23 [imported] -
  misc_feature (1)..(294): Homolog of NCBI NO: 30678135 NR Description: expressed protein [Arabidopsis thaliana]
MRNKWLAFIGDSISRNHVQSLLCILSQVEEVEDIFHDKEYKSRIWRFPSYNFTLSVIWSPFLVKAETFENGVPFSDIRVHLDKLDQKWTDQYINFDYVVISGGKWFLKTTIFHENNTVTGCHYCQGKNNMTELGYLYSYRKVLHLVLDFVAEPNHKAQVLFRTTTPDHFENGEWDSGGFCNRTMPFTEGSEGEMKSEDVSMRDIELEEFYKTTTTQQEGSNSNIVLLDTTSMSLLRPDGHPGPYRYPNPFAGLKNKELNQVQNDCLHWCLPGPIDSWNDLMVEVMLNRERQRRE

SEQ ID NO: 44235 - DNA, 1236 bp, Arabidopsis thaliana
  misc_feature (1)..(1236): Ceres Seq. ID no. 13509797
  misc_feature: MA Experiment ID: 20000315 Result: Down-regulated in Transcription
  misc_feature: MA Experiment 20000315 PARAMETER Experiment Name: At_14day_Shoots-Roots_Sub_P Parameter: Age (day) Value: 14
  misc_feature: MA Experiment 20000315 PARAMETER Experiment Name: At_14day_Shoots-Roots_Sub_P Parameter: Organism Value: A. thaliana
  misc_feature: MA Experiment 20000315 PARAMETER Experiment Name: At_14day_Shoots-Roots_Sub_P Parameter: Plant Line Value: WS
  misc_feature: MA Experiment 20000315 PARAMETER Experiment Name: At_14day_Shoots-Roots_Sub_P Parameter: Tissue Value: Shoots vs. Whole Plant
gattgaccacgttctcgtcttcccccaaatctaaaaccctaaattctcaattgctcgtcacacttcgtcactccaccagcgacaatcgccgcagaaacctctacgaaacttgctacaatggagttttcatcacaagacgacgattttggaggagacgattccgctgctaatgccaccagggcttcaggtaatagaagaagcttcggtgatcttgaagacgatgaagatgatattttcggatcaacaacggtagcgcctggtgttagaactgggatgattttgtctctccgaggaagtcttaagaattgtaaagatgatcttgcttcatgtcaaaatgagctcgagtcagcaaaaacagagattcagaagtggaagtcagcgtttcagaatgagtcctttgttcccgctggaaaatctcctgaaccaagatttttgattgattatattcaaaacctaaaatcttctgagaaatctttgaaagaacagttagaaatcgcaaagagaaaagaagcgtcatgcattgtacaatatgcgaaacgggaacaagaaatggcagaattgaagtcagctgttcgcgatttgaaatctcaactcaagccagcgtcaatgcaggcgaggaggttgttactggatccagcaattcatgaagaattttcacgtctgaagaatctagtagaggaaaaagacaagaagatcaaggaactccaggacaacattgcagcagttacttttactcctcaaagcaagaatggaaagatgcttatggcaaagtgcagaaccctgcaagaggaaaatgaggagattgggcaccaagctgccgaaggaaagattcatgaactagcaataaagcttgcaatgcagaagtctcaaaacgcggaacttagaagtcaatttgaaggactgtacaaacacatggaggaattaactaatgatgttgagagatcaaatgaaacggtgataatattgcaagagaaactggaagagaaagagaaggagatagagagagtaaagaaaggactggaaattgtgtctgagctagtaggtgacaagaaagatgaagttgatgaaattgatgaagatgcaaaagaagaaattgctggtggagaataggaatttgtagctttcaaaaaatgttttgtacattttgaagttcaaaatcacatttcttcattcgttatctgtttcatgaaacagaaagttctaatcttcatcttctattaatatgttttaattcgc

SEQ ID NO: 44236 - protein, 330 aa, Arabidopsis thaliana
  peptide (1)..(330): Ceres Seq. ID no. 13509798
  misc_feature (121)..(315): Pfam Name: Intermediate filament protein Pfam Description: Intermediate filament protein
  misc_feature (120)..(315): Homolog of NCBI NO: 24653461 NR Description: female lethal d CG6315-PB [Drosophila
  misc_feature (120)..(315): Homolog of NCBI NO: 5441313 NR Description: FL(2)D-s protein [Drosophila melanogaster]
  misc_feature (72)..(315): Homolog of NCBI NO: 5420159 NR Description: FL(2)D protein [Drosophila melanogaster]
  misc_feature (72)..(315): Homolog of NCBI NO: 24653459 NR Description: female lethal d CG6315-PA [Drosophila
  misc_feature (84)..(299): Homolog of NCBI NO: 33416867 NR Description: Unknown (protein for MGC:66202) [Danio rerio]
  misc_feature (78)..(299): Homolog of NCBI NO: 11322455 NR Description: WTAP protein [Mus musculus]
  misc_feature (78)..(299): Homolog of NCBI NO: 21361159 NR Description: Wilms' tumour 1-associating protein isoform 1
  misc_feature (78)..(299): Homolog of NCBI NO: 10334526 NR Description: WTAP protein [Homo sapiens]
  misc_feature (82)..(328): Homolog of NCBI NO: 38648992 NR Description: Unknown (protein for MGC:75954) [Silurana
  misc_feature (1)..(330): Homolog of NCBI NO: 15232439 NR Description: FKBP12 interacting protein (FIP37) [Arabidopsis
MEFSSQDDDFGGDDSAANATRASGNRRSFGDLEDDEDDIFGSTTVAPGVRTGMILSLRGSLKNCKDDLASCQNELESAKTEIQKWKSAFQNESFVPAGKSPEPRFLIDYIQNLKSSEKSLKEQLEIAKRKEASCIVQYAKREQEMAELKSAVRDLKSQLKPASMQARRLLLDPAIHEEFSRLKNLVEEKDKKIKELQDNIAAVTFTPQSKNGKMLMAKCRTLQEENEEIGHQAAEGKIHELAIKLAMQKSQNAELRSQFEGLYKHMEELTNDVERSNETVIILQEKLEEKEKEIERVKKGLEIVSELVGDKKDEVDEIDEDAKEEIAGGE

SEQ ID NO: 44237 - protein, 278 aa, Arabidopsis thaliana
  peptide (1)..(278): Ceres Seq. ID no. 13509799
  misc_feature (69)..(263): Pfam Name: Intermediate filament protein Pfam Description: Intermediate filament protein
  misc_feature (68)..(263): Homolog of NCBI NO: 24653461 NR Description: female lethal d CG6315-PB [Drosophila
  misc_feature (68)..(263): Homolog of NCBI NO: 5441313 NR Description: FL(2)D-s protein [Drosophila melanogaster]
  misc_feature (20)..(263): Homolog of NCBI NO: 5420159 NR Description: FL(2)D protein [Drosophila melanogaster]
  misc_feature (20)..(263): Homolog of NCBI NO: 24653459 NR Description: female lethal d CG6315-PA [Drosophila
  misc_feature (32)..(247): Homolog of NCBI NO: 33416867 NR Description: Unknown (protein for MGC:66202) [Danio rerio]
  misc_feature (26)..(247): Homolog of NCBI NO: 11322455 NR Description: WTAP protein [Mus musculus]
  misc_feature (26)..(247): Homolog of NCBI NO: 21361159 NR Description: Wilms' tumour 1-associating protein isoform 1
  misc_feature (26)..(247): Homolog of NCBI NO: 10334526 NR Description: WTAP protein [Homo sapiens]
  misc_feature (30)..(276): Homolog of NCBI NO: 38648992 NR Description: Unknown (protein for MGC:75954) [Silurana
  misc_feature (1)..(278): Homolog of NCBI NO: 15232439 NR Description: FKBP12 interacting protein (FIP37) [Arabidopsis
MILSLRGSLKNCKDDLASCQNELESAKTEIQKWKSAFQNESFVPAGKSPEPRFLIDYIQNLKSSEKSLKEQLEIAKRKEASCIVQYAKREQEMAELKSAVRDLKSQLKPASMQARRLLLDPAIHEEFSRLKNLVEEKDKKIKELQDNIAAVTFTPQSKNGKMLMAKCRTLQEENEEIGHQAAEGKIHELAIKLAMQKSQNAELRSQFEGLYKHMEELTNDVERSNETVIILQEKLEEKEKEIERVKKGLEIVSELVGDKKDEVDEIDEDAKEEIAGGE

SEQ ID NO: 44238 - protein, 186 aa, Arabidopsis thaliana
  peptide (1)..(186): Ceres Seq. ID no. 13509800
  misc_feature (1)..(171): Pfam Name: Intermediate filament protein Pfam Description: Intermediate filament protein
  misc_feature (1)..(171): Homolog of NCBI NO: 24653461 NR Description: female lethal d CG6315-PB [Drosophila
  misc_feature (1)..(171): Homolog of NCBI NO: 5441313 NR Description: FL(2)D-s protein [Drosophila melanogaster]
  misc_feature (1)..(171): Homolog of NCBI NO: 5420159 NR Description: FL(2)D protein [Drosophila melanogaster]
  misc_feature (1)..(171): Homolog of NCBI NO: 24653459 NR Description: female lethal d CG6315-PA [Drosophila
  misc_feature (1)..(155): Homolog of NCBI NO: 33416867 NR Description: Unknown (protein for MGC:66202) [Danio rerio]
  misc_feature (1)..(155): Homolog of NCBI NO: 21361159 NR Description: Wilms' tumour 1-associating protein isoform 1
  misc_feature (1)..(155): Homolog of NCBI NO: 11322455 NR Description: WTAP protein [Mus musculus]
  misc_feature (1)..(155): Homolog of NCBI NO: 10334526 NR Description: WTAP protein [Homo sapiens]
  misc_feature (1)..(184): Homolog of NCBI NO: 38648992 NR Description: Unknown (protein for MGC:75954) [Silurana
  misc_feature (1)..(186): Homolog of NCBI NO: 15232439 NR Description: FKBP12 interacting protein (FIP37) [Arabidopsis
MAELKSAVRDLKSQLKPASMQARRLLLDPAIHEEFSRLKNLVEEKDKKIKELQDNIAAVTFTPQSKNGKMLMAKCRTLQEENEEIGHQAAEGKIHELAIKLAMQKSQNAELRSQFEGLYKHMEELTNDVERSNETVIILQEKLEEKEKEIERVKKGLEIVSELVGDKKDEVDEIDEDAKEEIAGGE

SEQ ID NO: 44239 - DNA, 1476 bp, Arabidopsis thaliana
  misc_feature (1)..(1476): Ceres Seq. ID no. 12481742
  misc_feature: MA Experiment ID: 20000307 Result: Down-regulated in Transcription
  misc_feature: MA Experiment 20000307 PARAMETER Experiment Name: At_Germinating_Seeds_Sub_P Parameter: Age (hr) Value: 24 vs. 0
  misc_feature: MA Experiment 20000307 PARAMETER Experiment Name: At_Germinating_Seeds_Sub_P Parameter: Organism Value: A. thaliana
  misc_feature: MA Experiment 20000307 PARAMETER Experiment Name: At_Germinating_Seeds_Sub_P Parameter: Plant Line Value: WS
  misc_feature: MA Experiment 20000307 PARAMETER Experiment Name: At_Germinating_Seeds_Sub_P Parameter: Tissue Value: Germinating Seeds
  misc_feature: MA Experiment ID: 20000346 Result: Up-regulated in Transcription
  misc_feature: MA Experiment 20000346 PARAMETER Experiment Name: At_2mM_SA_Sub_P Parameter: Age (day) Value: 14
  misc_feature: MA Experiment 20000346 PARAMETER Experiment Name: At_2mM_SA_Sub_P Parameter: Organism Value: A. thaliana
  misc_feature: MA Experiment 20000346 PARAMETER Experiment Name: At_2mM_SA_Sub_P Parameter: Plant Line Value: WS
  misc_feature: MA Experiment 20000346 PARAMETER Experiment Name: At_2mM_SA_Sub_P Parameter: Timepoint (hr) Value: 1
  misc_feature: MA Experiment 20000346 PARAMETER Experiment Name: At_2mM_SA_Sub_P Parameter: Tissue Value: Aerial
  misc_feature: MA Experiment 20000346 PARAMETER Experiment Name: At_2mM_SA_Sub_P Parameter: Treatment Value: 2mM SA vs. No Treatment
ataacacatcatggtgaacgaagaaatggagtcatcacttaaagtcatcgacgtggcacgagtcacaccatcaaactccgactcgtccgagtcactcactctcccactcaccttcttcgacctcctctggtacaaacttcacgccgtcgaacgagtcatcttctacaaactcaccgacgcaagtcgtcctttctttgactcagtcatcgtcccaaacctcaaaacatctctctcctcatccctctctcactacctcccactcgccggaaaactcgtgtgggaaccacttgatcccaaaccgaaaatcgtctacaccccaaacgacgccgtttcattcaccgtcgccgagtcaaacgcagacttctcacgtttaaccggcaaagaaccgttccccaccaccgagttatacccgttagtccccgagttacatgtctccgacgactcagcttccgccgtgtcgtttcaagtcacgttatttccaaaccaagggttttgcatcagcgttaatgcacatcatgccgttttagatggaaaaacgacaaccaactttctcaaatcttgggcacgcacatgtaaaaaccaagattcttttctaccgcaggatctaatcccagtttacgatcgtacggtcataaaagatccaatggatttagatacaaagatcttaaacgcttggcacagagtagccaaagtgttcaccggtggtaaagaaccagaaaaccccaagagtttaaagcttttatggtcgccggagattggtcctgacgttttccgatacactctcaatctcactagagaagatatccaaaagcttcgagagagactcaagaaagagtcttcttcttcctctgtttcctcatcacccaaagagcttcgtttatcaacgtttgtgattgtttactcttatgctttaacgtgtttaatcaaagctcgaggcggtgatccgagtagaccagtcgggtacggattcgctgtggattgtcgaagccttatggttccaccggttccatcgagttattttggtaattgtgtatctgcttgtttaaaatgtcgttaacggcagagacttttatgagtgaagaagggtttttagctgctgcgagaatggttagtgattctgttgaggcattggatgagaatgttgcattgaagattccagagattttggaagggtttacgactctttcaccaggaacacaggttttgtctgttgccgggtcgacccggttcggagtttacgggttggattttgggtggggtagaccggagaaagtggtggttgtgtcaattgaccaaggtgaagcgatttcttttgcggagagtagagatgggagtggtggtgtagagcttggcttctccctcaagaaacatgaaatggatgttcttgttgatttgcttcacaagggactagaaaattaaatcatttttttctttcttcagaagagtaaaataatataagaaataaaatttattgtg

SEQ ID NO: 44240 - protein, 348 aa, Arabidopsis thaliana
  peptide (1)..(348): Ceres Seq. ID no. 12481743
  misc_feature (8)..(342): Pfam Name: Transferase family Pfam Description: Transferase family
  misc_feature (9)..(341): Homolog of NCBI NO: 15230049 NR Description: anthocyanin 5-aromatic acyltransferase, putative
  misc_feature (9)..(341): Homolog of NCBI NO: 15230048 NR Description: anthocyanin 5-aromatic acyltransferase, putative
  misc_feature (1)..(341): Homolog of NCBI NO: 15230013 NR Description: Anthocyanin 5-aromatic acyltransferase, putative
  misc_feature (9)..(341): Homolog of NCBI NO: 15230034 NR Description: hypothetical protein; protein id: At3g29635.1
  misc_feature (6)..(346): Homolog of NCBI NO: 15241632 NR Description: acyltransferase -like  protein
  misc_feature (6)..(344): Homolog of NCBI NO: 21593292 NR Description: acyltransferase-like protein [Arabidopsis
  misc_feature (6)..(344): Homolog of NCBI NO: 15241631 NR Description: acyltransferase -like protein
  misc_feature (1)..(348): Homolog of NCBI NO: 18421824 NR Description: acyltransferase - like protein
  misc_feature (1)..(342): Homolog of NCBI NO: 10177550 NR Description: anthocyanin acyltransferase-like protein
  misc_feature (1)..(346): Homolog of NCBI NO: 15450469 NR Description: AT5g39050/MXF12_60 [Arabidopsis thaliana]
MVNEEMESSLKVIDVARVTPSNSDSSESLTLPLTFFDLLWYKLHAVERVIFYKLTDASRPFFDSVIVPNLKTSLSSSLSHYLPLAGKLVWEPLDPKPKIVYTPNDAVSFTVAESNADFSRLTGKEPFPTTELYPLVPELHVSDDSASAVSFQVTLFPNQGFCISVNAHHAVLDGKTTTNFLKSWARTCKNQDSFLPQDLIPVYDRTVIKDPMDLDTKILNAWHRVAKVFTGGKEPENPKSLKLLWSPEIGPDVFRYTLNLTREDIQKLRERLKKESSSSSVSSSPKELRLSTFVIVYSYALTCLIKARGGDPSRPVGYGFAVDCRSLMVPPVPSSYFGNCVSACLKCR

SEQ ID NO: 44241 - protein, 343 aa, Arabidopsis thaliana
  peptide (1)..(343): Ceres Seq. ID no. 12481744
  misc_feature (3)..(337): Pfam Name: Transferase family Pfam Description: Transferase family
  misc_feature (4)..(336): Homolog of NCBI NO: 15230049 NR Description: anthocyanin 5-aromatic acyltransferase, putative
  misc_feature (4)..(336): Homolog of NCBI NO: 15230048 NR Description: anthocyanin 5-aromatic acyltransferase, putative
  misc_feature (1)..(336): Homolog of NCBI NO: 15230013 NR Description: Anthocyanin 5-aromatic acyltransferase, putative
  misc_feature (4)..(336): Homolog of NCBI NO: 15230034 NR Description: hypothetical protein; protein id: At3g29635.1
  misc_feature (1)..(341): Homolog of NCBI NO: 15241632 NR Description: acyltransferase -like  protein
  misc_feature (1)..(339): Homolog of NCBI NO: 21593292 NR Description: acyltransferase-like protein [Arabidopsis
  misc_feature (1)..(339): Homolog of NCBI NO: 15241631 NR Description: acyltransferase -like protein
  misc_feature (1)..(343): Homolog of NCBI NO: 18421824 NR Description: acyltransferase - like protein
  misc_feature (1)..(337): Homolog of NCBI NO: 10177550 NR Description: anthocyanin acyltransferase-like protein
  misc_feature (1)..(341): Homolog of NCBI NO: 15450469 NR Description: AT5g39050/MXF12_60 [Arabidopsis thaliana]
MESSLKVIDVARVTPSNSDSSESLTLPLTFFDLLWYKLHAVERVIFYKLTDASRPFFDSVIVPNLKTSLSSSLSHYLPLAGKLVWEPLDPKPKIVYTPNDAVSFTVAESNADFSRLTGKEPFPTTELYPLVPELHVSDDSASAVSFQVTLFPNQGFCISVNAHHAVLDGKTTTNFLKSWARTCKNQDSFLPQDLIPVYDRTVIKDPMDLDTKILNAWHRVAKVFTGGKEPENPKSLKLLWSPEIGPDVFRYTLNLTREDIQKLRERLKKESSSSSVSSSPKELRLSTFVIVYSYALTCLIKARGGDPSRPVGYGFAVDCRSLMVPPVPSSYFGNCVSACLKCR

SEQ ID NO: 44242 - DNA, 1605 bp, Arabidopsis thaliana
  misc_feature (1)..(1605): Ceres Seq. ID no. 12481720
  misc_feature: MA Experiment ID: 20000307 Result: Up-regulated in Transcription
  misc_feature: MA Experiment 20000307 PARAMETER Experiment Name: At_Germinating_Seeds_Sub_P Parameter: Age (hr) Value: 24 vs. 0
  misc_feature: MA Experiment 20000307 PARAMETER Experiment Name: At_Germinating_Seeds_Sub_P Parameter: Organism Value: A. thaliana
  misc_feature: MA Experiment 20000307 PARAMETER Experiment Name: At_Germinating_Seeds_Sub_P Parameter: Plant Line Value: WS
  misc_feature: MA Experiment 20000307 PARAMETER Experiment Name: At_Germinating_Seeds_Sub_P Parameter: Tissue Value: Germinating Seeds
  misc_feature: MA Experiment ID: 20000314 Result: Down-regulated in Transcription
  misc_feature: MA Experiment 20000314 PARAMETER Experiment Name: At_14day_Shoots-Roots_Sub_P Parameter: Age (day) Value: 14
  misc_feature: MA Experiment 20000314 PARAMETER Experiment Name: At_14day_Shoots-Roots_Sub_P Parameter: Organism Value: A. thaliana
  misc_feature: MA Experiment 20000314 PARAMETER Experiment Name: At_14day_Shoots-Roots_Sub_P Parameter: Plant Line Value: WS
  misc_feature: MA Experiment 20000314 PARAMETER Experiment Name: At_14day_Shoots-Roots_Sub_P Parameter: Tissue Value: Roots vs. Whole Plant
  misc_feature: MA Experiment ID: 20000328 Result: Down-regulated in Transcription
  misc_feature: MA Experiment 20000328 PARAMETER Experiment Name: At_42deg_Heat_Sub_P Parameter: Age (day) Value: 14
  misc_feature: MA Experiment 20000328 PARAMETER Experiment Name: At_42deg_Heat_Sub_P Parameter: Organism Value: A. thaliana
  misc_feature: MA Experiment 20000328 PARAMETER Experiment Name: At_42deg_Heat_Sub_P Parameter: Plant Line Value: WS
  misc_feature: MA Experiment 20000328 PARAMETER Experiment Name: At_42deg_Heat_Sub_P Parameter: Temperature (deg C) Value: 42 vs. 22
  misc_feature: MA Experiment 20000328 PARAMETER Experiment Name: At_42deg_Heat_Sub_P Parameter: Timepoint (hr) Value: 6
  misc_feature: MA Experiment 20000328 PARAMETER Experiment Name: At_42deg_Heat_Sub_P Parameter: Tissue Value: Aerial
  misc_feature: MA Experiment ID: 20000346 Result: Up-regulated in Transcription
  misc_feature: MA Experiment 20000346 PARAMETER Experiment Name: At_2mM_SA_Sub_P Parameter: Age (day) Value: 14
  misc_feature: MA Experiment 20000346 PARAMETER Experiment Name: At_2mM_SA_Sub_P Parameter: Organism Value: A. thaliana
  misc_feature: MA Experiment 20000346 PARAMETER Experiment Name: At_2mM_SA_Sub_P Parameter: Plant Line Value: WS
  misc_feature: MA Experiment 20000346 PARAMETER Experiment Name: At_2mM_SA_Sub_P Parameter: Timepoint (hr) Value: 1
  misc_feature: MA Experiment 20000346 PARAMETER Experiment Name: At_2mM_SA_Sub_P Parameter: Tissue Value: Aerial
  misc_feature: MA Experiment 20000346 PARAMETER Experiment Name: At_2mM_SA_Sub_P Parameter: Treatment Value: 2mM SA vs. No Treatment
  misc_feature: MA Experiment ID: 20000347 Result: Up-regulated in Transcription
  misc_feature: MA Experiment 20000347 PARAMETER Experiment Name: At_2mM_SA_Sub_P Parameter: Age (day) Value: 14
  misc_feature: MA Experiment 20000347 PARAMETER Experiment Name: At_2mM_SA_Sub_P Parameter: Organism Value: A. thaliana
  misc_feature: MA Experiment 20000347 PARAMETER Experiment Name: At_2mM_SA_Sub_P Parameter: Plant Line Value: WS
  misc_feature: MA Experiment 20000347 PARAMETER Experiment Name: At_2mM_SA_Sub_P Parameter: Timepoint (hr) Value: 6
  misc_feature: MA Experiment 20000347 PARAMETER Experiment Name: At_2mM_SA_Sub_P Parameter: Tissue Value: Aerial
  misc_feature: MA Experiment 20000347 PARAMETER Experiment Name: At_2mM_SA_Sub_P Parameter: Treatment Value: 2mM SA vs. No Treatment
  misc_feature: MA Experiment ID: 20000355 Result: Down-regulated in Transcription
  misc_feature: MA Experiment 20000355 PARAMETER Experiment Name: At_Siliques_Sub_P Parameter: Age (day) Value: 21
  misc_feature: MA Experiment 20000355 PARAMETER Experiment Name: At_Siliques_Sub_P Parameter: Organism Value: A. thaliana
  misc_feature: MA Experiment 20000355 PARAMETER Experiment Name: At_Siliques_Sub_P Parameter: Plant Line Value: WS
  misc_feature: MA Experiment 20000355 PARAMETER Experiment Name: At_Siliques_Sub_P Parameter: Tissue Value: Less Than 5mm Siliques vs. Whole Plant
aaaactcacatttgttcattacaaaaagaggaaactgacaactgatttcgcgcaagagaaagaaaaatgggatctcagatcattcataactcacaaaaaccacatgtagtttgtgttccatatccggctcaaggccacatcaaccctatgatgagagtggctaaactcctccacgccagaggcttctacgtcaccttcgtcaacaccgtctacaaccacaatcgtttccttcgttctcgtgggtccaatgccctagatggacttccttcgttccgatttgagtccattgctgacggtctaccagagacagacatggatgccacgcaggacatcacagctctttgcgagtccaccatgaagaactgtctcgctccgttcagagagcttctccagcggatcaacgctggagataatgttcctccggtaagctgtattgtatctgacggttgtatgagctttactcttgatgttgcggaggagcttggagtcccggaggttcttttttggacaaccagtggctgtgcgttcctggcttatctacacttttatctcttcatcgagaagggcttatgtccgctaaaagatgagagttacttgacgaaggagtacttagaagacacggttatagattttataccaaccatgaagaatgtgaaactaaaggatattcctagcttcatacgtaccactaatcctgatgatgttatgattagtttcgccctccgcgagaccgagcgagccaaacgtgcttctgctatcattctaaacacatttgatgaccttgagcatgatgttgttcatgctatgcaatctatcttacctccggtttattcagttggaccgcttcatctcttagcaaaccgggagattgaagaaggtagtgagattggaatgatgagttcgaatttatggaaagaggagatggagtgtttggattggcttgatactaagactcaaaatagtgtcatttatatcaactttgggagcataacggttttgagtgtgaagcagcttgtggagtttgcttggggtttggcgggaagtgggaaagagtttttatgggtgatccggccagatttagtagcgggagaggaggctatggttccgccggactttttaatggagactaaagaccgcagtatgctagcgagttggtgtcctcaagagaaagtactttctcatcctgctattggagggtttttgacgcattgcgggtggaactcgatattggaaagtctttcgtgtggagttccgatggtgtgttggccattttttgctgaccagcaaatgaattgtaagttttgttgtgacgagtgggatgttgggattgagataggtggagatgtgaagagagaggaagttgaggcggtggttagagagctcatggatggagagaagggaaagaaaatgagagaaaaggcggtagagtggcagcgcttagccgagaaagcgacggaacataaacttggttcttccgttatgaattttgagacggttgttagcaagtttcttttgggacaaaaatcacaggattaactaaaatataagatgatcatcgaaatgtattattttttctataatgattactaagtaagtgtttatttt

SEQ ID NO: 44243 - protein, 489 aa, Arabidopsis thaliana
  peptide (1)..(489): Ceres Seq. ID no. 12481721
  misc_feature (12)..(485): Pfam Name: UDP-glucoronosyl and UDP-glucosyl transferase Pfam Description: UDP-glucoronosyl and UDP-glucosyl transferase
  misc_feature (8)..(482): Homolog of NCBI NO: 15218268 NR Description: UDP-glucose glucosyltransferase, putative
  misc_feature (1)..(183): Homolog of NCBI NO: 25286822 NR Description: hypothetical protein T16E15.4 - Arabidopsis
  misc_feature (228)..(483): Homolog of NCBI NO: 25286822 NR Description: hypothetical protein T16E15.4 - Arabidopsis
  misc_feature (1)..(485): Homolog of NCBI NO: 25286821 NR Description: T16E15.2 protein - Arabidopsis thaliana
  misc_feature (419)..(485): Homolog of NCBI NO: 15220950 NR Description: UDP-glucose glucosyltransferase, putative
  misc_feature (1)..(398): Homolog of NCBI NO: 15220950 NR Description: UDP-glucose glucosyltransferase, putative
  misc_feature (1)..(483): Homolog of NCBI NO: 15219867 NR Description: UDP-glucose glucosyltransferase, putative
  misc_feature (1)..(485): Homolog of NCBI NO: 17065006 NR Description: UDP-glucose glucosyltransferase [Arabidopsis
  misc_feature (1)..(485): Homolog of NCBI NO: 15219870 NR Description: UDP-glucose glucosyltransferase
  misc_feature (1)..(489): Homolog of NCBI NO: 15219876 NR Description: UDP-glucose glucosyltransferase, putative
MGSQIIHNSQKPHVVCVPYPAQGHINPMMRVAKLLHARGFYVTFVNTVYNHNRFLRSRGSNALDGLPSFRFESIADGLPETDMDATQDITALCESTMKNCLAPFRELLQRINAGDNVPPVSCIVSDGCMSFTLDVAEELGVPEVLFWTTSGCAFLAYLHFYLFIEKGLCPLKDESYLTKEYLEDTVIDFIPTMKNVKLKDIPSFIRTTNPDDVMISFALRETERAKRASAIILNTFDDLEHDVVHAMQSILPPVYSVGPLHLLANREIEEGSEIGMMSSNLWKEEMECLDWLDTKTQNSVIYINFGSITVLSVKQLVEFAWGLAGSGKEFLWVIRPDLVAGEEAMVPPDFLMETKDRSMLASWCPQEKVLSHPAIGGFLTHCGWNSILESLSCGVPMVCWPFFADQQMNCKFCCDEWDVGIEIGGDVKREEVEAVVRELMDGEKGKKMREKAVEWQRLAEKATEHKLGSSVMNFETVVSKFLLGQKSQD

SEQ ID NO: 44244 - protein, 462 aa, Arabidopsis thaliana
  peptide (1)..(462): Ceres Seq. ID no. 12481722
  misc_feature (1)..(458): Pfam Name: UDP-glucoronosyl and UDP-glucosyl transferase Pfam Description: UDP-glucoronosyl and UDP-glucosyl transferase
  misc_feature (1)..(455): Homolog of NCBI NO: 15218268 NR Description: UDP-glucose glucosyltransferase, putative
  misc_feature (1)..(156): Homolog of NCBI NO: 25286822 NR Description: hypothetical protein T16E15.4 - Arabidopsis
  misc_feature (201)..(456): Homolog of NCBI NO: 25286822 NR Description: hypothetical protein T16E15.4 - Arabidopsis
  misc_feature (1)..(458): Homolog of NCBI NO: 25286821 NR Description: T16E15.2 protein - Arabidopsis thaliana
  misc_feature (392)..(458): Homolog of NCBI NO: 15220950 NR Description: UDP-glucose glucosyltransferase, putative
  misc_feature (1)..(371): Homolog of NCBI NO: 15220950 NR Description: UDP-glucose glucosyltransferase, putative
  misc_feature (1)..(456): Homolog of NCBI NO: 15219867 NR Description: UDP-glucose glucosyltransferase, putative
  misc_feature (1)..(458): Homolog of NCBI NO: 17065006 NR Description: UDP-glucose glucosyltransferase [Arabidopsis
  misc_feature (1)..(458): Homolog of NCBI NO: 15219870 NR Description: UDP-glucose glucosyltransferase
  misc_feature (1)..(462): Homolog of NCBI NO: 15219876 NR Description: UDP-glucose glucosyltransferase, putative
MMRVAKLLHARGFYVTFVNTVYNHNRFLRSRGSNALDGLPSFRFESIADGLPETDMDATQDITALCESTMKNCLAPFRELLQRINAGDNVPPVSCIVSDGCMSFTLDVAEELGVPEVLFWTTSGCAFLAYLHFYLFIEKGLCPLKDESYLTKEYLEDTVIDFIPTMKNVKLKDIPSFIRTTNPDDVMISFALRETERAKRASAIILNTFDDLEHDVVHAMQSILPPVYSVGPLHLLANREIEEGSEIGMMSSNLWKEEMECLDWLDTKTQNSVIYINFGSITVLSVKQLVEFAWGLAGSGKEFLWVIRPDLVAGEEAMVPPDFLMETKDRSMLASWCPQEKVLSHPAIGGFLTHCGWNSILESLSCGVPMVCWPFFADQQMNCKFCCDEWDVGIEIGGDVKREEVEAVVRELMDGEKGKKMREKAVEWQRLAEKATEHKLGSSVMNFETVVSKFLLGQKSQD

SEQ ID NO: 44245 - protein, 461 aa, Arabidopsis thaliana
  peptide (1)..(461): Ceres Seq. ID no. 12481723
  misc_feature (1)..(457): Pfam Name: UDP-glucoronosyl and UDP-glucosyl transferase Pfam Description: UDP-glucoronosyl and UDP-glucosyl transferase
  misc_feature (1)..(454): Homolog of NCBI NO: 15218268 NR Description: UDP-glucose glucosyltransferase, putative
  misc_feature (1)..(155): Homolog of NCBI NO: 25286822 NR Description: hypothetical protein T16E15.4 - Arabidopsis
  misc_feature (200)..(455): Homolog of NCBI NO: 25286822 NR Description: hypothetical protein T16E15.4 - Arabidopsis
  misc_feature (1)..(457): Homolog of NCBI NO: 25286821 NR Description: T16E15.2 protein - Arabidopsis thaliana
  misc_feature (391)..(457): Homolog of NCBI NO: 15220950 NR Description: UDP-glucose glucosyltransferase, putative
  misc_feature (1)..(370): Homolog of NCBI NO: 15220950 NR Description: UDP-glucose glucosyltransferase, putative
  misc_feature (1)..(455): Homolog of NCBI NO: 15219867 NR Description: UDP-glucose glucosyltransferase, putative
  misc_feature (1)..(457): Homolog of NCBI NO: 17065006 NR Description: UDP-glucose glucosyltransferase [Arabidopsis
  misc_feature (1)..(457): Homolog of NCBI NO: 15219870 NR Description: UDP-glucose glucosyltransferase
  misc_feature (1)..(461): Homolog of NCBI NO: 15219876 NR Description: UDP-glucose glucosyltransferase, putative
MRVAKLLHARGFYVTFVNTVYNHNRFLRSRGSNALDGLPSFRFESIADGLPETDMDATQDITALCESTMKNCLAPFRELLQRINAGDNVPPVSCIVSDGCMSFTLDVAEELGVPEVLFWTTSGCAFLAYLHFYLFIEKGLCPLKDESYLTKEYLEDTVIDFIPTMKNVKLKDIPSFIRTTNPDDVMISFALRETERAKRASAIILNTFDDLEHDVVHAMQSILPPVYSVGPLHLLANREIEEGSEIGMMSSNLWKEEMECLDWLDTKTQNSVIYINFGSITVLSVKQLVEFAWGLAGSGKEFLWVIRPDLVAGEEAMVPPDFLMETKDRSMLASWCPQEKVLSHPAIGGFLTHCGWNSILESLSCGVPMVCWPFFADQQMNCKFCCDEWDVGIEIGGDVKREEVEAVVRELMDGEKGKKMREKAVEWQRLAEKATEHKLGSSVMNFETVVSKFLLGQKSQD

SEQ ID NO: 44246 - DNA, 1879 bp, Arabidopsis thaliana; identical to SEQ ID NO: 21108
  misc_feature (1)..(1879): Ceres Seq. ID no. 13509253
  misc_feature: MA Experiment ID: 108461 Result: Up-regulated in Transcription
  misc_feature: MA Experiment 108461 PARAMETER Experiment Name: At_Germinating_Seeds_cDNA_P Parameter: Age (day) Value: 1 vs. 0
  misc_feature: MA Experiment 108461 PARAMETER Experiment Name: At_Germinating_Seeds_cDNA_P Parameter: Tissue Value: Germinating Seeds
  misc_feature: MA Experiment ID: 108462 Result: Up-regulated in Transcription
  misc_feature: MA Experiment 108462 PARAMETER Experiment Name: At_Germinating_Seeds_cDNA_P Parameter: Age (day) Value: 2 vs. 0
  misc_feature: MA Experiment 108462 PARAMETER Experiment Name: At_Germinating_Seeds_cDNA_P Parameter: Tissue Value: Germinating Seeds
  misc_feature: MA Experiment ID: 108463 Result: Up-regulated in Transcription
  misc_feature: MA Experiment 108463 PARAMETER Experiment Name: At_Germinating_Seeds_cDNA_P Parameter: Age (day) Value: 3 vs. 0
  misc_feature: MA Experiment 108463 PARAMETER Experiment Name: At_Germinating_Seeds_cDNA_P Parameter: Tissue Value: Germinating Seeds
  misc_feature: MA Experiment ID: 108464 Result: Up-regulated in Transcription
  misc_feature: MA Experiment 108464 PARAMETER Experiment Name: At_Germinating_Seeds_cDNA_P Parameter: Age (day) Value: 4 vs. 0
  misc_feature: MA Experiment 108464 PARAMETER Experiment Name: At_Germinating_Seeds_cDNA_P Parameter: Tissue Value: Germinating Seeds
  misc_feature: MA Experiment ID: 108561 Result: Down-regulated in Transcription
  misc_feature: MA Experiment 108561 PARAMETER Experiment Name: At_100uM_ABA_cDNA_P Parameter: Timepoint (hr) Value: 6
  misc_feature: MA Experiment 108561 PARAMETER Experiment Name: At_100uM_ABA_cDNA_P Parameter: Tissue Value: Aerial
  misc_feature: MA Experiment 108561 PARAMETER Experiment Name: At_100uM_ABA_cDNA_P Parameter: Treatment Value: 100uM ABA vs. No Treatment
  misc_feature: MA Experiment ID: 108577 Result: Down-regulated in Transcription
  misc_feature: MA Experiment 108577 PARAMETER Experiment Name: At_42deg_Heat_cDNA_P Parameter: Temperature (deg C) Value: 42 vs. 22
  misc_feature: MA Experiment 108577 PARAMETER Experiment Name: At_42deg_Heat_cDNA_P Parameter: Timepoint (hr) Value: 6
  misc_feature: MA Experiment 108577 PARAMETER Experiment Name: At_42deg_Heat_cDNA_P Parameter: Tissue Value: Aerial
  misc_feature: MA Experiment ID: 108595 Result: Down-regulated in Transcription
  misc_feature: MA Experiment 108595 PARAMETER Experiment Name: At_Ler-pi_Ovule_cDNA_P Parameter: Plant Line Value: null
  misc_feature: MA Experiment ID: 20000030 Result: Down-regulated in Transcription
  misc_feature: MA Experiment 20000030 PARAMETER Experiment Name: At_CS6630_Roots_cDNA_P Parameter: Plant Line Value: CS6630 vs. WS
  misc_feature: MA Experiment 20000030 PARAMETER Experiment Name: At_CS6630_Roots_cDNA_P Parameter: Tissue Value: Roots
  misc_feature: MA Experiment ID: 20000069 Result: Down-regulated in Transcription
  misc_feature: MA Experiment 20000069 PARAMETER Experiment Name: At_100uM_ABA_Mutants_cDNA_P Parameter: Plant Line Value: CS23
  misc_feature: MA Experiment 20000069 PARAMETER Experiment Name: At_100uM_ABA_Mutants_cDNA_P Parameter: Timepoint (hr) Value: 6
  misc_feature: MA Experiment 20000069 PARAMETER Experiment Name: At_100uM_ABA_Mutants_cDNA_P Parameter: Tissue Value: Aerial
  misc_feature: MA Experiment 20000069 PARAMETER Experiment Name: At_100uM_ABA_Mutants_cDNA_P Parameter: Treatment Value: 100uM ABA vs. No Treatment
  misc_feature: MA Experiment ID: 20000086 Result: Down-regulated in Transcription
  misc_feature: MA Experiment 20000086 PARAMETER Experiment Name: At_100uM_ABA_Mutants_cDNA_P Parameter: Plant Line Value: CS22
  misc_feature: MA Experiment 20000086 PARAMETER Experiment Name: At_100uM_ABA_Mutants_cDNA_P Parameter: Timepoint (hr) Value: 6
  misc_feature: MA Experiment 20000086 PARAMETER Experiment Name: At_100uM_ABA_Mutants_cDNA_P Parameter: Tissue Value: Aerial
  misc_feature: MA Experiment 20000086 PARAMETER Experiment Name: At_100uM_ABA_Mutants_cDNA_P Parameter: Treatment Value: 100uM ABA vs. No Treatment
  misc_feature: MA Experiment ID: 20000087 Result: Down-regulated in Transcription
  misc_feature: MA Experiment 20000087 PARAMETER Experiment Name: At_100uM_ABA_Mutants_cDNA_P Parameter: Plant Line Value: WS
  misc_feature: MA Experiment 20000087 PARAMETER Experiment Name: At_100uM_ABA_Mutants_cDNA_P Parameter: Timepoint (hr) Value: 6
  misc_feature: MA Experiment 20000087 PARAMETER Experiment Name: At_100uM_ABA_Mutants_cDNA_P Parameter: Tissue Value: Aerial
  misc_feature: MA Experiment 20000087 PARAMETER Experiment Name: At_100uM_ABA_Mutants_cDNA_P Parameter: Treatment Value: 100uM ABA vs. No Treatment
  misc_feature: MA Experiment ID: 20000113 Result: Down-regulated in Transcription
  misc_feature: MA Experiment 20000113 PARAMETER Experiment Name: At_42deg_Heat_cDNA_P Parameter: Temperature (deg C) Value: 42 vs. 22
  misc_feature: MA Experiment 20000113 PARAMETER Experiment Name: At_42deg_Heat_cDNA_P Parameter: Timepoint (hr) Value: 8
  misc_feature: MA Experiment 20000113 PARAMETER Experiment Name: At_42deg_Heat_cDNA_P Parameter: Tissue Value: Aerial
  misc_feature: MA Experiment ID: 20000117 Result: Down-regulated in Transcription
  misc_feature: MA Experiment 20000117 PARAMETER Experiment Name: At_100uM_ABA_Mutants_cDNA_P Parameter: Plant Line Value: Columbia
  misc_feature: MA Experiment 20000117 PARAMETER Experiment Name: At_100uM_ABA_Mutants_cDNA_P Parameter: Timepoint (hr) Value: 6
  misc_feature: MA Experiment 20000117 PARAMETER Experiment Name: At_100uM_ABA_Mutants_cDNA_P Parameter: Tissue Value: Aerial
  misc_feature: MA Experiment 20000117 PARAMETER Experiment Name: At_100uM_ABA_Mutants_cDNA_P Parameter: Treatment Value: 100uM ABA vs. No Treatment
  misc_feature: MA Experiment ID: 20000307 Result: Up-regulated in Transcription
  misc_feature: MA Experiment 20000307 PARAMETER Experiment Name: At_Germinating_Seeds_Sub_P Parameter: Age (hr) Value: 24 vs. 0
  misc_feature: MA Experiment 20000307 PARAMETER Experiment Name: At_Germinating_Seeds_Sub_P Parameter: Organism Value: A. thaliana
  misc_feature: MA Experiment 20000307 PARAMETER Experiment Name: At_Germinating_Seeds_Sub_P Parameter: Plant Line Value: WS
  misc_feature: MA Experiment 20000307 PARAMETER Experiment Name: At_Germinating_Seeds_Sub_P Parameter: Tissue Value: Germinating Seeds
  misc_feature: MA Experiment ID: 20000314 Result: Down-regulated in Transcription
  misc_feature: MA Experiment 20000314 PARAMETER Experiment Name: At_14day_Shoots-Roots_Sub_P Parameter: Age (day) Value: 14
  misc_feature: MA Experiment 20000314 PARAMETER Experiment Name: At_14day_Shoots-Roots_Sub_P Parameter: Organism Value: A. thaliana
  misc_feature: MA Experiment 20000314 PARAMETER Experiment Name: At_14day_Shoots-Roots_Sub_P Parameter: Plant Line Value: WS
  misc_feature: MA Experiment 20000314 PARAMETER Experiment Name: At_14day_Shoots-Roots_Sub_P Parameter: Tissue Value: Roots vs. Whole Plant
  misc_feature: MA Experiment ID: 20000315 Result: Up-regulated in Transcription
  misc_feature: MA Experiment 20000315 PARAMETER Experiment Name: At_14day_Shoots-Roots_Sub_P Parameter: Age (day) Value: 14
  misc_feature: MA Experiment 20000315 PARAMETER Experiment Name: At_14day_Shoots-Roots_Sub_P Parameter: Organism Value: A. thaliana
  misc_feature: MA Experiment 20000315 PARAMETER Experiment Name: At_14day_Shoots-Roots_Sub_P Parameter: Plant Line Value: WS
  misc_feature: MA Experiment 20000315 PARAMETER Experiment Name: At_14day_Shoots-Roots_Sub_P Parameter: Tissue Value: Shoots vs. Whole Plant
  misc_feature: MA Experiment ID: 20000328 Result: Down-regulated in Transcription
  misc_feature: MA Experiment 20000328 PARAMETER Experiment Name: At_42deg_Heat_Sub_P Parameter: Age (day) Value: 14
  misc_feature: MA Experiment 20000328 PARAMETER Experiment Name: At_42deg_Heat_Sub_P Parameter: Organism Value: A. thaliana
  misc_feature: MA Experiment 20000328 PARAMETER Experiment Name: At_42deg_Heat_Sub_P Parameter: Plant Line Value: WS
  misc_feature: MA Experiment 20000328 PARAMETER Experiment Name: At_42deg_Heat_Sub_P Parameter: Temperature (deg C) Value: 42 vs. 22
  misc_feature: MA Experiment 20000328 PARAMETER Experiment Name: At_42deg_Heat_Sub_P Parameter: Timepoint (hr) Value: 6
  misc_feature: MA Experiment 20000328 PARAMETER Experiment Name: At_42deg_Heat_Sub_P Parameter: Tissue Value: Aerial
  misc_feature: MA Experiment ID: 20000440 Result: Up-regulated in Transcription
  misc_feature: MA Experiment 20000440 PARAMETER Experiment Name: At_Closed-Flower__Sub_P Parameter: Tissue Value: Closed Flower vs. Whole Plant

SEQ ID NO: 44247 - protein, 399 aa, Arabidopsis thaliana; identical to SEQ ID NO: 21109
  peptide (1)..(399): Ceres Seq. ID no. 13509254
  misc_feature (185)..(302): Pfam Name: Acyltransferase Pfam Description: Acyltransferase
  misc_feature (185)..(302): Pfam Name: Acyltransferase Pfam Description: Acyltransferase
  misc_feature (3)..(107): Homolog of NCBI NO: 15236810 NR Description: expressed protein [Arabidopsis thaliana]
  misc_feature (3)..(395): Homolog of NCBI NO: 15239924 NR Description: phospholipid/glycerol acyltransferase family
  misc_feature (3)..(395): Homolog of NCBI NO: 15229747 NR Description: expressed protein [Arabidopsis thaliana]
  misc_feature (3)..(393): Homolog of NCBI NO: 37534314 NR Description: hypothetical protein [Oryza sativa (japonica
  misc_feature (3)..(399): Homolog of NCBI NO: 29788867 NR Description: hypothetical protein [Oryza sativa (japonica
  misc_feature (3)..(107): Homolog of NCBI NO: 15236810 NR Description: expressed protein [Arabidopsis thaliana]
  misc_feature (3)..(395): Homolog of NCBI NO: 15229747 NR Description: expressed protein [Arabidopsis thaliana]
  misc_feature (3)..(399): Homolog of NCBI NO: 29788867 NR Description: hypothetical protein [Oryza sativa (japonica
  misc_feature (1)..(398): Homolog of NCBI NO: 15223437 NR Description: expressed protein [Arabidopsis thaliana]
  misc_feature (1)..(398): Homolog of NCBI NO: 17064780 NR Description: Unknown protein [Arabidopsis thaliana]
  misc_feature (3)..(391): Homolog of NCBI NO: 15224445 NR Description: phospholipid/glycerol acyltransferase family
  misc_feature (111)..(399): Homolog of NCBI NO: 15236797 NR Description: expressed protein [Arabidopsis thaliana]
  misc_feature (3)..(399): Homolog of NCBI NO: 38000002 NR Description: unknown protein [Oryza sativa (japonica
  misc_feature (3)..(393): Homolog of NCBI NO: 37534314 NR Description: hypothetical protein [Oryza sativa (japonica
  misc_feature (3)..(395): Homolog of NCBI NO: 15239924 NR Description: phospholipid/glycerol acyltransferase family
  misc_feature (3)..(399): Homolog of NCBI NO: 38000002 NR Description: unknown protein [Oryza sativa (japonica
  misc_feature (111)..(399): Homolog of NCBI NO: 15236797 NR Description: expressed protein [Arabidopsis thaliana]
  misc_feature (3)..(391): Homolog of NCBI NO: 15224445 NR Description: phospholipid/glycerol acyltransferase family
  misc_feature (1)..(398): Homolog of NCBI NO: 17064780 NR Description: Unknown protein [Arabidopsis thaliana]
  misc_feature (1)..(398): Homolog of NCBI NO: 15223437 NR Description: expressed protein [Arabidopsis thaliana]

SEQ ID NO: 44248 - protein, 367 aa, Arabidopsis thaliana; identical to SEQ ID NO: 21110
  peptide (1)..(367): Ceres Seq. ID no. 13509255
  misc_feature (153)..(270): Pfam Name: Acyltransferase Pfam Description: Acyltransferase
  misc_feature (153)..(270): Pfam Name: Acyltransferase Pfam Description: Acyltransferase
  misc_feature (1)..(75): Homolog of NCBI NO: 15236810 NR Description: expressed protein [Arabidopsis thaliana]
  misc_feature (1)..(363): Homolog of NCBI NO: 15239924 NR Description: phospholipid/glycerol acyltransferase family
  misc_feature (1)..(363): Homolog of NCBI NO: 15229747 NR Description: expressed protein [Arabidopsis thaliana]
  misc_feature (1)..(361): Homolog of NCBI NO: 37534314 NR Description: hypothetical protein [Oryza sativa (japonica
  misc_feature (1)..(367): Homolog of NCBI NO: 29788867 NR Description: hypothetical protein [Oryza sativa (japonica
  misc_feature (1)..(75): Homolog of NCBI NO: 15236810 NR Description: expressed protein [Arabidopsis thaliana]
  misc_feature (1)..(363): Homolog of NCBI NO: 15229747 NR Description: expressed protein [Arabidopsis thaliana]
  misc_feature (1)..(367): Homolog of NCBI NO: 29788867 NR Description: hypothetical protein [Oryza sativa (japonica
  misc_feature (1)..(366): Homolog of NCBI NO: 15223437 NR Description: expressed protein [Arabidopsis thaliana]
  misc_feature (1)..(366): Homolog of NCBI NO: 17064780 NR Description: Unknown protein [Arabidopsis thaliana]
  misc_feature (1)..(359): Homolog of NCBI NO: 15224445 NR Description: phospholipid/glycerol acyltransferase family
  misc_feature (79)..(367): Homolog of NCBI NO: 15236797 NR Description: expressed protein [Arabidopsis thaliana]
  misc_feature (1)..(367): Homolog of NCBI NO: 38000002 NR Description: unknown protein [Oryza sativa (japonica
  misc_feature (1)..(361): Homolog of NCBI NO: 37534314 NR Description: hypothetical protein [Oryza sativa (japonica
  misc_feature (1)..(363): Homolog of NCBI NO: 15239924 NR Description: phospholipid/glycerol acyltransferase family
  misc_feature (1)..(367): Homolog of NCBI NO: 38000002 NR Description: unknown protein [Oryza sativa (japonica
  misc_feature (79)..(367): Homolog of NCBI NO: 15236797 NR Description: expressed protein [Arabidopsis thaliana]
  misc_feature (1)..(359): Homolog of NCBI NO: 15224445 NR Description: phospholipid/glycerol acyltransferase family
  misc_feature (1)..(366): Homolog of NCBI NO: 17064780 NR Description: Unknown protein [Arabidopsis thaliana]
  misc_feature (1)..(366): Homolog of NCBI NO: 15223437 NR Description: expressed protein [Arabidopsis thaliana]

SEQ ID NO: 44249 - protein, 297 aa, Arabidopsis thaliana; identical to SEQ ID NO: 21111
  peptide (1)..(297): Ceres Seq. ID no. 13509256
  misc_feature (83)..(200): Pfam Name: Acyltransferase Pfam Description: Acyltransferase
  misc_feature (83)..(200): Pfam Name: Acyltransferase Pfam Description: Acyltransferase
  misc_feature (1)..(290): Homolog of NCBI NO: 18378959 NR Description: phospholipid/glycerol acyltransferase family
  misc_feature (1)..(293): Homolog of NCBI NO: 15239924 NR Description: phospholipid/glycerol acyltransferase family
  misc_feature (1)..(293): Homolog of NCBI NO: 15229747 NR Description: expressed protein [Arabidopsis thaliana]
  misc_feature (1)..(291): Homolog of NCBI NO: 37534314 NR Description: hypothetical protein [Oryza sativa (japonica
  misc_feature (1)..(297): Homolog of NCBI NO: 29788867 NR Description: hypothetical protein [Oryza sativa (japonica
  misc_feature (1)..(290): Homolog of NCBI NO: 18378959 NR Description: phospholipid/glycerol acyltransferase family
  misc_feature (1)..(293): Homolog of NCBI NO: 15229747 NR Description: expressed protein [Arabidopsis thaliana]
  misc_feature (1)..(296): Homolog of NCBI NO: 17064780 NR Description: Unknown protein [Arabidopsis thaliana]
  misc_feature (1)..(289): Homolog of NCBI NO: 15224445 NR Description: phospholipid/glycerol acyltransferase family
  misc_feature (9)..(297): Homolog of NCBI NO: 15236797 NR Description: expressed protein [Arabidopsis thaliana]
  misc_feature (1)..(297): Homolog of NCBI NO: 38000002 NR Description: unknown protein [Oryza sativa (japonica
  misc_feature (1)..(297): Homolog of NCBI NO: 29788867 NR Description: hypothetical protein [Oryza sativa (japonica
  misc_feature (1)..(291): Homolog of NCBI NO: 37534314 NR Description: hypothetical protein [Oryza sativa (japonica
  misc_feature (1)..(293): Homolog of NCBI NO: 15239924 NR Description: phospholipid/glycerol acyltransferase family
  misc_feature (1)..(296): Homolog of NCBI NO: 15223437 NR Description: expressed protein [Arabidopsis thaliana]
  misc_feature (1)..(297): Homolog of NCBI NO: 38000002 NR Description: unknown protein [Oryza sativa (japonica
  misc_feature (9)..(297): Homolog of NCBI NO: 15236797 NR Description: expressed protein [Arabidopsis thaliana]
  misc_feature (1)..(289): Homolog of NCBI NO: 15224445 NR Description: phospholipid/glycerol acyltransferase family
  misc_feature (1)..(296): Homolog of NCBI NO: 17064780 NR Description: Unknown protein [Arabidopsis thaliana]
  misc_feature (1)..(296): Homolog of NCBI NO: 15223437 NR Description: expressed protein [Arabidopsis thaliana]

SEQ ID NO: 44250 - DNA, 1235 bp, Arabidopsis thaliana
  misc_feature (1)..(1235): Ceres Seq. ID no. 15174473
  misc_feature: MA Experiment ID: 108434 Result: Down-regulated in Transcription
  misc_feature: MA Experiment 108434 PARAMETER Experiment Name: At_Root_Tips_cDNA_P Parameter: Tissue Value: Root Tips
  misc_feature: MA Experiment ID: 108435 Result: Up-regulated in Transcription
  misc_feature: MA Experiment 108435 PARAMETER Experiment Name: At_stm_Mutants_cDNA_P Parameter: Plant Line Value: wt Landsburg vs stm
  misc_feature: MA Experiment 108435 PARAMETER Experiment Name: At_stm_Mutants_cDNA_P Parameter: Tissue Value: Shoot Apical Meristem Region
  misc_feature: MA Experiment ID: 108462 Result: Up-regulated in Transcription
  misc_feature: MA Experiment 108462 PARAMETER Experiment Name: At_Germinating_Seeds_cDNA_P Parameter: Age (day) Value: 2 vs. 0
  misc_feature: MA Experiment 108462 PARAMETER Experiment Name: At_Germinating_Seeds_cDNA_P Parameter: Tissue Value: Germinating Seeds
  misc_feature: MA Experiment ID: 108463 Result: Up-regulated in Transcription
  misc_feature: MA Experiment 108463 PARAMETER Experiment Name: At_Germinating_Seeds_cDNA_P Parameter: Age (day) Value: 3 vs. 0
  misc_feature: MA Experiment 108463 PARAMETER Experiment Name: At_Germinating_Seeds_cDNA_P Parameter: Tissue Value: Germinating Seeds
  misc_feature: MA Experiment ID: 108464 Result: Up-regulated in Transcription
  misc_feature: MA Experiment 108464 PARAMETER Experiment Name: At_Germinating_Seeds_cDNA_P Parameter: Age (day) Value: 4 vs. 0
  misc_feature: MA Experiment 108464 PARAMETER Experiment Name: At_Germinating_Seeds_cDNA_P Parameter: Tissue Value: Germinating Seeds
  misc_feature: MA Experiment ID: 108489 Result: Up-regulated in Transcription
  misc_feature: MA Experiment ID: 108569 Result: Up-regulated in Transcription
  misc_feature: MA Experiment 108569 PARAMETER Experiment Name: At_0.001%_MeJA__cDNA_P Parameter: Timepoint (hr) Value: 6
  misc_feature: MA Experiment 108569 PARAMETER Experiment Name: At_0.001%_MeJA__cDNA_P Parameter: Tissue Value: Aerial
  misc_feature: MA Experiment 108569 PARAMETER Experiment Name: At_0.001%_MeJA__cDNA_P Parameter: Treatment Value: 0.001% MeJA vs. No Treatment
  misc_feature: MA Experiment ID: 108573 Result: Up-regulated in Transcription
  misc_feature: MA Experiment 108573 PARAMETER Experiment Name: At_Drought_cDNA_P Parameter: Timepoint (hr) Value: 6
  misc_feature: MA Experiment 108573 PARAMETER Experiment Name: At_Drought_cDNA_P Parameter: Tissue Value: Aerial
  misc_feature: MA Experiment 108573 PARAMETER Experiment Name: At_Drought_cDNA_P Parameter: Treatment Value: Drought vs. No Drought
  misc_feature: MA Experiment ID: 20000184 Result: Up-regulated in Transcription
  misc_feature: MA Experiment 20000184 PARAMETER Experiment Name: At_Shoots__P Parameter: Age (day) Value: 7
  misc_feature: MA Experiment 20000184 PARAMETER Experiment Name: At_Shoots__P Parameter: Tissue Value: Shoots vs. Whole Plant
  misc_feature: MA Experiment ID: 20000185 Result: Up-regulated in Transcription
  misc_feature: MA Experiment 20000185 PARAMETER Experiment Name: At_Roots__P Parameter: Age (day) Value: 7 vs. 21
  misc_feature: MA Experiment 20000185 PARAMETER Experiment Name: At_Roots__P Parameter: Organism Value: A. thaliana
  misc_feature: MA Experiment 20000185 PARAMETER Experiment Name: At_Roots__P Parameter: Tissue Value: Roots vs. Whole Plant
  misc_feature: MA Experiment ID: 20000227 Result: Down-regulated in Transcription
  misc_feature: MA Experiment 20000227 PARAMETER Experiment Name: At_Root-Tips-vs-Tops_P Parameter: Tissue Value: Root Tips vs. Root Tops
  misc_feature: MA Experiment ID: 20000438 Result: Up-regulated in Transcription
  misc_feature: MA Experiment 20000438 PARAMETER Experiment Name: At_Shoots__P Parameter: Age (day) Value: 14
  misc_feature: MA Experiment 20000438 PARAMETER Experiment Name: At_Shoots__P Parameter: Tissue Value: Shoots vs. Whole Plant
  misc_feature: MA Experiment ID: 20000439 Result: Up-regulated in Transcription
  misc_feature: MA Experiment 20000439 PARAMETER Experiment Name: At_Roots__P Parameter: Age (day) Value: 14 vs. 21
  misc_feature: MA Experiment 20000439 PARAMETER Experiment Name: At_Roots__P Parameter: Organism Value: A. thaliana
  misc_feature: MA Experiment 20000439 PARAMETER Experiment Name: At_Roots__P Parameter: Tissue Value: Roots vs. Whole Plant
  misc_feature: MA Experiment ID: 20000452 Result: Up-regulated in Transcription
  misc_feature: MA Experiment 20000452 PARAMETER Experiment Name: At_CS6879_Shoots-Roots_P Parameter: Age (day) Value: 14
  misc_feature: MA Experiment 20000452 PARAMETER Experiment Name: At_CS6879_Shoots-Roots_P Parameter: Organism Value: A. thaliana
  misc_feature: MA Experiment 20000452 PARAMETER Experiment Name: At_CS6879_Shoots-Roots_P Parameter: Plant Line Value: CS6879 vs. WS
  misc_feature: MA Experiment 20000452 PARAMETER Experiment Name: At_CS6879_Shoots-Roots_P Parameter: Tissue Value: Shoots
  misc_feature: MA Experiment ID: 20000453 Result: Up-regulated in Transcription
  misc_feature: MA Experiment 20000453 PARAMETER Experiment Name: At_100uM_ABA_P Parameter: Age (day) Value: 15
  misc_feature: MA Experiment 20000453 PARAMETER Experiment Name: At_100uM_ABA_P Parameter: Organism Value: A. thaliana
  misc_feature: MA Experiment 20000453 PARAMETER Experiment Name: At_100uM_ABA_P Parameter: Plant Line Value: WS
  misc_feature: MA Experiment 20000453 PARAMETER Experiment Name: At_100uM_ABA_P Parameter: Timepoint (hr) Value: 24
  misc_feature: MA Experiment 20000453 PARAMETER Experiment Name: At_100uM_ABA_P Parameter: Tissue Value: Aerial
  misc_feature: MA Experiment 20000453 PARAMETER Experiment Name: At_100uM_ABA_P Parameter: Treatment Value: 100uM ABA vs. No Treatment
  misc_feature: MA Experiment ID: 20001450 Result: Down-regulated in Transcription
  misc_feature: MA Experiment 20001450 PARAMETER Experiment Name: At_Far-red-induction_P Parameter: Age (day) Value: 7
  misc_feature: MA Experiment 20001450 PARAMETER Experiment Name: At_Far-red-induction_P Parameter: Light Value: Far-red vs. White
  misc_feature: MA Experiment 20001450 PARAMETER Experiment Name: At_Far-red-induction_P Parameter: Organism Value: A. thaliana
  misc_feature: MA Experiment 20001450 PARAMETER Experiment Name: At_Far-red-induction_P Parameter: Plant Line Value: Columbia
  misc_feature: MA Experiment 20001450 PARAMETER Experiment Name: At_Far-red-induction_P Parameter: Timepoint (hr) Value: 8
  misc_feature: MA Experiment 20001450 PARAMETER Experiment Name: At_Far-red-induction_P Parameter: Tissue Value: Whole Plant
  misc_feature: MA Experiment ID: 20001451 Result: Down-regulated in Transcription
  misc_feature: MA Experiment 20001451 PARAMETER Experiment Name: At_Far-red-induction_P Parameter: Age (day) Value: 7
  misc_feature: MA Experiment 20001451 PARAMETER Experiment Name: At_Far-red-induction_P Parameter: Light Value: Far-red vs. White
  misc_feature: MA Experiment 20001451 PARAMETER Experiment Name: At_Far-red-induction_P Parameter: Organism Value: A. thaliana
  misc_feature: MA Experiment 20001451 PARAMETER Experiment Name: At_Far-red-induction_P Parameter: Plant Line Value: Columbia
  misc_feature: MA Experiment 20001451 PARAMETER Experiment Name: At_Far-red-induction_P Parameter: Timepoint (hr) Value: 24
  misc_feature: MA Experiment 20001451 PARAMETER Experiment Name: At_Far-red-induction_P Parameter: Tissue Value: Whole Plant
  misc_feature: MA Experiment ID: 20001554 Result: Up-regulated in Transcription
  misc_feature: MA Experiment 20001554 PARAMETER Experiment Name: At_Drought_Soil_Dry_P Parameter: Age (day) Value: 21
  misc_feature: MA Experiment 20001554 PARAMETER Experiment Name: At_Drought_Soil_Dry_P Parameter: Organism Value: A. thaliana
  misc_feature: MA Experiment 20001554 PARAMETER Experiment Name: At_Drought_Soil_Dry_P Parameter: Plant Line Value: WS
  misc_feature: MA Experiment 20001554 PARAMETER Experiment Name: At_Drought_Soil_Dry_P Parameter: Post Timepoint (hr) Value: None
  misc_feature: MA Experiment 20001554 PARAMETER Experiment Name: At_Drought_Soil_Dry_P Parameter: Post-Treatment Value: None
  misc_feature: MA Experiment 20001554 PARAMETER Experiment Name: At_Drought_Soil_Dry_P Parameter: Timepoint (day) Value: 7
  misc_feature: MA Experiment 20001554 PARAMETER Experiment Name: At_Drought_Soil_Dry_P Parameter: Treatment Value: Drought vs. No Drought
  misc_feature: MA Experiment ID: 20001904 Result: Up-regulated in Transcription
  misc_feature: MA Experiment 20001904 PARAMETER Experiment Name: At_Drought_Reproduction_P Parameter: Age (day) Value: 37
  misc_feature: MA Experiment 20001904 PARAMETER Experiment Name: At_Drought_Reproduction_P Parameter: Organism Value: A. thaliana
  misc_feature: MA Experiment 20001904 PARAMETER Experiment Name: At_Drought_Reproduction_P Parameter: Plant Line Value: WS
  misc_feature: MA Experiment 20001904 PARAMETER Experiment Name: At_Drought_Reproduction_P Parameter: Timepoint (day) Value: 7
  misc_feature: MA Experiment 20001904 PARAMETER Experiment Name: At_Drought_Reproduction_P Parameter: Tissue Value: Rosettes
  misc_feature: MA Experiment 20001904 PARAMETER Experiment Name: At_Drought_Reproduction_P Parameter: Treatment Value: Drought vs. No Drought
accatatacccacactcacaagtcacaactcaaataatctttgtcttcctcctacaaatatggggttttctccttcattttcttgcagtgctattggagccctaattttgggttgccttctgcttcaagcatcaaactctaatgctcagttgaggcctgatttctacttcgggacgtgcccatttgtttttgatatcattggaaatatcatcgtcgatgaactgcaaactgatcctcgtattgccgcgagcctccttcgtcttcactttcacgactgctttgttcgtggttgtgatgcatcgatcttgcttgacaattccacatcattccggactgagaaagatgctgctccgaacgcaaattcggctcgagggtttaatgtcatagatagaatgaaagtagcccttgagagagcttgcccaggaagagtctcttgtgcagatattctcaccatcgcctctcaaatatcagtgcttttgtcgggaggtccatggtggccggttccgttggggaggagagacagtgtagaagctttcttcgctctggctaatacagctctgccctctccgtttttcaatcttactcaacttaaaacagcctttgctgacgttggcctaaaccgcacttccgatctagttgctctttccggtggtcacacatttggaagagcacaatgccagttcgtgacgcctcgtctctacaacttcaatggtacaaacagtccagacccaagtctgaacccaacttaccttgtcgaactccgtcgattgtgtcctcaaaacggaaacggcaccgttctggtcaacttcgatgtcgtgactccagatgctttcgatagtcaatactacaccaaccttcgtaatgggaaaggtcttattcagagtgaccaggaactcttttcgactccaggagccgatacgatccctttagtaaaccaatacagcagcgacatgtccgtgttctttcgagcattcattgacgcaatgattaggatgggaaatcttagacctttgactggaactcaaggagagattagacaaaattgtagggttgtgaatccacgaattagggttgtggagaacgacgatggtgttgtgagttctatctgattatgcatgttgccatgttgggatatatatatggatatgtaagaaagtataaaatgcgcacgtgagaacaatttcgactaataaaagttctcacgagttatgagatttatgaaattggtattaagc

SEQ ID NO: 44251 - protein, 368 aa, Arabidopsis thaliana
  peptide (1)..(368): Ceres Seq. ID no. 15174474
  misc_feature (66)..(316): Pfam Name: Peroxidase Pfam Description: Peroxidase
  misc_feature (20)..(352): Homolog of NCBI NO: 480907 NR Description: peroxidase (EC 1.11.1.7) Cb - Arabidopsis
  misc_feature (20)..(352): Homolog of NCBI NO: 15229095 NR Description: peroxidase, putative [Arabidopsis thaliana]
  misc_feature (20)..(352): Homolog of NCBI NO: 25453209 NR Description: Peroxidase 32 precursor (Atperox P32) (PRXR3)
  misc_feature (20)..(352): Homolog of NCBI NO: 30690396 NR Description: peroxidase, putative [Arabidopsis thaliana]
  misc_feature (20)..(352): Homolog of NCBI NO: 21592888 NR Description: peroxidase [Arabidopsis thaliana]
  misc_feature (49)..(354): Homolog of NCBI NO: 26398007 NR Description: Peroxidase E5
  misc_feature (20)..(368): Homolog of NCBI NO: 129812 NR Description: Peroxidase C3 precursor
  misc_feature (20)..(368): Homolog of NCBI NO: 15224497 NR Description: peroxidase, putative [Arabidopsis thaliana]
  misc_feature (20)..(368): Homolog of NCBI NO: 81653 NR Description: peroxidase (EC 1.11.1.7) E - Arabidopsis thaliana
  misc_feature (20)..(368): Homolog of NCBI NO: 15224496 NR Description: peroxidase [Arabidopsis thaliana]
HIPTLTSHNSNNLCLPPTNMGFSPSFSCSAIGALILGCLLLQASNSNAQLRPDFYFGTCPFVFDIIGNIIVDELQTDPRIAASLLRLHFHDCFVRGCDASILLDNSTSFRTEKDAAPNANSARGFNVIDRMKVALERACPGRVSCADILTIASQISVLLSGGPWWPVPLGRRDSVEAFFALANTALPSPFFNLTQLKTAFADVGLNRTSDLVALSGGHTFGRAQCQFVTPRLYNFNGTNSPDPSLNPTYLVELRRLCPQNGNGTVLVNFDVVTPDAFDSQYYTNLRNGKGLIQSDQELFSTPGADTIPLVNQYSSDMSVFFRAFIDAMIRMGNLRPLTGTQGEIRQNCRVVNPRIRVVENDDGVVSSI

SEQ ID NO: 44252 - protein, 349 aa, Arabidopsis thaliana
  peptide (1)..(349): Ceres Seq. ID no. 15174475
  misc_feature (47)..(297): Pfam Name: Peroxidase Pfam Description: Peroxidase
  misc_feature (1)..(333): Homolog of NCBI NO: 480907 NR Description: peroxidase (EC 1.11.1.7) Cb - Arabidopsis
  misc_feature (1)..(333): Homolog of NCBI NO: 15229095 NR Description: peroxidase, putative [Arabidopsis thaliana]
  misc_feature (1)..(333): Homolog of NCBI NO: 25453209 NR Description: Peroxidase 32 precursor (Atperox P32) (PRXR3)
  misc_feature (1)..(333): Homolog of NCBI NO: 30690396 NR Description: peroxidase, putative [Arabidopsis thaliana]
  misc_feature (1)..(333): Homolog of NCBI NO: 21592888 NR Description: peroxidase [Arabidopsis thaliana]
  misc_feature (30)..(335): Homolog of NCBI NO: 26398007 NR Description: Peroxidase E5
  misc_feature (1)..(349): Homolog of NCBI NO: 129812 NR Description: Peroxidase C3 precursor
  misc_feature (1)..(349): Homolog of NCBI NO: 15224497 NR Description: peroxidase, putative [Arabidopsis thaliana]
  misc_feature (1)..(349): Homolog of NCBI NO: 81653 NR Description: peroxidase (EC 1.11.1.7) E - Arabidopsis thaliana
  misc_feature (1)..(349): Homolog of NCBI NO: 15224496 NR Description: peroxidase [Arabidopsis thaliana]
MGFSPSFSCSAIGALILGCLLLQASNSNAQLRPDFYFGTCPFVFDIIGNIIVDELQTDPRIAASLLRLHFHDCFVRGCDASILLDNSTSFRTEKDAAPNANSARGFNVIDRMKVALERACPGRVSCADILTIASQISVLLSGGPWWPVPLGRRDSVEAFFALANTALPSPFFNLTQLKTAFADVGLNRTSDLVALSGGHTFGRAQCQFVTPRLYNFNGTNSPDPSLNPTYLVELRRLCPQNGNGTVLVNFDVVTPDAFDSQYYTNLRNGKGLIQSDQELFSTPGADTIPLVNQYSSDMSVFFRAFIDAMIRMGNLRPLTGTQGEIRQNCRVVNPRIRVVENDDGVVSSI

SEQ ID NO: 44253 - protein, 238 aa, Arabidopsis thaliana
  peptide (1)..(238): Ceres Seq. ID no. 15174476
  misc_feature (1)..(186): Pfam Name: Peroxidase Pfam Description: Peroxidase
  misc_feature (1)..(222): Homolog of NCBI NO: 480907 NR Description: peroxidase (EC 1.11.1.7) Cb - Arabidopsis
  misc_feature (1)..(222): Homolog of NCBI NO: 15229095 NR Description: peroxidase, putative [Arabidopsis thaliana]
  misc_feature (1)..(222): Homolog of NCBI NO: 25453209 NR Description: Peroxidase 32 precursor (Atperox P32) (PRXR3)
  misc_feature (1)..(222): Homolog of NCBI NO: 30690396 NR Description: peroxidase, putative [Arabidopsis thaliana]
  misc_feature (1)..(222): Homolog of NCBI NO: 21592888 NR Description: peroxidase [Arabidopsis thaliana]
  misc_feature (1)..(224): Homolog of NCBI NO: 26398007 NR Description: Peroxidase E5
  misc_feature (1)..(238): Homolog of NCBI NO: 129812 NR Description: Peroxidase C3 precursor
  misc_feature (1)..(238): Homolog of NCBI NO: 15224497 NR Description: peroxidase, putative [Arabidopsis thaliana]
  misc_feature (1)..(238): Homolog of NCBI NO: 81653 NR Description: peroxidase (EC 1.11.1.7) E - Arabidopsis thaliana
  misc_feature (1)..(238): Homolog of NCBI NO: 15224496 NR Description: peroxidase [Arabidopsis thaliana]
MKVALERACPGRVSCADILTIASQISVLLSGGPWWPVPLGRRDSVEAFFALANTALPSPFFNLTQLKTAFADVGLNRTSDLVALSGGHTFGRAQCQFVTPRLYNFNGTNSPDPSLNPTYLVELRRLCPQNGNGTVLVNFDVVTPDAFDSQYYTNLRNGKGLIQSDQELFSTPGADTIPLVNQYSSDMSVFFRAFIDAMIRMGNLRPLTGTQGEIRQNCRVVNPRIRVVENDDGVVSSI

SEQ ID NO: 44254 - DNA, 1233 bp, Arabidopsis thaliana; identical to SEQ ID NO: 36532
  misc_feature (1)..(1233): Ceres Seq. ID no. 13509427
  misc_feature: MA Experiment ID: 20000180 Result: Up-regulated in Transcription
  misc_feature: MA Experiment 20000180 PARAMETER Experiment Name: At_Germinating_Seeds_P Parameter: Age (hr) Value: 24 vs. 0
  misc_feature: MA Experiment 20000180 PARAMETER Experiment Name: At_Germinating_Seeds_P Parameter: Tissue Value: Germinating Seeds
  misc_feature: MA Experiment ID: 20000182 Result: Up-regulated in Transcription
  misc_feature: MA Experiment 20000182 PARAMETER Experiment Name: At_2mM_SA_P Parameter: Age (day) Value: 14
  misc_feature: MA Experiment 20000182 PARAMETER Experiment Name: At_2mM_SA_P Parameter: Organism Value: A. thaliana
  misc_feature: MA Experiment 20000182 PARAMETER Experiment Name: At_2mM_SA_P Parameter: Plant Line Value: WS
  misc_feature: MA Experiment 20000182 PARAMETER Experiment Name: At_2mM_SA_P Parameter: Timepoint (hr) Value: 6
  misc_feature: MA Experiment 20000182 PARAMETER Experiment Name: At_2mM_SA_P Parameter: Tissue Value: Aerial
  misc_feature: MA Experiment 20000182 PARAMETER Experiment Name: At_2mM_SA_P Parameter: Treatment Value: 2mM SA vs. No Treatment
  misc_feature: MA Experiment ID: 20000437 Result: Up-regulated in Transcription
  misc_feature: MA Experiment 20000437 PARAMETER Experiment Name: At_Drought_P Parameter: Age (day) Value: 8
  misc_feature: MA Experiment 20000437 PARAMETER Experiment Name: At_Drought_P Parameter: Organism Value: A. thaliana
  misc_feature: MA Experiment 20000437 PARAMETER Experiment Name: At_Drought_P Parameter: Plant Line Value: WS
  misc_feature: MA Experiment 20000437 PARAMETER Experiment Name: At_Drought_P Parameter: Timepoint (hr) Value: 24
  misc_feature: MA Experiment 20000437 PARAMETER Experiment Name: At_Drought_P Parameter: Tissue Value: Whole Plant
  misc_feature: MA Experiment 20000437 PARAMETER Experiment Name: At_Drought_P Parameter: Treatment Value: Drought vs. No Drought

SEQ ID NO: 44255 - protein, 283 aa, Arabidopsis thaliana; identical to SEQ ID NO: 36533
  peptide (1)..(283): Ceres Seq. ID no. 13509428
  misc_feature (145)..(283): Homolog of NCBI NO: 23481990 NR Description: hypothetical protein [Plasmodium yoelii yoelii]
  misc_feature (85)..(257): Homolog of NCBI NO: 39546241 NR Description: OSJNBa0089N06.11 [Oryza sativa (japonica
  misc_feature (184)..(283): Homolog of NCBI NO: 18403177 NR Description: expressed protein [Arabidopsis thaliana]
  misc_feature (11)..(94): Homolog of NCBI NO: 38345629 NR Description: OSJNBb0004A17.10 [Oryza sativa (japonica
  misc_feature (101)..(280): Homolog of NCBI NO: 38345629 NR Description: OSJNBb0004A17.10 [Oryza sativa (japonica
  misc_feature (133)..(283): Homolog of NCBI NO: 21618311 NR Description: unknown [Arabidopsis thaliana]
  misc_feature (1)..(283): Homolog of NCBI NO: 17381010 NR Description: unknown protein [Arabidopsis thaliana]
  misc_feature (145)..(283): Homolog of NCBI NO: 23481990 NR Description: hypothetical protein [Plasmodium yoelii yoelii]
  misc_feature (85)..(257): Homolog of NCBI NO: 39546241 NR Description: OSJNBa0089N06.11 [Oryza sativa (japonica
  misc_feature (184)..(283): Homolog of NCBI NO: 18403177 NR Description: expressed protein [Arabidopsis thaliana]
  misc_feature (11)..(94): Homolog of NCBI NO: 38345629 NR Description: OSJNBb0004A17.10 [Oryza sativa (japonica
  misc_feature (101)..(280): Homolog of NCBI NO: 38345629 NR Description: OSJNBb0004A17.10 [Oryza sativa (japonica
  misc_feature (133)..(283): Homolog of NCBI NO: 21618311 NR Description: unknown [Arabidopsis thaliana]
  misc_feature (1)..(283): Homolog of NCBI NO: 17381010 NR Description: unknown protein [Arabidopsis thaliana]

SEQ ID NO: 44256 - protein, 256 aa, Arabidopsis thaliana; identical to SEQ ID NO: 36534
  peptide (1)..(256): Ceres Seq. ID no. 13509429
  misc_feature (118)..(256): Homolog of NCBI NO: 23481990 NR Description: hypothetical protein [Plasmodium yoelii yoelii]
  misc_feature (58)..(230): Homolog of NCBI NO: 39546241 NR Description: OSJNBa0089N06.11 [Oryza sativa (japonica
  misc_feature (157)..(256): Homolog of NCBI NO: 18403177 NR Description: expressed protein [Arabidopsis thaliana]
  misc_feature (1)..(67): Homolog of NCBI NO: 38345629 NR Description: OSJNBb0004A17.10 [Oryza sativa (japonica
  misc_feature (74)..(253): Homolog of NCBI NO: 38345629 NR Description: OSJNBb0004A17.10 [Oryza sativa (japonica
  misc_feature (106)..(256): Homolog of NCBI NO: 21618311 NR Description: unknown [Arabidopsis thaliana]
  misc_feature (1)..(256): Homolog of NCBI NO: 17381010 NR Description: unknown protein [Arabidopsis thaliana]
  misc_feature (118)..(256): Homolog of NCBI NO: 23481990 NR Description: hypothetical protein [Plasmodium yoelii yoelii]
  misc_feature (58)..(230): Homolog of NCBI NO: 39546241 NR Description: OSJNBa0089N06.11 [Oryza sativa (japonica
  misc_feature (157)..(256): Homolog of NCBI NO: 18403177 NR Description: expressed protein [Arabidopsis thaliana]
  misc_feature (1)..(67): Homolog of NCBI NO: 38345629 NR Description: OSJNBb0004A17.10 [Oryza sativa (japonica
  misc_feature (74)..(253): Homolog of NCBI NO: 38345629 NR Description: OSJNBb0004A17.10 [Oryza sativa (japonica
  misc_feature (106)..(256): Homolog of NCBI NO: 21618311 NR Description: unknown [Arabidopsis thaliana]
  misc_feature (1)..(256): Homolog of NCBI NO: 17381010 NR Description: unknown protein [Arabidopsis thaliana]

SEQ ID NO: 44257 - DNA, 1280 bp, Arabidopsis thaliana
  misc_feature (1)..(1280): Ceres Seq. ID no. 14306842
  misc_feature: MA Experiment ID: 20000171 Result: Down-regulated in Transcription
  misc_feature: MA Experiment 20000171 PARAMETER Experiment Name: At_42deg_Heat_P Parameter: Age (day) Value: 14
  misc_feature: MA Experiment 20000171 PARAMETER Experiment Name: At_42deg_Heat_P Parameter: Organism Value: A. thaliana
  misc_feature: MA Experiment 20000171 PARAMETER Experiment Name: At_42deg_Heat_P Parameter: Plant Line Value: WS
  misc_feature: MA Experiment 20000171 PARAMETER Experiment Name: At_42deg_Heat_P Parameter: Temperature (deg C) Value: 42 vs. 22
  misc_feature: MA Experiment 20000171 PARAMETER Experiment Name: At_42deg_Heat_P Parameter: Timepoint (hr) Value: 1
  misc_feature: MA Experiment 20000171 PARAMETER Experiment Name: At_42deg_Heat_P Parameter: Tissue Value: Aerial
  misc_feature: MA Experiment ID: 20000173 Result: Down-regulated in Transcription
  misc_feature: MA Experiment 20000173 PARAMETER Experiment Name: At_42deg_Heat_P Parameter: Age (day) Value: 14
  misc_feature: MA Experiment 20000173 PARAMETER Experiment Name: At_42deg_Heat_P Parameter: Organism Value: A. thaliana
  misc_feature: MA Experiment 20000173 PARAMETER Experiment Name: At_42deg_Heat_P Parameter: Plant Line Value: WS
  misc_feature: MA Experiment 20000173 PARAMETER Experiment Name: At_42deg_Heat_P Parameter: Temperature (deg C) Value: 42 vs. 22
  misc_feature: MA Experiment 20000173 PARAMETER Experiment Name: At_42deg_Heat_P Parameter: Timepoint (hr) Value: 6
  misc_feature: MA Experiment 20000173 PARAMETER Experiment Name: At_42deg_Heat_P Parameter: Tissue Value: Aerial
  misc_feature: MA Experiment ID: 20000185 Result: Down-regulated in Transcription
  misc_feature: MA Experiment 20000185 PARAMETER Experiment Name: At_Roots__P Parameter: Age (day) Value: 7 vs. 21
  misc_feature: MA Experiment 20000185 PARAMETER Experiment Name: At_Roots__P Parameter: Organism Value: A. thaliana
  misc_feature: MA Experiment 20000185 PARAMETER Experiment Name: At_Roots__P Parameter: Tissue Value: Roots vs. Whole Plant
  misc_feature: MA Experiment ID: 20000234 Result: Up-regulated in Transcription
  misc_feature: MA Experiment 20000234 PARAMETER Experiment Name: At_Siliques_P Parameter: Age (day) Value: 21
  misc_feature: MA Experiment 20000234 PARAMETER Experiment Name: At_Siliques_P Parameter: Organism Value: A. thaliana
  misc_feature: MA Experiment 20000234 PARAMETER Experiment Name: At_Siliques_P Parameter: Plant Line Value: WS
  misc_feature: MA Experiment 20000234 PARAMETER Experiment Name: At_Siliques_P Parameter: Tissue Value: Less Than 5mm Siliques vs. Whole Plant
  misc_feature: MA Experiment ID: 20000286 Result: Up-regulated in Transcription
  misc_feature: MA Experiment 20000286 PARAMETER Experiment Name: At_Open_Flower_P Parameter: Age (day) Value: 21
  misc_feature: MA Experiment 20000286 PARAMETER Experiment Name: At_Open_Flower_P Parameter: Plant Line Value: WS
  misc_feature: MA Experiment 20000286 PARAMETER Experiment Name: At_Open_Flower_P Parameter: Tissue Value: Half Open vs. Whole Plant
  misc_feature: MA Experiment ID: 20000439 Result: Down-regulated in Transcription
  misc_feature: MA Experiment 20000439 PARAMETER Experiment Name: At_Roots__P Parameter: Age (day) Value: 14 vs. 21
  misc_feature: MA Experiment 20000439 PARAMETER Experiment Name: At_Roots__P Parameter: Organism Value: A. thaliana
  misc_feature: MA Experiment 20000439 PARAMETER Experiment Name: At_Roots__P Parameter: Tissue Value: Roots vs. Whole Plant
  misc_feature: MA Experiment ID: 20001451 Result: Down-regulated in Transcription
  misc_feature: MA Experiment 20001451 PARAMETER Experiment Name: At_Far-red-induction_P Parameter: Age (day) Value: 7
  misc_feature: MA Experiment 20001451 PARAMETER Experiment Name: At_Far-red-induction_P Parameter: Light Value: Far-red vs. White
  misc_feature: MA Experiment 20001451 PARAMETER Experiment Name: At_Far-red-induction_P Parameter: Organism Value: A. thaliana
  misc_feature: MA Experiment 20001451 PARAMETER Experiment Name: At_Far-red-induction_P Parameter: Plant Line Value: Columbia
  misc_feature: MA Experiment 20001451 PARAMETER Experiment Name: At_Far-red-induction_P Parameter: Timepoint (hr) Value: 24
  misc_feature: MA Experiment 20001451 PARAMETER Experiment Name: At_Far-red-induction_P Parameter: Tissue Value: Whole Plant
  misc_feature: MA Experiment ID: 20001557 Result: Up-regulated in Transcription
  misc_feature: MA Experiment 20001557 PARAMETER Experiment Name: At_Drought_Soil_Dry_P Parameter: Age (day) Value: 27
  misc_feature: MA Experiment 20001557 PARAMETER Experiment Name: At_Drought_Soil_Dry_P Parameter: Organism Value: A. thaliana
  misc_feature: MA Experiment 20001557 PARAMETER Experiment Name: At_Drought_Soil_Dry_P Parameter: Plant Line Value: WS
  misc_feature: MA Experiment 20001557 PARAMETER Experiment Name: At_Drought_Soil_Dry_P Parameter: Post Timepoint (hr) Value: 3
  misc_feature: MA Experiment 20001557 PARAMETER Experiment Name: At_Drought_Soil_Dry_P Parameter: Post-Treatment Value: Re-Water vs. No Drought
  misc_feature: MA Experiment 20001557 PARAMETER Experiment Name: At_Drought_Soil_Dry_P Parameter: Timepoint (day) Value: 13
  misc_feature: MA Experiment 20001557 PARAMETER Experiment Name: At_Drought_Soil_Dry_P Parameter: Treatment Value: Drought vs. No Drought
  misc_feature: MA Experiment ID: 20001558 Result: Up-regulated in Transcription
  misc_feature: MA Experiment 20001558 PARAMETER Experiment Name: At_Drought_Soil_Dry_P Parameter: Age (day) Value: 27
  misc_feature: MA Experiment 20001558 PARAMETER Experiment Name: At_Drought_Soil_Dry_P Parameter: Organism Value: A. thaliana
  misc_feature: MA Experiment 20001558 PARAMETER Experiment Name: At_Drought_Soil_Dry_P Parameter: Plant Line Value: WS
  misc_feature: MA Experiment 20001558 PARAMETER Experiment Name: At_Drought_Soil_Dry_P Parameter: Post Timepoint (hr) Value: 6
  misc_feature: MA Experiment 20001558 PARAMETER Experiment Name: At_Drought_Soil_Dry_P Parameter: Post-Treatment Value: Re-Water vs. No Drought
  misc_feature: MA Experiment 20001558 PARAMETER Experiment Name: At_Drought_Soil_Dry_P Parameter: Timepoint (day) Value: 13
  misc_feature: MA Experiment 20001558 PARAMETER Experiment Name: At_Drought_Soil_Dry_P Parameter: Treatment Value: Drought vs. No Drought
atcataggcatagcaaaactcttccaaaatgtctgatttctcgagctccgtgaagcttaaatatgttaaactcggttaccaataccttatcaacaacttccttactcttcttttgattccagtcatagcaaccgtcgccatcgagcttctccgaatgggtcctcgagcgatcaggtctaggagaagagacttgtctccctccagctattcattacatccctccaactccaaccatggaatccgcaagaaacgaggcccaaatggttatcttcaccgccatggaagatctcttcaagaatacaggtcttaaacctaaagacatcgacatcctcattgttaattgctctctgttctcaccaacgccgtctctctccgctatgattatcaacaagtacaagcttaggagtaacatcaaaagctataacctttccgggatgggatgcagcgctagtcttatctcagttgatgtagcacgtaatttgttacaagtccatcctaactccaacgcaatcataattagcactgagatcattactcctaattactataagggtaatgagagagccatgttgctcccaaactgcctcttccgtatgggaggcgccgccattctcctctctaaccgcagatccgacaggtggcgagctaagtacaagttatgccaccttgttaggacccatcgcggtgcggatgacaaatcctacaactgtgttatggaacaggaagacaaaaatggtaacgtgggaatcaacttgtctaaagatctcatgaccattgccggagaagccttgaaagctaatatcactaccataggtcctttggtccttccggcatcggagcagcttctcttcctctcatcccttatcggacgtaaaatcttcaatccaaagtggaagccgtacataccagatttcaagcaggccttcgagcatttctgcatccacgcaggaggaagagcggtgattgatgagctgcaaaagaatctacagctgtcgggagaacacgtggaagcttcaagaatgacactacataggtttggtaatacatcgtcgtcatcattatggtatgagcttagctacatagaggctcaagggaggatgaagagaaacgatagggtttggcagatcgctttcggaagtggattcaagtgtaactccgccgtttggaaatgtaaccgtacgatcaagacaccaacggatggagcgtggtcggattgtatcgaacgataccctgtctttatccctgaagttgttaaactatgaaaatactttttttttacc

SEQ ID NO: 44258 - protein, 342 aa, Arabidopsis thaliana
  peptide (1)..(342): Ceres Seq. ID no. 14306843
  misc_feature (175)..(315): Pfam Name: Chalcone and stilbene synthases, C-terminal domain Pfam Description: Chalcone and stilbene synthases, C-terminal
  misc_feature (1)..(338): Homolog of NCBI NO: 32172500 NR Description: FAE3 [Marchantia polymorpha]
  misc_feature (1)..(334): Homolog of NCBI NO: 15226724 NR Description: very-long-chain fatty acid condensing enzyme
  misc_feature (1)..(334): Homolog of NCBI NO: 15223556 NR Description: very-long-chain fatty acid condensing enzyme
  misc_feature (1)..(341): Homolog of NCBI NO: 32172502 NR Description: FAE1 [Marchantia polymorpha]
  misc_feature (1)..(342): Homolog of NCBI NO: 17979464 NR Description: At1g68530/T26J14_10 [Arabidopsis thaliana]
  misc_feature (1)..(342): Homolog of NCBI NO: 21593111 NR Description: very-long-chain fatty acid condensing enzyme CUT1
  misc_feature (1)..(342): Homolog of NCBI NO: 15221431 NR Description: very-long-chain fatty acid condensing enzyme
  misc_feature (1)..(342): Homolog of NCBI NO: 28393607 NR Description: putative fatty acid condensing enzyme CUT1
  misc_feature (1)..(342): Homolog of NCBI NO: 15222592 NR Description: very-long-chain fatty acid condensing enzyme
  misc_feature (1)..(342): Homolog of NCBI NO: 21618184 NR Description: fatty acid condensing enzyme CUT1, putative
MESARNEAQMVIFTAMEDLFKNTGLKPKDIDILIVNCSLFSPTPSLSAMIINKYKLRSNIKSYNLSGMGCSASLISVDVARNLLQVHPNSNAIIISTEIITPNYYKGNERAMLLPNCLFRMGGAAILLSNRRSDRWRAKYKLCHLVRTHRGADDKSYNCVMEQEDKNGNVGINLSKDLMTIAGEALKANITTIGPLVLPASEQLLFLSSLIGRKIFNPKWKPYIPDFKQAFEHFCIHAGGRAVIDELQKNLQLSGEHVEASRMTLHRFGNTSSSSLWYELSYIEAQGRMKRNDRVWQIAFGSGFKCNSAVWKCNRTIKTPTDGAWSDCIERYPVFIPEVVKL

SEQ ID NO: 44259 - protein, 333 aa, Arabidopsis thaliana
  peptide (1)..(333): Ceres Seq. ID no. 14306844
  misc_feature (166)..(306): Pfam Name: Chalcone and stilbene synthases, C-terminal domain Pfam Description: Chalcone and stilbene synthases, C-terminal
  misc_feature (1)..(329): Homolog of NCBI NO: 32172500 NR Description: FAE3 [Marchantia polymorpha]
  misc_feature (1)..(325): Homolog of NCBI NO: 15226724 NR Description: very-long-chain fatty acid condensing enzyme
  misc_feature (1)..(325): Homolog of NCBI NO: 15223556 NR Description: very-long-chain fatty acid condensing enzyme
  misc_feature (1)..(332): Homolog of NCBI NO: 32172502 NR Description: FAE1 [Marchantia polymorpha]
  misc_feature (1)..(333): Homolog of NCBI NO: 21593111 NR Description: very-long-chain fatty acid condensing enzyme CUT1
  misc_feature (1)..(333): Homolog of NCBI NO: 17979464 NR Description: At1g68530/T26J14_10 [Arabidopsis thaliana]
  misc_feature (1)..(333): Homolog of NCBI NO: 15221431 NR Description: very-long-chain fatty acid condensing enzyme
  misc_feature (1)..(333): Homolog of NCBI NO: 28393607 NR Description: putative fatty acid condensing enzyme CUT1
  misc_feature (1)..(333): Homolog of NCBI NO: 15222592 NR Description: very-long-chain fatty acid condensing enzyme
  misc_feature (1)..(333): Homolog of NCBI NO: 21618184 NR Description: fatty acid condensing enzyme CUT1, putative
MVIFTAMEDLFKNTGLKPKDIDILIVNCSLFSPTPSLSAMIINKYKLRSNIKSYNLSGMGCSASLISVDVARNLLQVHPNSNAIIISTEIITPNYYKGNERAMLLPNCLFRMGGAAILLSNRRSDRWRAKYKLCHLVRTHRGADDKSYNCVMEQEDKNGNVGINLSKDLMTIAGEALKANITTIGPLVLPASEQLLFLSSLIGRKIFNPKWKPYIPDFKQAFEHFCIHAGGRAVIDELQKNLQLSGEHVEASRMTLHRFGNTSSSSLWYELSYIEAQGRMKRNDRVWQIAFGSGFKCNSAVWKCNRTIKTPTDGAWSDCIERYPVFIPEVVKL

SEQ ID NO: 44260 - protein, 327 aa, Arabidopsis thaliana
  peptide (1)..(327): Ceres Seq. ID no. 14306845
  misc_feature (160)..(300): Pfam Name: Chalcone and stilbene synthases, C-terminal domain Pfam Description: Chalcone and stilbene synthases, C-terminal
  misc_feature (1)..(323): Homolog of NCBI NO: 32172500 NR Description: FAE3 [Marchantia polymorpha]
  misc_feature (1)..(319): Homolog of NCBI NO: 15226724 NR Description: very-long-chain fatty acid condensing enzyme
  misc_feature (1)..(319): Homolog of NCBI NO: 15223556 NR Description: very-long-chain fatty acid condensing enzyme
  misc_feature (1)..(326): Homolog of NCBI NO: 32172502 NR Description: FAE1 [Marchantia polymorpha]
  misc_feature (1)..(327): Homolog of NCBI NO: 17979464 NR Description: At1g68530/T26J14_10 [Arabidopsis thaliana]
  misc_feature (1)..(327): Homolog of NCBI NO: 21593111 NR Description: very-long-chain fatty acid condensing enzyme CUT1
  misc_feature (1)..(327): Homolog of NCBI NO: 15221431 NR Description: very-long-chain fatty acid condensing enzyme
  misc_feature (1)..(327): Homolog of NCBI NO: 28393607 NR Description: putative fatty acid condensing enzyme CUT1
  misc_feature (1)..(327): Homolog of NCBI NO: 15222592 NR Description: very-long-chain fatty acid condensing enzyme
  misc_feature (1)..(327): Homolog of NCBI NO: 21618184 NR Description: fatty acid condensing enzyme CUT1, putative
MEDLFKNTGLKPKDIDILIVNCSLFSPTPSLSAMIINKYKLRSNIKSYNLSGMGCSASLISVDVARNLLQVHPNSNAIIISTEIITPNYYKGNERAMLLPNCLFRMGGAAILLSNRRSDRWRAKYKLCHLVRTHRGADDKSYNCVMEQEDKNGNVGINLSKDLMTIAGEALKANITTIGPLVLPASEQLLFLSSLIGRKIFNPKWKPYIPDFKQAFEHFCIHAGGRAVIDELQKNLQLSGEHVEASRMTLHRFGNTSSSSLWYELSYIEAQGRMKRNDRVWQIAFGSGFKCNSAVWKCNRTIKTPTDGAWSDCIERYPVFIPEVVKL

SEQ ID NO: 44261 - DNA, 1144 bp, Arabidopsis thaliana
  misc_feature (1)..(1144): Ceres Seq. ID no. 13646268
  misc_feature: MA Experiment ID: 20000184 Result: Up-regulated in Transcription
  misc_feature: MA Experiment 20000184 PARAMETER Experiment Name: At_Shoots__P Parameter: Age (day) Value: 7
  misc_feature: MA Experiment 20000184 PARAMETER Experiment Name: At_Shoots__P Parameter: Tissue Value: Shoots vs. Whole Plant
  misc_feature: MA Experiment ID: 20000185 Result: Up-regulated in Transcription
  misc_feature: MA Experiment 20000185 PARAMETER Experiment Name: At_Roots__P Parameter: Age (day) Value: 7 vs. 21
  misc_feature: MA Experiment 20000185 PARAMETER Experiment Name: At_Roots__P Parameter: Organism Value: A. thaliana
  misc_feature: MA Experiment 20000185 PARAMETER Experiment Name: At_Roots__P Parameter: Tissue Value: Roots vs. Whole Plant
  misc_feature: MA Experiment ID: 20000227 Result: Up-regulated in Transcription
  misc_feature: MA Experiment 20000227 PARAMETER Experiment Name: At_Root-Tips-vs-Tops_P Parameter: Tissue Value: Root Tips vs. Root Tops
  misc_feature: MA Experiment ID: 20000437 Result: Down-regulated in Transcription
  misc_feature: MA Experiment 20000437 PARAMETER Experiment Name: At_Drought_P Parameter: Age (day) Value: 8
  misc_feature: MA Experiment 20000437 PARAMETER Experiment Name: At_Drought_P Parameter: Organism Value: A. thaliana
  misc_feature: MA Experiment 20000437 PARAMETER Experiment Name: At_Drought_P Parameter: Plant Line Value: WS
  misc_feature: MA Experiment 20000437 PARAMETER Experiment Name: At_Drought_P Parameter: Timepoint (hr) Value: 24
  misc_feature: MA Experiment 20000437 PARAMETER Experiment Name: At_Drought_P Parameter: Tissue Value: Whole Plant
  misc_feature: MA Experiment 20000437 PARAMETER Experiment Name: At_Drought_P Parameter: Treatment Value: Drought vs. No Drought
  misc_feature: MA Experiment ID: 20000439 Result: Up-regulated in Transcription
  misc_feature: MA Experiment 20000439 PARAMETER Experiment Name: At_Roots__P Parameter: Age (day) Value: 14 vs. 21
  misc_feature: MA Experiment 20000439 PARAMETER Experiment Name: At_Roots__P Parameter: Organism Value: A. thaliana
  misc_feature: MA Experiment 20000439 PARAMETER Experiment Name: At_Roots__P Parameter: Tissue Value: Roots vs. Whole Plant
atcaaacacaaaccaaagacaacttgagtaaccaaaccaaagactaaaaatggccaaagctcttcacataaccatctttctcttcctcatatcctccaatctcctcgcatttatcaactccgccagacttcttgacgagatccaacctcagcctcagttagtccctaccggccaaatccccactgtggctccaaccgaagctgaggaggaggatggaaccgatgacaacccaggactagcaaccacaaccacaactgcatcagcagttacagtcccagccggtccagcagaggctacagagccattactagagttctttatgcatgacgtgctaggcggatctcacccatcagctcgtgtggttacaggtatagtagctcaaactgaagtgaacggaataccattctcaaaggccagtaacagcattttcccggttgacaatggagtcccactggtcaactcaaacaacatcaacagtgtcattaacccaaacacagctccacttctcaccggacttggcggtgctcaaacctccaccgtcatccaaaacactaacggaaattccaacgatgcccttagcgccaacagtctcccttttgtaactgccgggaaccttcctcccggtgctgccctccagcatctcatgttcggaaccataaccgttgtagatgatgagctaaccgaaagccacgagcttggctcagccgttatagggagagctcaaggcttttacttggccagttccctggacggaacaagtcagactctttctctgactgtattgctacatggtgagcatgaccagcatgacactttagacgatgccattagtttctttggggttcacagaaccgcctctcatgcctcccagatcgcggttataggcgggaccgggaagtttgaacacgccaaagggtatgccatagtggaaactctgcataaccaggacaaccagcatatcactgatggtcaagacaccatcctccatttcagtgtataccttacctacaaagcttgaagagaaaatgagtgttaaaacaagaaaagattgcttttttataagtttttgctcactagattccccttggggcctttttcctttgttgcgcaaatttgatttttaaagaaattttttttgttgggg

SEQ ID NO: 44262 - protein, 322 aa, Arabidopsis thaliana
  peptide (1)..(322): Ceres Seq. ID no. 13646269
  misc_feature (125)..(320): Pfam Name: Dirigent-like protein Pfam Description: Dirigent-like protein
  misc_feature (63)..(170): Homolog of NCBI NO: 9294671 NR Description: contains similarity to disease resistance
  misc_feature (139)..(281): Homolog of NCBI NO: 9294671 NR Description: contains similarity to disease resistance
  misc_feature (139)..(320): Homolog of NCBI NO: 15229564 NR Description: disease resistance response protein-related
  misc_feature (124)..(320): Homolog of NCBI NO: 15236315 NR Description: disease resistance response protein-related
  misc_feature (46)..(318): Homolog of NCBI NO: 27497202 NR Description: Putative disease resistance response protein
  misc_feature (70)..(318): Homolog of NCBI NO: 34895944 NR Description: P0011G08.13 [Oryza sativa (japonica
  misc_feature (56)..(320): Homolog of NCBI NO: 15226923 NR Description: fibroin-related [Arabidopsis thaliana]
  misc_feature (16)..(320): Homolog of NCBI NO: 25407001 NR Description: hypothetical protein [imported] - Arabidopsis
  misc_feature (7)..(320): Homolog of NCBI NO: 15233217 NR Description: disease resistance response protein-related
  misc_feature (1)..(322): Homolog of NCBI NO: 15225466 NR Description: disease resistance response protein-related/
MAKALHITIFLFLISSNLLAFINSARLLDEIQPQPQLVPTGQIPTVAPTEAEEEDGTDDNPGLATTTTTASAVTVPAGPAEATEPLLEFFMHDVLGGSHPSARVVTGIVAQTEVNGIPFSKASNSIFPVDNGVPLVNSNNINSVINPNTAPLLTGLGGAQTSTVIQNTNGNSNDALSANSLPFVTAGNLPPGAALQHLMFGTITVVDDELTESHELGSAVIGRAQGFYLASSLDGTSQTLSLTVLLHGEHDQHDTLDDAISFFGVHRTASHASQIAVIGGTGKFEHAKGYAIVETLHNQDNQHITDGQDTILHFSVYLTYKA

SEQ ID NO: 44263 - protein, 232 aa, Arabidopsis thaliana
  peptide (1)..(232): Ceres Seq. ID no. 13646270
  misc_feature (35)..(230): Pfam Name: Dirigent-like protein Pfam Description: Dirigent-like protein
  misc_feature (1)..(80): Homolog of NCBI NO: 9294671 NR Description: contains similarity to disease resistance
  misc_feature (49)..(191): Homolog of NCBI NO: 9294671 NR Description: contains similarity to disease resistance
  misc_feature (49)..(230): Homolog of NCBI NO: 15229564 NR Description: disease resistance response protein-related
  misc_feature (34)..(230): Homolog of NCBI NO: 15236315 NR Description: disease resistance response protein-related
  misc_feature (1)..(228): Homolog of NCBI NO: 27497202 NR Description: Putative disease resistance response protein
  misc_feature (1)..(228): Homolog of NCBI NO: 34895944 NR Description: P0011G08.13 [Oryza sativa (japonica
  misc_feature (1)..(230): Homolog of NCBI NO: 15226923 NR Description: fibroin-related [Arabidopsis thaliana]
  misc_feature (1)..(230): Homolog of NCBI NO: 25407001 NR Description: hypothetical protein [imported] - Arabidopsis
  misc_feature (1)..(230): Homolog of NCBI NO: 15233217 NR Description: disease resistance response protein-related
  misc_feature (1)..(232): Homolog of NCBI NO: 15225466 NR Description: disease resistance response protein-related/
MHDVLGGSHPSARVVTGIVAQTEVNGIPFSKASNSIFPVDNGVPLVNSNNINSVINPNTAPLLTGLGGAQTSTVIQNTNGNSNDALSANSLPFVTAGNLPPGAALQHLMFGTITVVDDELTESHELGSAVIGRAQGFYLASSLDGTSQTLSLTVLLHGEHDQHDTLDDAISFFGVHRTASHASQIAVIGGTGKFEHAKGYAIVETLHNQDNQHITDGQDTILHFSVYLTYKA

SEQ ID NO: 44264 - DNA, 1969 bp, Arabidopsis thaliana
  misc_feature (1)..(1969): Ceres Seq. ID no. 12603622
  misc_feature: MA Experiment ID: 20000179 Result: Up-regulated in Transcription
  misc_feature: MA Experiment 20000179 PARAMETER Experiment Name: At_Germinating_Seeds_P Parameter: Age (hr) Value: 6 vs. 0
  misc_feature: MA Experiment 20000179 PARAMETER Experiment Name: At_Germinating_Seeds_P Parameter: Tissue Value: Germinating Seeds
  misc_feature: MA Experiment ID: 20000180 Result: Up-regulated in Transcription
  misc_feature: MA Experiment 20000180 PARAMETER Experiment Name: At_Germinating_Seeds_P Parameter: Age (hr) Value: 24 vs. 0
  misc_feature: MA Experiment 20000180 PARAMETER Experiment Name: At_Germinating_Seeds_P Parameter: Tissue Value: Germinating Seeds
  misc_feature: MA Experiment ID: 20000437 Result: Down-regulated in Transcription
  misc_feature: MA Experiment 20000437 PARAMETER Experiment Name: At_Drought_P Parameter: Age (day) Value: 8
  misc_feature: MA Experiment 20000437 PARAMETER Experiment Name: At_Drought_P Parameter: Organism Value: A. thaliana
  misc_feature: MA Experiment 20000437 PARAMETER Experiment Name: At_Drought_P Parameter: Plant Line Value: WS
  misc_feature: MA Experiment 20000437 PARAMETER Experiment Name: At_Drought_P Parameter: Timepoint (hr) Value: 24
  misc_feature: MA Experiment 20000437 PARAMETER Experiment Name: At_Drought_P Parameter: Tissue Value: Whole Plant
  misc_feature: MA Experiment 20000437 PARAMETER Experiment Name: At_Drought_P Parameter: Treatment Value: Drought vs. No Drought
  misc_feature: MA Experiment ID: 20000438 Result: Up-regulated in Transcription
  misc_feature: MA Experiment 20000438 PARAMETER Experiment Name: At_Shoots__P Parameter: Age (day) Value: 14
  misc_feature: MA Experiment 20000438 PARAMETER Experiment Name: At_Shoots__P Parameter: Tissue Value: Shoots vs. Whole Plant
  misc_feature: MA Experiment ID: 20000441 Result: Up-regulated in Transcription
  misc_feature: MA Experiment 20000441 PARAMETER Experiment Name: At_1uM_BR-BRZ__P Parameter: Tissue Value: Shoot Apices
  misc_feature: MA Experiment 20000441 PARAMETER Experiment Name: At_1uM_BR-BRZ__P Parameter: Treatment Value: 1uM BR vs. No Treatment
  misc_feature: MA Experiment ID: 20000573 Result: Down-regulated in Transcription
  misc_feature: MA Experiment 20000573 PARAMETER Experiment Name: At_100uM_ABA_Mutants__P Parameter: Organism Value: A. thaliana
  misc_feature: MA Experiment 20000573 PARAMETER Experiment Name: At_100uM_ABA_Mutants__P Parameter: Plant Line Value: CS22 vs. Ler wt
  misc_feature: MA Experiment 20000573 PARAMETER Experiment Name: At_100uM_ABA_Mutants__P Parameter: Timepoint (hr) Value: N/A
  misc_feature: MA Experiment 20000573 PARAMETER Experiment Name: At_100uM_ABA_Mutants__P Parameter: Tissue Value: Whole Plant
  misc_feature: MA Experiment 20000573 PARAMETER Experiment Name: At_100uM_ABA_Mutants__P Parameter: Treatment Value: None
  misc_feature: MA Experiment ID: 20000574 Result: Down-regulated in Transcription
  misc_feature: MA Experiment 20000574 PARAMETER Experiment Name: At_100uM_ABA_Mutants__P Parameter: Organism Value: A. thaliana
  misc_feature: MA Experiment 20000574 PARAMETER Experiment Name: At_100uM_ABA_Mutants__P Parameter: Plant Line Value: CS23 vs. Ler wt
  misc_feature: MA Experiment 20000574 PARAMETER Experiment Name: At_100uM_ABA_Mutants__P Parameter: Timepoint (hr) Value: N/A
  misc_feature: MA Experiment 20000574 PARAMETER Experiment Name: At_100uM_ABA_Mutants__P Parameter: Tissue Value: Whole Plant
  misc_feature: MA Experiment 20000574 PARAMETER Experiment Name: At_100uM_ABA_Mutants__P Parameter: Treatment Value: None
  misc_feature: MA Experiment ID: 20000794 Result: Up-regulated in Transcription
  misc_feature: MA Experiment 20000794 PARAMETER Experiment Name: At_Petals_P Parameter: Age (day) Value: 23-25 days
  misc_feature: MA Experiment 20000794 PARAMETER Experiment Name: At_Petals_P Parameter: Plant Line Value: WS
  misc_feature: MA Experiment 20000794 PARAMETER Experiment Name: At_Petals_P Parameter: Tissue Value: Petals vs. Whole plant
  misc_feature: MA Experiment ID: 20001248 Result: Down-regulated in Transcription
  misc_feature: MA Experiment 20001248 PARAMETER Experiment Name: At_Far-red-induction_P Parameter: Age (day) Value: 7
  misc_feature: MA Experiment 20001248 PARAMETER Experiment Name: At_Far-red-induction_P Parameter: Light Value: Far-red vs. White
  misc_feature: MA Experiment 20001248 PARAMETER Experiment Name: At_Far-red-induction_P Parameter: Organism Value: A. thaliana
  misc_feature: MA Experiment 20001248 PARAMETER Experiment Name: At_Far-red-induction_P Parameter: Plant Line Value: Columbia
  misc_feature: MA Experiment 20001248 PARAMETER Experiment Name: At_Far-red-induction_P Parameter: Timepoint (hr) Value: 4
  misc_feature: MA Experiment 20001248 PARAMETER Experiment Name: At_Far-red-induction_P Parameter: Tissue Value: Whole Plant
  misc_feature: MA Experiment ID: 20001451 Result: Up-regulated in Transcription
  misc_feature: MA Experiment 20001451 PARAMETER Experiment Name: At_Far-red-induction_P Parameter: Age (day) Value: 7
  misc_feature: MA Experiment 20001451 PARAMETER Experiment Name: At_Far-red-induction_P Parameter: Light Value: Far-red vs. White
  misc_feature: MA Experiment 20001451 PARAMETER Experiment Name: At_Far-red-induction_P Parameter: Organism Value: A. thaliana
  misc_feature: MA Experiment 20001451 PARAMETER Experiment Name: At_Far-red-induction_P Parameter: Plant Line Value: Columbia
  misc_feature: MA Experiment 20001451 PARAMETER Experiment Name: At_Far-red-induction_P Parameter: Timepoint (hr) Value: 24
  misc_feature: MA Experiment 20001451 PARAMETER Experiment Name: At_Far-red-induction_P Parameter: Tissue Value: Whole Plant
  misc_feature: MA Experiment ID: 20001555 Result: Down-regulated in Transcription
  misc_feature: MA Experiment 20001555 PARAMETER Experiment Name: At_Drought_Soil_Dry_P Parameter: Age (day) Value: 24
  misc_feature: MA Experiment 20001555 PARAMETER Experiment Name: At_Drought_Soil_Dry_P Parameter: Organism Value: A. thaliana
  misc_feature: MA Experiment 20001555 PARAMETER Experiment Name: At_Drought_Soil_Dry_P Parameter: Plant Line Value: WS
  misc_feature: MA Experiment 20001555 PARAMETER Experiment Name: At_Drought_Soil_Dry_P Parameter: Post Timepoint (hr) Value: None
  misc_feature: MA Experiment 20001555 PARAMETER Experiment Name: At_Drought_Soil_Dry_P Parameter: Post-Treatment Value: None
  misc_feature: MA Experiment 20001555 PARAMETER Experiment Name: At_Drought_Soil_Dry_P Parameter: Timepoint (day) Value: 10
  misc_feature: MA Experiment 20001555 PARAMETER Experiment Name: At_Drought_Soil_Dry_P Parameter: Treatment Value: Drought vs. No Drought
  misc_feature: MA Experiment ID: 20001556 Result: Down-regulated in Transcription
  misc_feature: MA Experiment 20001556 PARAMETER Experiment Name: At_Drought_Soil_Dry_P Parameter: Age (day) Value: 26
  misc_feature: MA Experiment 20001556 PARAMETER Experiment Name: At_Drought_Soil_Dry_P Parameter: Organism Value: A. thaliana
  misc_feature: MA Experiment 20001556 PARAMETER Experiment Name: At_Drought_Soil_Dry_P Parameter: Plant Line Value: WS
  misc_feature: MA Experiment 20001556 PARAMETER Experiment Name: At_Drought_Soil_Dry_P Parameter: Post Timepoint (hr) Value: None
  misc_feature: MA Experiment 20001556 PARAMETER Experiment Name: At_Drought_Soil_Dry_P Parameter: Post-Treatment Value: None
  misc_feature: MA Experiment 20001556 PARAMETER Experiment Name: At_Drought_Soil_Dry_P Parameter: Timepoint (day) Value: 12
  misc_feature: MA Experiment 20001556 PARAMETER Experiment Name: At_Drought_Soil_Dry_P Parameter: Treatment Value: Drought vs. No Drought
  misc_feature: MA Experiment ID: 20001906 Result: Down-regulated in Transcription
  misc_feature: MA Experiment 20001906 PARAMETER Experiment Name: At_Drought_Reproduction_P Parameter: Age (day) Value: 35
  misc_feature: MA Experiment 20001906 PARAMETER Experiment Name: At_Drought_Reproduction_P Parameter: Organism Value: A. thaliana
  misc_feature: MA Experiment 20001906 PARAMETER Experiment Name: At_Drought_Reproduction_P Parameter: Plant Line Value: WS
  misc_feature: MA Experiment 20001906 PARAMETER Experiment Name: At_Drought_Reproduction_P Parameter: Timepoint (day) Value: 5
  misc_feature: MA Experiment 20001906 PARAMETER Experiment Name: At_Drought_Reproduction_P Parameter: Tissue Value: Siliques
  misc_feature: MA Experiment 20001906 PARAMETER Experiment Name: At_Drought_Reproduction_P Parameter: Treatment Value: Drought vs. No Drought
  misc_feature: MA Experiment ID: 20001911 Result: Down-regulated in Transcription
  misc_feature: MA Experiment 20001911 PARAMETER Experiment Name: At_Drought_Reproduction_P Parameter: Age (day) Value: 40
  misc_feature: MA Experiment 20001911 PARAMETER Experiment Name: At_Drought_Reproduction_P Parameter: Organism Value: A. thaliana
  misc_feature: MA Experiment 20001911 PARAMETER Experiment Name: At_Drought_Reproduction_P Parameter: Plant Line Value: WS
  misc_feature: MA Experiment 20001911 PARAMETER Experiment Name: At_Drought_Reproduction_P Parameter: Timepoint (day) Value: 10
  misc_feature: MA Experiment 20001911 PARAMETER Experiment Name: At_Drought_Reproduction_P Parameter: Tissue Value: Flowers
  misc_feature: MA Experiment 20001911 PARAMETER Experiment Name: At_Drought_Reproduction_P Parameter: Treatment Value: Drought vs. No Drought
cttcaatagagaaccaaaaaaaatggcaacagaaggaaaaaaccccatcaacatgaactctatgtcttcaagtcttgcaagaaccggtcaatgggttttttctcaagatattccgaccgatgttgttgttgaagtcggagaagccaatttctctcttcataagttcatgttagtggctaagagtaactacataaggaagctaataatggaatccaaagatagcgacgtgacaagaatcaatctctcggatatacccggaggtcctgagatatttgagaaagctgccaagttctgttacggtgttaacttcgagatcaccgttcagaacgtggcggctcttcattgcgcagccgagtttcttcagatgaccgataagtactgcgacaacaaccttgctggtcggacacaagacttcctttctcaagtagctctctctagcctctctggagctatcgttgtcctcaagtcttgcgagattctccttcctatttctcgtgatcttggtattgtccgccgttgtgtcgacgtcgtcggtgctaaggcttgcaacgaggcaatgtttccatgtcgaacaccaccaaattggtggacagaggaactctgtatcttagacgtcgacttcttctccgatgtcgtatcttcaatgaagcagagaggtgtcaaaccttcttccttagcctctgcaatcatcacctacacagagaaatccttaagagatctcgtcagagaccattcaggcagaggagtcaaatattccgatcccggagataacgaatccgacgaaagatcccaacagagagatcttgttcaatctatcgtctctcttttaccttcagacaaagggctgttcccagtcaatttcctctgttctctcctccgttgcgcggtcttcttagacacttccttgacctgcaagaacgagctcgagaagcgaatctcagtcgttctagaacacgtctccgtcgacgatcttttgatcccgtctttcacctacgacggcgaacggttactagatctcgatagtgtcagaagaatcatctctgctttcgtggaaaaagagaaaaacgttggtgttttcaacggtggagacttcaacagaggagtctgctctgtttcactacaaagagtagctaaaacagttgattcttacttagcggagatcgctacttacggagacctaacaatctccaaattcaacgcgattgcgaatcttgtcccgaaatccgctagaaaatcagacgacgatctctacagagctatagacatcttcttgaaagctcatccgaatctagacgagatcgaaagggaaaaagtgtgtagctcaatggatcccttaaagctttcttacgacgcacgtcttcacgcttcacagaacaagagattaccagtaaacattgttcttcacgctctttactacgatcagttaaagctaagaagtggagtcgcagaacaagaagaaagagcagtagttgttctccctgaagctttaaagacacgtagccaactgcaagctgatactacgttagctaaagaaaacgaagcgttgagaagtgagctgatgaagatgaaaatgtatgtttcggatatgcagaagaataagaacggtgcaggagcttcttcttcgaattcgtcgtcgttggtgagtagtaagaagagcaaacatactttcttctcttctgtttccaagaaacttgggaagttaaatccgtttaaaaatgggtctaaggatacttcgcacatagatgaagatcttggaggtgttgacattactaagccaaggagacgaagattctcaatctcttaaaagaaaacgtttgatctaagtgcttttgtgtgttgtgtataactcttttagactagtgtgcttattgttcccttcttgatgcgtgatttttttttttgggtgtgtgtgtttattgtttaatgagcttggttaataaaatgaaaatcgaaaccagattgatttact

SEQ ID NO: 44265 - protein, 600 aa, Arabidopsis thaliana
  peptide (1)..(600): Ceres Seq. ID no. 12603623
  misc_feature (193)..(452): Pfam Name: NPH3 family Pfam Description: NPH3 family
  misc_feature (193)..(452): Pfam Name: NPH3 family Pfam Description: NPH3 family
  misc_feature (190)..(600): Homolog of NCBI NO: 26006487 NR Description: Hypothetical protein [Oryza sativa (japonica
  misc_feature (194)..(241): Homolog of NCBI NO: 22328160 NR Description: similar to non-phototropic hypocotyl-like protein
  misc_feature (21)..(202): Homolog of NCBI NO: 22328160 NR Description: similar to non-phototropic hypocotyl-like protein
  misc_feature (246)..(570): Homolog of NCBI NO: 22328160 NR Description: similar to non-phototropic hypocotyl-like protein
  misc_feature (194)..(237): Homolog of NCBI NO: 15239705 NR Description: non-phototropic hypocotyl-like protein; protein
  misc_feature (190)..(600): Homolog of NCBI NO: 26006487 NR Description: Hypothetical protein [Oryza sativa (japonica
  misc_feature (21)..(202): Homolog of NCBI NO: 22328160 NR Description: similar to non-phototropic hypocotyl-like protein
  misc_feature (194)..(237): Homolog of NCBI NO: 15239705 NR Description: non-phototropic hypocotyl-like protein; protein
  misc_feature (8)..(600): Homolog of NCBI NO: 30684610 NR Description: expressed protein [Arabidopsis thaliana]
  misc_feature (8)..(600): Homolog of NCBI NO: 6959488 NR Description: RPT2 [Arabidopsis thaliana]
  misc_feature (186)..(600): Homolog of NCBI NO: 25408081 NR Description: hypothetical protein At2g30510 [imported] -
  misc_feature (256)..(574): Homolog of NCBI NO: 15239705 NR Description: non-phototropic hypocotyl-like protein; protein
  misc_feature (23)..(184): Homolog of NCBI NO: 15239705 NR Description: non-phototropic hypocotyl-like protein; protein
  misc_feature (246)..(570): Homolog of NCBI NO: 22328160 NR Description: similar to non-phototropic hypocotyl-like protein
  misc_feature (194)..(241): Homolog of NCBI NO: 22328160 NR Description: similar to non-phototropic hypocotyl-like protein
  misc_feature (23)..(184): Homolog of NCBI NO: 15239705 NR Description: non-phototropic hypocotyl-like protein; protein
  misc_feature (256)..(574): Homolog of NCBI NO: 15239705 NR Description: non-phototropic hypocotyl-like protein; protein
  misc_feature (186)..(600): Homolog of NCBI NO: 25408081 NR Description: hypothetical protein At2g30510 [imported] -
  misc_feature (8)..(600): Homolog of NCBI NO: 6959488 NR Description: RPT2 [Arabidopsis thaliana]
  misc_feature (8)..(600): Homolog of NCBI NO: 30684610 NR Description: expressed protein [Arabidopsis thaliana]
FNREPKKMATEGKNPINMNSMSSSLARTGQWVFSQDIPTDVVVEVGEANFSLHKFMLVAKSNYIRKLIMESKDSDVTRINLSDIPGGPEIFEKAAKFCYGVNFEITVQNVAALHCAAEFLQMTDKYCDNNLAGRTQDFLSQVALSSLSGAIVVLKSCEILLPISRDLGIVRRCVDVVGAKACNEAMFPCRTPPNWWTEELCILDVDFFSDVVSSMKQRGVKPSSLASAIITYTEKSLRDLVRDHSGRGVKYSDPGDNESDERSQQRDLVQSIVSLLPSDKGLFPVNFLCSLLRCAVFLDTSLTCKNELEKRISVVLEHVSVDDLLIPSFTYDGERLLDLDSVRRIISAFVEKEKNVGVFNGGDFNRGVCSVSLQRVAKTVDSYLAEIATYGDLTISKFNAIANLVPKSARKSDDDLYRAIDIFLKAHPNLDEIEREKVCSSMDPLKLSYDARLHASQNKRLPVNIVLHALYYDQLKLRSGVAEQEERAVVVLPEALKTRSQLQADTTLAKENEALRSELMKMKMYVSDMQKNKNGAGASSSNSSSLVSSKKSKHTFFSSVSKKLGKLNPFKNGSKDTSHIDEDLGGVDITKPRRRRFSIS

SEQ ID NO: 44266 - protein, 593 aa, Arabidopsis thaliana
  peptide (1)..(593): Ceres Seq. ID no. 12603624
  misc_feature (186)..(445): Pfam Name: NPH3 family Pfam Description: NPH3 family
  misc_feature (186)..(445): Pfam Name: NPH3 family Pfam Description: NPH3 family
  misc_feature (183)..(593): Homolog of NCBI NO: 26006487 NR Description: Hypothetical protein [Oryza sativa (japonica
  misc_feature (187)..(234): Homolog of NCBI NO: 22328160 NR Description: similar to non-phototropic hypocotyl-like protein
  misc_feature (14)..(195): Homolog of NCBI NO: 22328160 NR Description: similar to non-phototropic hypocotyl-like protein
  misc_feature (239)..(563): Homolog of NCBI NO: 22328160 NR Description: similar to non-phototropic hypocotyl-like protein
  misc_feature (187)..(230): Homolog of NCBI NO: 15239705 NR Description: non-phototropic hypocotyl-like protein; protein
  misc_feature (183)..(593): Homolog of NCBI NO: 26006487 NR Description: Hypothetical protein [Oryza sativa (japonica
  misc_feature (14)..(195): Homolog of NCBI NO: 22328160 NR Description: similar to non-phototropic hypocotyl-like protein
  misc_feature (187)..(230): Homolog of NCBI NO: 15239705 NR Description: non-phototropic hypocotyl-like protein; protein
  misc_feature (1)..(593): Homolog of NCBI NO: 30684610 NR Description: expressed protein [Arabidopsis thaliana]
  misc_feature (1)..(593): Homolog of NCBI NO: 6959488 NR Description: RPT2 [Arabidopsis thaliana]
  misc_feature (179)..(593): Homolog of NCBI NO: 25408081 NR Description: hypothetical protein At2g30510 [imported] -
  misc_feature (249)..(567): Homolog of NCBI NO: 15239705 NR Description: non-phototropic hypocotyl-like protein; protein
  misc_feature (16)..(177): Homolog of NCBI NO: 15239705 NR Description: non-phototropic hypocotyl-like protein; protein
  misc_feature (239)..(563): Homolog of NCBI NO: 22328160 NR Description: similar to non-phototropic hypocotyl-like protein
  misc_feature (187)..(234): Homolog of NCBI NO: 22328160 NR Description: similar to non-phototropic hypocotyl-like protein
  misc_feature (16)..(177): Homolog of NCBI NO: 15239705 NR Description: non-phototropic hypocotyl-like protein; protein
  misc_feature (249)..(567): Homolog of NCBI NO: 15239705 NR Description: non-phototropic hypocotyl-like protein; protein
  misc_feature (179)..(593): Homolog of NCBI NO: 25408081 NR Description: hypothetical protein At2g30510 [imported] -
  misc_feature (1)..(593): Homolog of NCBI NO: 6959488 NR Description: RPT2 [Arabidopsis thaliana]
  misc_feature (1)..(593): Homolog of NCBI NO: 30684610 NR Description: expressed protein [Arabidopsis thaliana]
MATEGKNPINMNSMSSSLARTGQWVFSQDIPTDVVVEVGEANFSLHKFMLVAKSNYIRKLIMESKDSDVTRINLSDIPGGPEIFEKAAKFCYGVNFEITVQNVAALHCAAEFLQMTDKYCDNNLAGRTQDFLSQVALSSLSGAIVVLKSCEILLPISRDLGIVRRCVDVVGAKACNEAMFPCRTPPNWWTEELCILDVDFFSDVVSSMKQRGVKPSSLASAIITYTEKSLRDLVRDHSGRGVKYSDPGDNESDERSQQRDLVQSIVSLLPSDKGLFPVNFLCSLLRCAVFLDTSLTCKNELEKRISVVLEHVSVDDLLIPSFTYDGERLLDLDSVRRIISAFVEKEKNVGVFNGGDFNRGVCSVSLQRVAKTVDSYLAEIATYGDLTISKFNAIANLVPKSARKSDDDLYRAIDIFLKAHPNLDEIEREKVCSSMDPLKLSYDARLHASQNKRLPVNIVLHALYYDQLKLRSGVAEQEERAVVVLPEALKTRSQLQADTTLAKENEALRSELMKMKMYVSDMQKNKNGAGASSSNSSSLVSSKKSKHTFFSSVSKKLGKLNPFKNGSKDTSHIDEDLGGVDITKPRRRRFSIS

SEQ ID NO: 44267 - protein, 583 aa, Arabidopsis thaliana
  peptide (1)..(583): Ceres Seq. ID no. 12603625
  misc_feature (176)..(435): Pfam Name: NPH3 family Pfam Description: NPH3 family
  misc_feature (176)..(435): Pfam Name: NPH3 family Pfam Description: NPH3 family
  misc_feature (173)..(583): Homolog of NCBI NO: 26006487 NR Description: Hypothetical protein [Oryza sativa (japonica
  misc_feature (177)..(224): Homolog of NCBI NO: 22328160 NR Description: similar to non-phototropic hypocotyl-like protein
  misc_feature (4)..(185): Homolog of NCBI NO: 22328160 NR Description: similar to non-phototropic hypocotyl-like protein
  misc_feature (229)..(553): Homolog of NCBI NO: 22328160 NR Description: similar to non-phototropic hypocotyl-like protein
  misc_feature (177)..(220): Homolog of NCBI NO: 15239705 NR Description: non-phototropic hypocotyl-like protein; protein
  misc_feature (173)..(583): Homolog of NCBI NO: 26006487 NR Description: Hypothetical protein [Oryza sativa (japonica
  misc_feature (4)..(185): Homolog of NCBI NO: 22328160 NR Description: similar to non-phototropic hypocotyl-like protein
  misc_feature (177)..(220): Homolog of NCBI NO: 15239705 NR Description: non-phototropic hypocotyl-like protein; protein
  misc_feature (1)..(583): Homolog of NCBI NO: 30684610 NR Description: expressed protein [Arabidopsis thaliana]
  misc_feature (1)..(583): Homolog of NCBI NO: 6959488 NR Description: RPT2 [Arabidopsis thaliana]
  misc_feature (169)..(583): Homolog of NCBI NO: 25408081 NR Description: hypothetical protein At2g30510 [imported] -
  misc_feature (239)..(557): Homolog of NCBI NO: 15239705 NR Description: non-phototropic hypocotyl-like protein; protein
  misc_feature (6)..(167): Homolog of NCBI NO: 15239705 NR Description: non-phototropic hypocotyl-like protein; protein
  misc_feature (229)..(553): Homolog of NCBI NO: 22328160 NR Description: similar to non-phototropic hypocotyl-like protein
  misc_feature (177)..(224): Homolog of NCBI NO: 22328160 NR Description: similar to non-phototropic hypocotyl-like protein
  misc_feature (6)..(167): Homolog of NCBI NO: 15239705 NR Description: non-phototropic hypocotyl-like protein; protein
  misc_feature (239)..(557): Homolog of NCBI NO: 15239705 NR Description: non-phototropic hypocotyl-like protein; protein
  misc_feature (169)..(583): Homolog of NCBI NO: 25408081 NR Description: hypothetical protein At2g30510 [imported] -
  misc_feature (1)..(583): Homolog of NCBI NO: 6959488 NR Description: RPT2 [Arabidopsis thaliana]
  misc_feature (1)..(583): Homolog of NCBI NO: 30684610 NR Description: expressed protein [Arabidopsis thaliana]
MNSMSSSLARTGQWVFSQDIPTDVVVEVGEANFSLHKFMLVAKSNYIRKLIMESKDSDVTRINLSDIPGGPEIFEKAAKFCYGVNFEITVQNVAALHCAAEFLQMTDKYCDNNLAGRTQDFLSQVALSSLSGAIVVLKSCEILLPISRDLGIVRRCVDVVGAKACNEAMFPCRTPPNWWTEELCILDVDFFSDVVSSMKQRGVKPSSLASAIITYTEKSLRDLVRDHSGRGVKYSDPGDNESDERSQQRDLVQSIVSLLPSDKGLFPVNFLCSLLRCAVFLDTSLTCKNELEKRISVVLEHVSVDDLLIPSFTYDGERLLDLDSVRRIISAFVEKEKNVGVFNGGDFNRGVCSVSLQRVAKTVDSYLAEIATYGDLTISKFNAIANLVPKSARKSDDDLYRAIDIFLKAHPNLDEIEREKVCSSMDPLKLSYDARLHASQNKRLPVNIVLHALYYDQLKLRSGVAEQEERAVVVLPEALKTRSQLQADTTLAKENEALRSELMKMKMYVSDMQKNKNGAGASSSNSSSLVSSKKSKHTFFSSVSKKLGKLNPFKNGSKDTSHIDEDLGGVDITKPRRRRFSIS

SEQ ID NO: 44268 - DNA, 1488 bp, Arabidopsis thaliana; identical to SEQ ID NO: 38995
  misc_feature (1)..(1488): Ceres Seq. ID no. 13509260
  misc_feature: MA Experiment ID: 108434 Result: Up-regulated in Transcription
  misc_feature: MA Experiment 108434 PARAMETER Experiment Name: At_Root_Tips_cDNA_P Parameter: Tissue Value: Root Tips
  misc_feature: MA Experiment ID: 20000069 Result: Down-regulated in Transcription
  misc_feature: MA Experiment 20000069 PARAMETER Experiment Name: At_100uM_ABA_Mutants_cDNA_P Parameter: Plant Line Value: CS23
  misc_feature: MA Experiment 20000069 PARAMETER Experiment Name: At_100uM_ABA_Mutants_cDNA_P Parameter: Timepoint (hr) Value: 6
  misc_feature: MA Experiment 20000069 PARAMETER Experiment Name: At_100uM_ABA_Mutants_cDNA_P Parameter: Tissue Value: Aerial
  misc_feature: MA Experiment 20000069 PARAMETER Experiment Name: At_100uM_ABA_Mutants_cDNA_P Parameter: Treatment Value: 100uM ABA vs. No Treatment
  misc_feature: MA Experiment ID: 20000070 Result: Down-regulated in Transcription
  misc_feature: MA Experiment 20000070 PARAMETER Experiment Name: At_100uM_ABA_Mutants_cDNA_P Parameter: Plant Line Value: CS24
  misc_feature: MA Experiment 20000070 PARAMETER Experiment Name: At_100uM_ABA_Mutants_cDNA_P Parameter: Timepoint (hr) Value: 6
  misc_feature: MA Experiment 20000070 PARAMETER Experiment Name: At_100uM_ABA_Mutants_cDNA_P Parameter: Tissue Value: Aerial
  misc_feature: MA Experiment 20000070 PARAMETER Experiment Name: At_100uM_ABA_Mutants_cDNA_P Parameter: Treatment Value: 100uM ABA vs. No Treatment
  misc_feature: MA Experiment ID: 20000072 Result: Down-regulated in Transcription
  misc_feature: MA Experiment 20000072 PARAMETER Experiment Name: At_100uM_ABA_Mutants_cDNA_P Parameter: Plant Line Value: CS8105
  misc_feature: MA Experiment 20000072 PARAMETER Experiment Name: At_100uM_ABA_Mutants_cDNA_P Parameter: Timepoint (hr) Value: 6
  misc_feature: MA Experiment 20000072 PARAMETER Experiment Name: At_100uM_ABA_Mutants_cDNA_P Parameter: Tissue Value: Aerial
  misc_feature: MA Experiment 20000072 PARAMETER Experiment Name: At_100uM_ABA_Mutants_cDNA_P Parameter: Treatment Value: 100uM ABA vs. No Treatment
  misc_feature: MA Experiment ID: 20000089 Result: Down-regulated in Transcription
  misc_feature: MA Experiment ID: 20000117 Result: Down-regulated in Transcription
  misc_feature: MA Experiment 20000117 PARAMETER Experiment Name: At_100uM_ABA_Mutants_cDNA_P Parameter: Plant Line Value: Columbia
  misc_feature: MA Experiment 20000117 PARAMETER Experiment Name: At_100uM_ABA_Mutants_cDNA_P Parameter: Timepoint (hr) Value: 6
  misc_feature: MA Experiment 20000117 PARAMETER Experiment Name: At_100uM_ABA_Mutants_cDNA_P Parameter: Tissue Value: Aerial
  misc_feature: MA Experiment 20000117 PARAMETER Experiment Name: At_100uM_ABA_Mutants_cDNA_P Parameter: Treatment Value: 100uM ABA vs. No Treatment
  misc_feature: MA Experiment ID: 20000179 Result: Up-regulated in Transcription
  misc_feature: MA Experiment 20000179 PARAMETER Experiment Name: At_Germinating_Seeds_P Parameter: Age (hr) Value: 6 vs. 0
  misc_feature: MA Experiment 20000179 PARAMETER Experiment Name: At_Germinating_Seeds_P Parameter: Tissue Value: Germinating Seeds
  misc_feature: MA Experiment ID: 20000185 Result: Up-regulated in Transcription
  misc_feature: MA Experiment 20000185 PARAMETER Experiment Name: At_Roots__P Parameter: Age (day) Value: 7 vs. 21
  misc_feature: MA Experiment 20000185 PARAMETER Experiment Name: At_Roots__P Parameter: Organism Value: A. thaliana
  misc_feature: MA Experiment 20000185 PARAMETER Experiment Name: At_Roots__P Parameter: Tissue Value: Roots vs. Whole Plant
  misc_feature: MA Experiment ID: 20000437 Result: Down-regulated in Transcription
  misc_feature: MA Experiment 20000437 PARAMETER Experiment Name: At_Drought_P Parameter: Age (day) Value: 8
  misc_feature: MA Experiment 20000437 PARAMETER Experiment Name: At_Drought_P Parameter: Organism Value: A. thaliana
  misc_feature: MA Experiment 20000437 PARAMETER Experiment Name: At_Drought_P Parameter: Plant Line Value: WS
  misc_feature: MA Experiment 20000437 PARAMETER Experiment Name: At_Drought_P Parameter: Timepoint (hr) Value: 24
  misc_feature: MA Experiment 20000437 PARAMETER Experiment Name: At_Drought_P Parameter: Tissue Value: Whole Plant
  misc_feature: MA Experiment 20000437 PARAMETER Experiment Name: At_Drought_P Parameter: Treatment Value: Drought vs. No Drought
  misc_feature: MA Experiment ID: 20000794 Result: Down-regulated in Transcription
  misc_feature: MA Experiment 20000794 PARAMETER Experiment Name: At_Petals_P Parameter: Age (day) Value: 23-25 days
  misc_feature: MA Experiment 20000794 PARAMETER Experiment Name: At_Petals_P Parameter: Plant Line Value: WS
  misc_feature: MA Experiment 20000794 PARAMETER Experiment Name: At_Petals_P Parameter: Tissue Value: Petals vs. Whole plant
  misc_feature: MA Experiment ID: 20001459 Result: Up-regulated in Transcription
  misc_feature: MA Experiment 20001459 PARAMETER Experiment Name: At_50mM_NH4NO3_L-to-H_P Parameter: Age (day) Value: Undefined
  misc_feature: MA Experiment 20001459 PARAMETER Experiment Name: At_50mM_NH4NO3_L-to-H_P Parameter: Organism Value: Undefined
  misc_feature: MA Experiment 20001459 PARAMETER Experiment Name: At_50mM_NH4NO3_L-to-H_P Parameter: Plant Line Value: Undefined
  misc_feature: MA Experiment 20001459 PARAMETER Experiment Name: At_50mM_NH4NO3_L-to-H_P Parameter: Timepoint (hr) Value: 4
  misc_feature: MA Experiment 20001459 PARAMETER Experiment Name: At_50mM_NH4NO3_L-to-H_P Parameter: Tissue Value: Siliques
  misc_feature: MA Experiment 20001459 PARAMETER Experiment Name: At_50mM_NH4NO3_L-to-H_P Parameter: Treatment Value: 50mM NH4NO3 vs. 100mM Manitol
  misc_feature: MA Experiment ID: 20001905 Result: Down-regulated in Transcription
  misc_feature: MA Experiment 20001905 PARAMETER Experiment Name: At_Drought_Reproduction_P Parameter: Age (day) Value: 40
  misc_feature: MA Experiment 20001905 PARAMETER Experiment Name: At_Drought_Reproduction_P Parameter: Organism Value: A. thaliana
  misc_feature: MA Experiment 20001905 PARAMETER Experiment Name: At_Drought_Reproduction_P Parameter: Plant Line Value: WS
  misc_feature: MA Experiment 20001905 PARAMETER Experiment Name: At_Drought_Reproduction_P Parameter: Timepoint (day) Value: 10
  misc_feature: MA Experiment 20001905 PARAMETER Experiment Name: At_Drought_Reproduction_P Parameter: Tissue Value: Rosettes
  misc_feature: MA Experiment 20001905 PARAMETER Experiment Name: At_Drought_Reproduction_P Parameter: Treatment Value: Drought vs. No Drought

SEQ ID NO: 44269 - protein, 338 aa, Arabidopsis thaliana; identical to SEQ ID NO: 22717
  peptide (1)..(338): Ceres Seq. ID no. 13509261
  misc_feature (157)..(318): Pfam Name: Glyceraldehyde 3-phosphate dehydrogenase, Pfam Description: Glyceraldehyde 3-phosphate dehydrogenase,
  misc_feature (157)..(318): Pfam Name: Glyceraldehyde 3-phosphate dehydrogenase, Pfam Description: Glyceraldehyde 3-phosphate dehydrogenase,
  misc_feature (5)..(336): Homolog of NCBI NO: 4539543 NR Description: glyceraldehyde-3-phosphate dehydrogenase
  misc_feature (6)..(337): Homolog of NCBI NO: 462137 NR Description: GLYCERALDEHYDE 3-PHOSPHATE DEHYDROGENASE,
  misc_feature (5)..(337): Homolog of NCBI NO: 462141 NR Description: Glyceraldehyde 3-phosphate dehydrogenase (GAPDH)
  misc_feature (1)..(336): Homolog of NCBI NO: 120669 NR Description: Glyceraldehyde 3-phosphate dehydrogenase,
  misc_feature (1)..(338): Homolog of NCBI NO: 22094840 NR Description: glyceraldehyde 3-phosphate dehydrogenase [Solanum
  misc_feature (5)..(336): Homolog of NCBI NO: 4539543 NR Description: glyceraldehyde-3-phosphate dehydrogenase
  misc_feature (5)..(337): Homolog of NCBI NO: 462141 NR Description: Glyceraldehyde 3-phosphate dehydrogenase (GAPDH)
  misc_feature (1)..(338): Homolog of NCBI NO: 22094840 NR Description: glyceraldehyde 3-phosphate dehydrogenase [Solanum
  misc_feature (1)..(338): Homolog of NCBI NO: 15222848 NR Description: glyceraldehyde-3-phosphate dehydrogenase -related
  misc_feature (1)..(338): Homolog of NCBI NO: 15229231 NR Description: glyceraldehyde-3-phosphate dehydrogenase C
  misc_feature (1)..(338): Homolog of NCBI NO: 21593240 NR Description: glyceraldehyde-3-phosphate dehydrogenase C
  misc_feature (1)..(338): Homolog of NCBI NO: 81622 NR Description: glyceraldehyde-3-phosphate dehydrogenase
  misc_feature (1)..(338): Homolog of NCBI NO: 120675 NR Description: Glyceraldehyde 3-phosphate dehydrogenase,
  misc_feature (1)..(336): Homolog of NCBI NO: 120669 NR Description: Glyceraldehyde 3-phosphate dehydrogenase,
  misc_feature (6)..(337): Homolog of NCBI NO: 462137 NR Description: GLYCERALDEHYDE 3-PHOSPHATE DEHYDROGENASE,
  misc_feature (1)..(338): Homolog of NCBI NO: 120675 NR Description: Glyceraldehyde 3-phosphate dehydrogenase,
  misc_feature (1)..(338): Homolog of NCBI NO: 81622 NR Description: glyceraldehyde-3-phosphate dehydrogenase
  misc_feature (1)..(338): Homolog of NCBI NO: 21593240 NR Description: glyceraldehyde-3-phosphate dehydrogenase C
  misc_feature (1)..(338): Homolog of NCBI NO: 15229231 NR Description: glyceraldehyde-3-phosphate dehydrogenase C
  misc_feature (1)..(338): Homolog of NCBI NO: 15222848 NR Description: glyceraldehyde-3-phosphate dehydrogenase -related

SEQ ID NO: 44270 - protein, 294 aa, Arabidopsis thaliana; identical to SEQ ID NO: 22718
  peptide (1)..(294): Ceres Seq. ID no. 13509262
  misc_feature (113)..(274): Pfam Name: Glyceraldehyde 3-phosphate dehydrogenase, Pfam Description: Glyceraldehyde 3-phosphate dehydrogenase,
  misc_feature (113)..(274): Pfam Name: Glyceraldehyde 3-phosphate dehydrogenase, Pfam Description: Glyceraldehyde 3-phosphate dehydrogenase,
  misc_feature (1)..(292): Homolog of NCBI NO: 4539543 NR Description: glyceraldehyde-3-phosphate dehydrogenase
  misc_feature (1)..(293): Homolog of NCBI NO: 462137 NR Description: GLYCERALDEHYDE 3-PHOSPHATE DEHYDROGENASE,
  misc_feature (1)..(293): Homolog of NCBI NO: 462141 NR Description: Glyceraldehyde 3-phosphate dehydrogenase (GAPDH)
  misc_feature (1)..(292): Homolog of NCBI NO: 120669 NR Description: Glyceraldehyde 3-phosphate dehydrogenase,
  misc_feature (1)..(294): Homolog of NCBI NO: 22094840 NR Description: glyceraldehyde 3-phosphate dehydrogenase [Solanum
  misc_feature (1)..(292): Homolog of NCBI NO: 4539543 NR Description: glyceraldehyde-3-phosphate dehydrogenase
  misc_feature (1)..(293): Homolog of NCBI NO: 462141 NR Description: Glyceraldehyde 3-phosphate dehydrogenase (GAPDH)
  misc_feature (1)..(294): Homolog of NCBI NO: 22094840 NR Description: glyceraldehyde 3-phosphate dehydrogenase [Solanum
  misc_feature (1)..(294): Homolog of NCBI NO: 15222848 NR Description: glyceraldehyde-3-phosphate dehydrogenase -related
  misc_feature (1)..(294): Homolog of NCBI NO: 15229231 NR Description: glyceraldehyde-3-phosphate dehydrogenase C
  misc_feature (1)..(294): Homolog of NCBI NO: 21593240 NR Description: glyceraldehyde-3-phosphate dehydrogenase C
  misc_feature (1)..(294): Homolog of NCBI NO: 81622 NR Description: glyceraldehyde-3-phosphate dehydrogenase
  misc_feature (1)..(294): Homolog of NCBI NO: 120675 NR Description: Glyceraldehyde 3-phosphate dehydrogenase,
  misc_feature (1)..(292): Homolog of NCBI NO: 120669 NR Description: Glyceraldehyde 3-phosphate dehydrogenase,
  misc_feature (1)..(293): Homolog of NCBI NO: 462137 NR Description: GLYCERALDEHYDE 3-PHOSPHATE DEHYDROGENASE,
  misc_feature (1)..(294): Homolog of NCBI NO: 120675 NR Description: Glyceraldehyde 3-phosphate dehydrogenase,
  misc_feature (1)..(294): Homolog of NCBI NO: 81622 NR Description: glyceraldehyde-3-phosphate dehydrogenase
  misc_feature (1)..(294): Homolog of NCBI NO: 21593240 NR Description: glyceraldehyde-3-phosphate dehydrogenase C
  misc_feature (1)..(294): Homolog of NCBI NO: 15229231 NR Description: glyceraldehyde-3-phosphate dehydrogenase C
  misc_feature (1)..(294): Homolog of NCBI NO: 15222848 NR Description: glyceraldehyde-3-phosphate dehydrogenase -related

SEQ ID NO: 44271 - protein, 291 aa, Arabidopsis thaliana; identical to SEQ ID NO: 22719
  peptide (1)..(291): Ceres Seq. ID no. 13509263
  misc_feature (110)..(271): Pfam Name: Glyceraldehyde 3-phosphate dehydrogenase, Pfam Description: Glyceraldehyde 3-phosphate dehydrogenase,
  misc_feature (110)..(271): Pfam Name: Glyceraldehyde 3-phosphate dehydrogenase, Pfam Description: Glyceraldehyde 3-phosphate dehydrogenase,
  misc_feature (1)..(289): Homolog of NCBI NO: 4539543 NR Description: glyceraldehyde-3-phosphate dehydrogenase
  misc_feature (1)..(290): Homolog of NCBI NO: 462137 NR Description: GLYCERALDEHYDE 3-PHOSPHATE DEHYDROGENASE,
  misc_feature (1)..(290): Homolog of NCBI NO: 462141 NR Description: Glyceraldehyde 3-phosphate dehydrogenase (GAPDH)
  misc_feature (1)..(289): Homolog of NCBI NO: 120669 NR Description: Glyceraldehyde 3-phosphate dehydrogenase,
  misc_feature (1)..(291): Homolog of NCBI NO: 22094840 NR Description: glyceraldehyde 3-phosphate dehydrogenase [Solanum
  misc_feature (1)..(289): Homolog of NCBI NO: 4539543 NR Description: glyceraldehyde-3-phosphate dehydrogenase
  misc_feature (1)..(290): Homolog of NCBI NO: 462141 NR Description: Glyceraldehyde 3-phosphate dehydrogenase (GAPDH)
  misc_feature (1)..(291): Homolog of NCBI NO: 22094840 NR Description: glyceraldehyde 3-phosphate dehydrogenase [Solanum
  misc_feature (1)..(291): Homolog of NCBI NO: 15222848 NR Description: glyceraldehyde-3-phosphate dehydrogenase -related
  misc_feature (1)..(291): Homolog of NCBI NO: 15229231 NR Description: glyceraldehyde-3-phosphate dehydrogenase C
  misc_feature (1)..(291): Homolog of NCBI NO: 21593240 NR Description: glyceraldehyde-3-phosphate dehydrogenase C
  misc_feature (1)..(291): Homolog of NCBI NO: 81622 NR Description: glyceraldehyde-3-phosphate dehydrogenase
  misc_feature (1)..(291): Homolog of NCBI NO: 120675 NR Description: Glyceraldehyde 3-phosphate dehydrogenase,
  misc_feature (1)..(289): Homolog of NCBI NO: 120669 NR Description: Glyceraldehyde 3-phosphate dehydrogenase,
  misc_feature (1)..(290): Homolog of NCBI NO: 462137 NR Description: GLYCERALDEHYDE 3-PHOSPHATE DEHYDROGENASE,
  misc_feature (1)..(291): Homolog of NCBI NO: 120675 NR Description: Glyceraldehyde 3-phosphate dehydrogenase,
  misc_feature (1)..(291): Homolog of NCBI NO: 81622 NR Description: glyceraldehyde-3-phosphate dehydrogenase
  misc_feature (1)..(291): Homolog of NCBI NO: 21593240 NR Description: glyceraldehyde-3-phosphate dehydrogenase C
  misc_feature (1)..(291): Homolog of NCBI NO: 15229231 NR Description: glyceraldehyde-3-phosphate dehydrogenase C
  misc_feature (1)..(291): Homolog of NCBI NO: 15222848 NR Description: glyceraldehyde-3-phosphate dehydrogenase -related

SEQ ID NO: 44272 - DNA, 1195 bp, Arabidopsis thaliana
  misc_feature (1)..(1195): Ceres Seq. ID no. 12466103
  misc_feature: MA Experiment ID: 108501 Result: Up-regulated in Transcription
  misc_feature: MA Experiment 108501 PARAMETER Experiment Name: At_ap2_floral_buds_cDNA_P Parameter: Plant Line Value: ap2 (Ler.)
  misc_feature: MA Experiment 108501 PARAMETER Experiment Name: At_ap2_floral_buds_cDNA_P Parameter: Tissue Value: Closed Flower
  misc_feature: MA Experiment ID: 20000184 Result: Down-regulated in Transcription
  misc_feature: MA Experiment 20000184 PARAMETER Experiment Name: At_Shoots__P Parameter: Age (day) Value: 7
  misc_feature: MA Experiment 20000184 PARAMETER Experiment Name: At_Shoots__P Parameter: Tissue Value: Shoots vs. Whole Plant
  misc_feature: MA Experiment ID: 20000234 Result: Up-regulated in Transcription
  misc_feature: MA Experiment 20000234 PARAMETER Experiment Name: At_Siliques_P Parameter: Age (day) Value: 21
  misc_feature: MA Experiment 20000234 PARAMETER Experiment Name: At_Siliques_P Parameter: Organism Value: A. thaliana
  misc_feature: MA Experiment 20000234 PARAMETER Experiment Name: At_Siliques_P Parameter: Plant Line Value: WS
  misc_feature: MA Experiment 20000234 PARAMETER Experiment Name: At_Siliques_P Parameter: Tissue Value: Less Than 5mm Siliques vs. Whole Plant
  misc_feature: MA Experiment ID: 20000264 Result: Up-regulated in Transcription
  misc_feature: MA Experiment 20000264 PARAMETER Experiment Name: At_Open_Flower_P Parameter: Age (day) Value: 21
  misc_feature: MA Experiment 20000264 PARAMETER Experiment Name: At_Open_Flower_P Parameter: Plant Line Value: WS
  misc_feature: MA Experiment 20000264 PARAMETER Experiment Name: At_Open_Flower_P Parameter: Tissue Value: Open Flower vs. Whole Plant
  misc_feature: MA Experiment ID: 20000265 Result: Up-regulated in Transcription
  misc_feature: MA Experiment 20000265 PARAMETER Experiment Name: At_Open_Flower_P Parameter: Age (day) Value: 21
  misc_feature: MA Experiment 20000265 PARAMETER Experiment Name: At_Open_Flower_P Parameter: Plant Line Value: WS
  misc_feature: MA Experiment 20000265 PARAMETER Experiment Name: At_Open_Flower_P Parameter: Tissue Value: Closed Flower vs. Whole Plant
  misc_feature: MA Experiment ID: 20000286 Result: Up-regulated in Transcription
  misc_feature: MA Experiment 20000286 PARAMETER Experiment Name: At_Open_Flower_P Parameter: Age (day) Value: 21
  misc_feature: MA Experiment 20000286 PARAMETER Experiment Name: At_Open_Flower_P Parameter: Plant Line Value: WS
  misc_feature: MA Experiment 20000286 PARAMETER Experiment Name: At_Open_Flower_P Parameter: Tissue Value: Half Open vs. Whole Plant
  misc_feature: MA Experiment ID: 20000794 Result: Down-regulated in Transcription
  misc_feature: MA Experiment 20000794 PARAMETER Experiment Name: At_Petals_P Parameter: Age (day) Value: 23-25 days
  misc_feature: MA Experiment 20000794 PARAMETER Experiment Name: At_Petals_P Parameter: Plant Line Value: WS
  misc_feature: MA Experiment 20000794 PARAMETER Experiment Name: At_Petals_P Parameter: Tissue Value: Petals vs. Whole plant
atcaagttcccatctttgtacacatctcttcattcaaaaactctacatttatatctctatatatgcagattccaagcttgtaataattcttgtcatcatgggtttttttcttgccttgtctctccagaaaacttaattttcacaattatgaattattttccttatttttgttactttcttctgtttgatgctctttccccatgaaagaaagaaagagaaagaaagatcacaagggttttatttggtcaccagattaagaattaggatgggaagaggaaagatagaaataaagaggatagagaactcaacaaatcgacaagtgacgttttgcaaaagaagaaatggacttctgaagaaagcctatgagctttcggtcctttgcgatgcagaagttgcgctcattgttttctccactcgtggccgtctctatgaatacgccaataacaacataagatcaaccattgagaggtacaagaaagcttgttctgatagcaccaacactagcactgtccaagaaatcaatgccgcgtactatcaacaagaatctgctaagctgagacaacagatccaaacgattcaaaactccaacaggaatctgatgggagactctttgagttccttaagtgtcaaggaactaaaacaagttgagaatcgccttgagaaagctatctctaggatcaggtccaagaagcatgagttgcttttagttgaaatcgaaaacgcgcagaaaagggagattgagcttgacaatgagaacatctatctaagaactaaggtagcagaagtggagaggtatcaacaacaccatcatcaaatggttagtggttcagagattaatgcaattgaagctttagcctcacgcaattactttgctcatagcattatgactgctggttctggatctggtaatggaggttcttactctgatcccgacaagaaaattcttcatctcggataatctcgtctgcgaaaaaccgagctgcaataactctctgcatgcatctggggattctttgctcagatttatctctacataaaatatgttttggtgcaaaataattcaaagtacaatgaaggtattggtccttcaagactcattgcaatttgtgttgtgtaatgattaagacatactctagtttttattgcttcgtatcatagtatctattctatggtatcttatttagtgattcatatg

SEQ ID NO: 44273 - protein, 256 aa, Arabidopsis thaliana
  peptide (1)..(256): Ceres Seq. ID no. 12466104
  misc_feature (100)..(199): Pfam Name: K-box region Pfam Description: K-box region
  misc_feature (27)..(256): Homolog of NCBI NO: 21955182 NR Description: transcription factor MADS1 [Hyacinthus orientalis]
  misc_feature (27)..(255): Homolog of NCBI NO: 1568513 NR Description: fbp11 [Petunia x hybrida]
  misc_feature (27)..(256): Homolog of NCBI NO: 29467048 NR Description: MADS-box transcription factor AG [Agapanthus
  misc_feature (27)..(256): Homolog of NCBI NO: 27763670 NR Description: mads-box transcription factor [Momordica
  misc_feature (27)..(256): Homolog of NCBI NO: 7446521 NR Description: MADS-box protein - cucumber
  misc_feature (27)..(256): Homolog of NCBI NO: 20385590 NR Description: MADS-box protein 5 [Vitis vinifera]
  misc_feature (27)..(256): Homolog of NCBI NO: 4103342 NR Description: agamous-like putative transcription factor
  misc_feature (27)..(256): Homolog of NCBI NO: 23194453 NR Description: MADS box protein GHMADS-2 [Gossypium hirsutum]
  misc_feature (27)..(256): Homolog of NCBI NO: 30681253 NR Description: MADS-box protein [Arabidopsis thaliana]
  misc_feature (27)..(256): Homolog of NCBI NO: 15234874 NR Description: MADS-box protein
MLFPHERKKEKERSQGFYLVTRLRIRMGRGKIEIKRIENSTNRQVTFCKRRNGLLKKAYELSVLCDAEVALIVFSTRGRLYEYANNNIRSTIERYKKACSDSTNTSTVQEINAAYYQQESAKLRQQIQTIQNSNRNLMGDSLSSLSVKELKQVENRLEKAISRIRSKKHELLLVEIENAQKREIELDNENIYLRTKVAEVERYQQHHHQMVSGSEINAIEALASRNYFAHSIMTAGSGSGNGGSYSDPDKKILHLG

SEQ ID NO: 44274 - protein, 230 aa, Arabidopsis thaliana
  peptide (1)..(230): Ceres Seq. ID no. 12466105
  misc_feature (74)..(173): Pfam Name: K-box region Pfam Description: K-box region
  misc_feature (1)..(230): Homolog of NCBI NO: 21955182 NR Description: transcription factor MADS1 [Hyacinthus orientalis]
  misc_feature (1)..(229): Homolog of NCBI NO: 1568513 NR Description: fbp11 [Petunia x hybrida]
  misc_feature (1)..(230): Homolog of NCBI NO: 29467048 NR Description: MADS-box transcription factor AG [Agapanthus
  misc_feature (1)..(230): Homolog of NCBI NO: 27763670 NR Description: mads-box transcription factor [Momordica
  misc_feature (1)..(230): Homolog of NCBI NO: 7446521 NR Description: MADS-box protein - cucumber
  misc_feature (1)..(230): Homolog of NCBI NO: 20385590 NR Description: MADS-box protein 5 [Vitis vinifera]
  misc_feature (1)..(230): Homolog of NCBI NO: 4103342 NR Description: agamous-like putative transcription factor
  misc_feature (1)..(230): Homolog of NCBI NO: 23194453 NR Description: MADS box protein GHMADS-2 [Gossypium hirsutum]
  misc_feature (1)..(230): Homolog of NCBI NO: 30681253 NR Description: MADS-box protein [Arabidopsis thaliana]
  misc_feature (1)..(230): Homolog of NCBI NO: 15234874 NR Description: MADS-box protein
MGRGKIEIKRIENSTNRQVTFCKRRNGLLKKAYELSVLCDAEVALIVFSTRGRLYEYANNNIRSTIERYKKACSDSTNTSTVQEINAAYYQQESAKLRQQIQTIQNSNRNLMGDSLSSLSVKELKQVENRLEKAISRIRSKKHELLLVEIENAQKREIELDNENIYLRTKVAEVERYQQHHHQMVSGSEINAIEALASRNYFAHSIMTAGSGSGNGGSYSDPDKKILHLG

SEQ ID NO: 44275 - DNA, 703 bp, Arabidopsis thaliana; identical to SEQ ID NO: 40829
  misc_feature (1)..(703): Ceres Seq. ID no. 12580344
  misc_feature: MA Experiment ID: 108461 Result: Down-regulated in Transcription
  misc_feature: MA Experiment 108461 PARAMETER Experiment Name: At_Germinating_Seeds_cDNA_P Parameter: Age (day) Value: 1 vs. 0
  misc_feature: MA Experiment 108461 PARAMETER Experiment Name: At_Germinating_Seeds_cDNA_P Parameter: Tissue Value: Germinating Seeds
  misc_feature: MA Experiment ID: 108488 Result: Down-regulated in Transcription
  misc_feature: MA Experiment ID: 108569 Result: Up-regulated in Transcription
  misc_feature: MA Experiment 108569 PARAMETER Experiment Name: At_0.001%_MeJA__cDNA_P Parameter: Timepoint (hr) Value: 6
  misc_feature: MA Experiment 108569 PARAMETER Experiment Name: At_0.001%_MeJA__cDNA_P Parameter: Tissue Value: Aerial
  misc_feature: MA Experiment 108569 PARAMETER Experiment Name: At_0.001%_MeJA__cDNA_P Parameter: Treatment Value: 0.001% MeJA vs. No Treatment
  misc_feature: MA Experiment ID: 108573 Result: Up-regulated in Transcription
  misc_feature: MA Experiment 108573 PARAMETER Experiment Name: At_Drought_cDNA_P Parameter: Timepoint (hr) Value: 6
  misc_feature: MA Experiment 108573 PARAMETER Experiment Name: At_Drought_cDNA_P Parameter: Tissue Value: Aerial
  misc_feature: MA Experiment 108573 PARAMETER Experiment Name: At_Drought_cDNA_P Parameter: Treatment Value: Drought vs. No Drought
  misc_feature: MA Experiment ID: 108585 Result: Up-regulated in Transcription
  misc_feature: MA Experiment 108585 PARAMETER Experiment Name: At_5mM_NaNP_cDNA_P Parameter: Timepoint (hr) Value: 6
  misc_feature: MA Experiment 108585 PARAMETER Experiment Name: At_5mM_NaNP_cDNA_P Parameter: Tissue Value: Aerial
  misc_feature: MA Experiment 108585 PARAMETER Experiment Name: At_5mM_NaNP_cDNA_P Parameter: Treatment Value: null
  misc_feature: MA Experiment ID: 108595 Result: Up-regulated in Transcription
  misc_feature: MA Experiment 108595 PARAMETER Experiment Name: At_Ler-pi_Ovule_cDNA_P Parameter: Plant Line Value: null

SEQ ID NO: 44276 - protein, 179 aa, Arabidopsis thaliana; identical to SEQ ID NO: 40830
  peptide (1)..(179): Ceres Seq. ID no. 12580345
  misc_feature (27)..(155): Pfam Name: No apical meristem (NAM) protein Pfam Description: No apical meristem (NAM) protein
  misc_feature (27)..(155): Pfam Name: No apical meristem (NAM) protein Pfam Description: No apical meristem (NAM) protein
  misc_feature (19)..(175): Homolog of NCBI NO: 21593389 NR Description: NAC, putative [Arabidopsis thaliana]
  misc_feature (19)..(175): Homolog of NCBI NO: 18398895 NR Description: expressed protein; protein id: At3g10500.1
  misc_feature (19)..(175): Homolog of NCBI NO: 8567779 NR Description: NAC, putative [Arabidopsis thaliana]
  misc_feature (19)..(175): Homolog of NCBI NO: 15237699 NR Description: putative protein
  misc_feature (27)..(175): Homolog of NCBI NO: 21105746 NR Description: nam-like protein 9 [Petunia x hybrida]
  misc_feature (19)..(175): Homolog of NCBI NO: 21593389 NR Description: NAC, putative [Arabidopsis thaliana]
  misc_feature (19)..(175): Homolog of NCBI NO: 8567779 NR Description: NAC, putative [Arabidopsis thaliana]
  misc_feature (27)..(175): Homolog of NCBI NO: 21105746 NR Description: nam-like protein 9 [Petunia x hybrida]
  misc_feature (1)..(175): Homolog of NCBI NO: 18398893 NR Description: expressed protein; protein id: At3g10490.1
  misc_feature (1)..(175): Homolog of NCBI NO: 30681347 NR Description: expressed protein [Arabidopsis thaliana]
  misc_feature (1)..(175): Homolog of NCBI NO: 18398891 NR Description: expressed protein; protein id: At3g10480.1
  misc_feature (1)..(175): Homolog of NCBI NO: 21105744 NR Description: nam-like protein 8 [Petunia x hybrida]
  misc_feature (1)..(175): Homolog of NCBI NO: 21105736 NR Description: nam-like protein 4 [Petunia x hybrida]
  misc_feature (19)..(175): Homolog of NCBI NO: 15237699 NR Description: putative protein
  misc_feature (19)..(175): Homolog of NCBI NO: 18398895 NR Description: expressed protein; protein id: At3g10500.1
  misc_feature (1)..(175): Homolog of NCBI NO: 21105736 NR Description: nam-like protein 4 [Petunia x hybrida]
  misc_feature (1)..(175): Homolog of NCBI NO: 21105744 NR Description: nam-like protein 8 [Petunia x hybrida]
  misc_feature (1)..(175): Homolog of NCBI NO: 18398891 NR Description: expressed protein; protein id: At3g10480.1
  misc_feature (1)..(175): Homolog of NCBI NO: 30681347 NR Description: expressed protein [Arabidopsis thaliana]
  misc_feature (1)..(175): Homolog of NCBI NO: 18398893 NR Description: expressed protein; protein id: At3g10490.1

SEQ ID NO: 44277 - DNA, 816 bp, Arabidopsis thaliana
  misc_feature (1)..(816): Ceres Seq. ID no. 12466099
  misc_feature: MA Experiment ID: 108434 Result: Down-regulated in Transcription
  misc_feature: MA Experiment 108434 PARAMETER Experiment Name: At_Root_Tips_cDNA_P Parameter: Tissue Value: Root Tips
  misc_feature: MA Experiment ID: 108462 Result: Up-regulated in Transcription
  misc_feature: MA Experiment 108462 PARAMETER Experiment Name: At_Germinating_Seeds_cDNA_P Parameter: Age (day) Value: 2 vs. 0
  misc_feature: MA Experiment 108462 PARAMETER Experiment Name: At_Germinating_Seeds_cDNA_P Parameter: Tissue Value: Germinating Seeds
  misc_feature: MA Experiment ID: 108463 Result: Up-regulated in Transcription
  misc_feature: MA Experiment 108463 PARAMETER Experiment Name: At_Germinating_Seeds_cDNA_P Parameter: Age (day) Value: 3 vs. 0
  misc_feature: MA Experiment 108463 PARAMETER Experiment Name: At_Germinating_Seeds_cDNA_P Parameter: Tissue Value: Germinating Seeds
  misc_feature: MA Experiment ID: 108464 Result: Up-regulated in Transcription
  misc_feature: MA Experiment 108464 PARAMETER Experiment Name: At_Germinating_Seeds_cDNA_P Parameter: Age (day) Value: 4 vs. 0
  misc_feature: MA Experiment 108464 PARAMETER Experiment Name: At_Germinating_Seeds_cDNA_P Parameter: Tissue Value: Germinating Seeds
  misc_feature: MA Experiment ID: 108561 Result: Up-regulated in Transcription
  misc_feature: MA Experiment 108561 PARAMETER Experiment Name: At_100uM_ABA_cDNA_P Parameter: Timepoint (hr) Value: 6
  misc_feature: MA Experiment 108561 PARAMETER Experiment Name: At_100uM_ABA_cDNA_P Parameter: Tissue Value: Aerial
  misc_feature: MA Experiment 108561 PARAMETER Experiment Name: At_100uM_ABA_cDNA_P Parameter: Treatment Value: 100uM ABA vs. No Treatment
  misc_feature: MA Experiment ID: 108594 Result: Down-regulated in Transcription
  misc_feature: MA Experiment 108594 PARAMETER Experiment Name: At_Ler-rhl_Root_cDNA_P Parameter: Plant Line Value: null
  misc_feature: MA Experiment ID: 20000171 Result: Up-regulated in Transcription
  misc_feature: MA Experiment 20000171 PARAMETER Experiment Name: At_42deg_Heat_P Parameter: Age (day) Value: 14
  misc_feature: MA Experiment 20000171 PARAMETER Experiment Name: At_42deg_Heat_P Parameter: Organism Value: A. thaliana
  misc_feature: MA Experiment 20000171 PARAMETER Experiment Name: At_42deg_Heat_P Parameter: Plant Line Value: WS
  misc_feature: MA Experiment 20000171 PARAMETER Experiment Name: At_42deg_Heat_P Parameter: Temperature (deg C) Value: 42 vs. 22
  misc_feature: MA Experiment 20000171 PARAMETER Experiment Name: At_42deg_Heat_P Parameter: Timepoint (hr) Value: 1
  misc_feature: MA Experiment 20000171 PARAMETER Experiment Name: At_42deg_Heat_P Parameter: Tissue Value: Aerial
  misc_feature: MA Experiment ID: 20000184 Result: Up-regulated in Transcription
  misc_feature: MA Experiment 20000184 PARAMETER Experiment Name: At_Shoots__P Parameter: Age (day) Value: 7
  misc_feature: MA Experiment 20000184 PARAMETER Experiment Name: At_Shoots__P Parameter: Tissue Value: Shoots vs. Whole Plant
  misc_feature: MA Experiment ID: 20000185 Result: Up-regulated in Transcription
  misc_feature: MA Experiment 20000185 PARAMETER Experiment Name: At_Roots__P Parameter: Age (day) Value: 7 vs. 21
  misc_feature: MA Experiment 20000185 PARAMETER Experiment Name: At_Roots__P Parameter: Organism Value: A. thaliana
  misc_feature: MA Experiment 20000185 PARAMETER Experiment Name: At_Roots__P Parameter: Tissue Value: Roots vs. Whole Plant
  misc_feature: MA Experiment ID: 20000227 Result: Down-regulated in Transcription
  misc_feature: MA Experiment 20000227 PARAMETER Experiment Name: At_Root-Tips-vs-Tops_P Parameter: Tissue Value: Root Tips vs. Root Tops
  misc_feature: MA Experiment ID: 20000269 Result: Up-regulated in Transcription
  misc_feature: MA Experiment 20000269 PARAMETER Experiment Name: At_1mM_KNO3_L-vs-H_Roots_P Parameter: Age (day) Value: 7,10,12
  misc_feature: MA Experiment 20000269 PARAMETER Experiment Name: At_1mM_KNO3_L-vs-H_Roots_P Parameter: Organism Value: A. thaliana
  misc_feature: MA Experiment 20000269 PARAMETER Experiment Name: At_1mM_KNO3_L-vs-H_Roots_P Parameter: Plant Line Value: WS
  misc_feature: MA Experiment 20000269 PARAMETER Experiment Name: At_1mM_KNO3_L-vs-H_Roots_P Parameter: Timepoint (day) Value: 7,10,12
  misc_feature: MA Experiment 20000269 PARAMETER Experiment Name: At_1mM_KNO3_L-vs-H_Roots_P Parameter: Tissue Value: Roots
  misc_feature: MA Experiment 20000269 PARAMETER Experiment Name: At_1mM_KNO3_L-vs-H_Roots_P Parameter: Treatment Value: 1mM KNO3 vs. 50mM KNO3
  misc_feature: MA Experiment ID: 20000439 Result: Up-regulated in Transcription
  misc_feature: MA Experiment 20000439 PARAMETER Experiment Name: At_Roots__P Parameter: Age (day) Value: 14 vs. 21
  misc_feature: MA Experiment 20000439 PARAMETER Experiment Name: At_Roots__P Parameter: Organism Value: A. thaliana
  misc_feature: MA Experiment 20000439 PARAMETER Experiment Name: At_Roots__P Parameter: Tissue Value: Roots vs. Whole Plant
  misc_feature: MA Experiment ID: 20000527 Result: Down-regulated in Transcription
  misc_feature: MA Experiment 20000527 PARAMETER Experiment Name: At_10percent_PEG_P Parameter: Age (day) Value: 20
  misc_feature: MA Experiment 20000527 PARAMETER Experiment Name: At_10percent_PEG_P Parameter: Organism Value: A. thaliana
  misc_feature: MA Experiment 20000527 PARAMETER Experiment Name: At_10percent_PEG_P Parameter: Plant Line Value: WS
  misc_feature: MA Experiment 20000527 PARAMETER Experiment Name: At_10percent_PEG_P Parameter: Timepoint (day) Value: 20
  misc_feature: MA Experiment 20000527 PARAMETER Experiment Name: At_10percent_PEG_P Parameter: Tissue Value: Whole Plant
  misc_feature: MA Experiment 20000527 PARAMETER Experiment Name: At_10percent_PEG_P Parameter: Treatment Value: 10percent PEG vs. No Treatment
atcattctcatcaaaagctatggctactctccaaataccttctgctcttttaagatctttccttcttatgttttgtctctttgtaatcccatctctctcatctgattctgatcctttacaagacttctgcgttggcgatctcaaagcttctgcttccatcaatggctttccatgcaaatcagccgtttctgcttctgacttcttctactccggtttaggtggccccttagacacgtcaaaccctaacggagtaaccgttgctcccgccaacgtcttaaccttcccgggtctaaacactttaggaatctcgatgaataacgttgagctagctccaggaggtgtaaatccgcctcacttgcacccgcgtgcaaccgaagtaggaactgtgatcgaaggctcggtgtttgtcggattcttgagtaccaacaacactttgttctcaaaagttttgaatgcaggagaggcgtttgttatccctagaggattggttcatttccaatggaacgttggccaagtgaaagcgcgaatgataaccgcttttaacagccagctcccaggagcagttgttttgcctagtactctgttcggctcgaaacctgagattccaaacgcagtcctgaccagagcgtttaggactgatgatacaactgtgcagaatctcaagtccaagtttgctgtttgaatctttttatttatgttttctaaaataatttttcacaataagctttatagcaatattggtatacacttgtctctgtaataatcggtatgaatattcgaaacaaaacaataataagattgatctctttctctctc

SEQ ID NO: 44278 - protein, 226 aa, Arabidopsis thaliana
  peptide (1)..(226): Ceres Seq. ID no. 12466100
  misc_feature (70)..(218): Pfam Name: Cupin Pfam Description: Cupin
  misc_feature (14)..(224): Homolog of NCBI NO: 15217561 NR Description: germin-like protein
  misc_feature (22)..(225): Homolog of NCBI NO: 1171937 NR Description: Oxalate oxidase 2 precursor (Germin)
  misc_feature (30)..(224): Homolog of NCBI NO: 34902528 NR Description: probable germin protein 4
  misc_feature (22)..(225): Homolog of NCBI NO: 11967814 NR Description: oxalate oxidase [Lolium perenne]
  misc_feature (15)..(225): Homolog of NCBI NO: 21912428 NR Description: oxalate oxidase 2 [Lolium perenne]
  misc_feature (14)..(224): Homolog of NCBI NO: 15221388 NR Description: germin subunit, putative; protein id: At1g74820.1
  misc_feature (18)..(224): Homolog of NCBI NO: 25044823 NR Description: germin-like protein [Ananas comosus]
  misc_feature (7)..(226): Homolog of NCBI NO: 15221902 NR Description: germin, putative
  misc_feature (23)..(226): Homolog of NCBI NO: 18394676 NR Description: germin, putative
  misc_feature (7)..(226): Homolog of NCBI NO: 18202452 NR Description: Germin-like protein subfamily T member 1
SFSSKAMATLQIPSALLRSFLLMFCLFVIPSLSSDSDPLQDFCVGDLKASASINGFPCKSAVSASDFFYSGLGGPLDTSNPNGVTVAPANVLTFPGLNTLGISMNNVELAPGGVNPPHLHPRATEVGTVIEGSVFVGFLSTNNTLFSKVLNAGEAFVIPRGLVHFQWNVGQVKARMITAFNSQLPGAVVLPSTLFGSKPEIPNAVLTRAFRTDDTTVQNLKSKFAV

SEQ ID NO: 44279 - protein, 220 aa, Arabidopsis thaliana
  peptide (1)..(220): Ceres Seq. ID no. 12466101
  misc_feature (64)..(212): Pfam Name: Cupin Pfam Description: Cupin
  misc_feature (8)..(218): Homolog of NCBI NO: 15217561 NR Description: germin-like protein
  misc_feature (16)..(219): Homolog of NCBI NO: 1171937 NR Description: Oxalate oxidase 2 precursor (Germin)
  misc_feature (24)..(218): Homolog of NCBI NO: 34902528 NR Description: probable germin protein 4
  misc_feature (16)..(219): Homolog of NCBI NO: 11967814 NR Description: oxalate oxidase [Lolium perenne]
  misc_feature (9)..(219): Homolog of NCBI NO: 21912428 NR Description: oxalate oxidase 2 [Lolium perenne]
  misc_feature (8)..(218): Homolog of NCBI NO: 15221388 NR Description: germin subunit, putative; protein id: At1g74820.1
  misc_feature (12)..(218): Homolog of NCBI NO: 25044823 NR Description: germin-like protein [Ananas comosus]
  misc_feature (1)..(220): Homolog of NCBI NO: 15221902 NR Description: germin, putative
  misc_feature (17)..(220): Homolog of NCBI NO: 18394676 NR Description: germin, putative
  misc_feature (1)..(220): Homolog of NCBI NO: 18202452 NR Description: Germin-like protein subfamily T member 1
MATLQIPSALLRSFLLMFCLFVIPSLSSDSDPLQDFCVGDLKASASINGFPCKSAVSASDFFYSGLGGPLDTSNPNGVTVAPANVLTFPGLNTLGISMNNVELAPGGVNPPHLHPRATEVGTVIEGSVFVGFLSTNNTLFSKVLNAGEAFVIPRGLVHFQWNVGQVKARMITAFNSQLPGAVVLPSTLFGSKPEIPNAVLTRAFRTDDTTVQNLKSKFAV

SEQ ID NO: 44280 - protein, 204 aa, Arabidopsis thaliana
  peptide (1)..(204): Ceres Seq. ID no. 12466102
  misc_feature (48)..(196): Pfam Name: Cupin Pfam Description: Cupin
  misc_feature (1)..(202): Homolog of NCBI NO: 15217561 NR Description: germin-like protein
  misc_feature (1)..(203): Homolog of NCBI NO: 1171937 NR Description: Oxalate oxidase 2 precursor (Germin)
  misc_feature (8)..(202): Homolog of NCBI NO: 34902528 NR Description: probable germin protein 4
  misc_feature (1)..(203): Homolog of NCBI NO: 11967814 NR Description: oxalate oxidase [Lolium perenne]
  misc_feature (1)..(203): Homolog of NCBI NO: 21912428 NR Description: oxalate oxidase 2 [Lolium perenne]
  misc_feature (1)..(202): Homolog of NCBI NO: 15221388 NR Description: germin subunit, putative; protein id: At1g74820.1
  misc_feature (1)..(202): Homolog of NCBI NO: 25044823 NR Description: germin-like protein [Ananas comosus]
  misc_feature (1)..(204): Homolog of NCBI NO: 15221902 NR Description: germin, putative
  misc_feature (1)..(204): Homolog of NCBI NO: 18394676 NR Description: germin, putative
  misc_feature (1)..(204): Homolog of NCBI NO: 18202452 NR Description: Germin-like protein subfamily T member 1
MFCLFVIPSLSSDSDPLQDFCVGDLKASASINGFPCKSAVSASDFFYSGLGGPLDTSNPNGVTVAPANVLTFPGLNTLGISMNNVELAPGGVNPPHLHPRATEVGTVIEGSVFVGFLSTNNTLFSKVLNAGEAFVIPRGLVHFQWNVGQVKARMITAFNSQLPGAVVLPSTLFGSKPEIPNAVLTRAFRTDDTTVQNLKSKFAV

SEQ ID NO: 44281 - DNA, 1182 bp, Arabidopsis thaliana
  misc_feature (1)..(1182): Ceres Seq. ID no. 13509408
  misc_feature: MA Experiment ID: 20000180 Result: Down-regulated in Transcription
  misc_feature: MA Experiment 20000180 PARAMETER Experiment Name: At_Germinating_Seeds_P Parameter: Age (hr) Value: 24 vs. 0
  misc_feature: MA Experiment 20000180 PARAMETER Experiment Name: At_Germinating_Seeds_P Parameter: Tissue Value: Germinating Seeds
  misc_feature: MA Experiment ID: 20000185 Result: Up-regulated in Transcription
  misc_feature: MA Experiment 20000185 PARAMETER Experiment Name: At_Roots__P Parameter: Age (day) Value: 7 vs. 21
  misc_feature: MA Experiment 20000185 PARAMETER Experiment Name: At_Roots__P Parameter: Organism Value: A. thaliana
  misc_feature: MA Experiment 20000185 PARAMETER Experiment Name: At_Roots__P Parameter: Tissue Value: Roots vs. Whole Plant
  misc_feature: MA Experiment ID: 20000234 Result: Down-regulated in Transcription
  misc_feature: MA Experiment 20000234 PARAMETER Experiment Name: At_Siliques_P Parameter: Age (day) Value: 21
  misc_feature: MA Experiment 20000234 PARAMETER Experiment Name: At_Siliques_P Parameter: Organism Value: A. thaliana
  misc_feature: MA Experiment 20000234 PARAMETER Experiment Name: At_Siliques_P Parameter: Plant Line Value: WS
  misc_feature: MA Experiment 20000234 PARAMETER Experiment Name: At_Siliques_P Parameter: Tissue Value: Less Than 5mm Siliques vs. Whole Plant
  misc_feature: MA Experiment ID: 20000269 Result: Down-regulated in Transcription
  misc_feature: MA Experiment 20000269 PARAMETER Experiment Name: At_1mM_KNO3_L-vs-H_Roots_P Parameter: Age (day) Value: 7,10,12
  misc_feature: MA Experiment 20000269 PARAMETER Experiment Name: At_1mM_KNO3_L-vs-H_Roots_P Parameter: Organism Value: A. thaliana
  misc_feature: MA Experiment 20000269 PARAMETER Experiment Name: At_1mM_KNO3_L-vs-H_Roots_P Parameter: Plant Line Value: WS
  misc_feature: MA Experiment 20000269 PARAMETER Experiment Name: At_1mM_KNO3_L-vs-H_Roots_P Parameter: Timepoint (day) Value: 7,10,12
  misc_feature: MA Experiment 20000269 PARAMETER Experiment Name: At_1mM_KNO3_L-vs-H_Roots_P Parameter: Tissue Value: Roots
  misc_feature: MA Experiment 20000269 PARAMETER Experiment Name: At_1mM_KNO3_L-vs-H_Roots_P Parameter: Treatment Value: 1mM KNO3 vs. 50mM KNO3
  misc_feature: MA Experiment ID: 20000437 Result: Up-regulated in Transcription
  misc_feature: MA Experiment 20000437 PARAMETER Experiment Name: At_Drought_P Parameter: Age (day) Value: 8
  misc_feature: MA Experiment 20000437 PARAMETER Experiment Name: At_Drought_P Parameter: Organism Value: A. thaliana
  misc_feature: MA Experiment 20000437 PARAMETER Experiment Name: At_Drought_P Parameter: Plant Line Value: WS
  misc_feature: MA Experiment 20000437 PARAMETER Experiment Name: At_Drought_P Parameter: Timepoint (hr) Value: 24
  misc_feature: MA Experiment 20000437 PARAMETER Experiment Name: At_Drought_P Parameter: Tissue Value: Whole Plant
  misc_feature: MA Experiment 20000437 PARAMETER Experiment Name: At_Drought_P Parameter: Treatment Value: Drought vs. No Drought
  misc_feature: MA Experiment ID: 20000439 Result: Up-regulated in Transcription
  misc_feature: MA Experiment 20000439 PARAMETER Experiment Name: At_Roots__P Parameter: Age (day) Value: 14 vs. 21
  misc_feature: MA Experiment 20000439 PARAMETER Experiment Name: At_Roots__P Parameter: Organism Value: A. thaliana
  misc_feature: MA Experiment 20000439 PARAMETER Experiment Name: At_Roots__P Parameter: Tissue Value: Roots vs. Whole Plant
  misc_feature: MA Experiment ID: 20000451 Result: Down-regulated in Transcription
  misc_feature: MA Experiment 20000451 PARAMETER Experiment Name: At_CS6879_Shoots-Roots_P Parameter: Age (day) Value: 14
  misc_feature: MA Experiment 20000451 PARAMETER Experiment Name: At_CS6879_Shoots-Roots_P Parameter: Organism Value: A. thaliana
  misc_feature: MA Experiment 20000451 PARAMETER Experiment Name: At_CS6879_Shoots-Roots_P Parameter: Plant Line Value: CS6879 vs. WS
  misc_feature: MA Experiment 20000451 PARAMETER Experiment Name: At_CS6879_Shoots-Roots_P Parameter: Tissue Value: Roots
  misc_feature: MA Experiment ID: 20000794 Result: Down-regulated in Transcription
  misc_feature: MA Experiment 20000794 PARAMETER Experiment Name: At_Petals_P Parameter: Age (day) Value: 23-25 days
  misc_feature: MA Experiment 20000794 PARAMETER Experiment Name: At_Petals_P Parameter: Plant Line Value: WS
  misc_feature: MA Experiment 20000794 PARAMETER Experiment Name: At_Petals_P Parameter: Tissue Value: Petals vs. Whole plant
  misc_feature: MA Experiment ID: 20001555 Result: Up-regulated in Transcription
  misc_feature: MA Experiment 20001555 PARAMETER Experiment Name: At_Drought_Soil_Dry_P Parameter: Age (day) Value: 24
  misc_feature: MA Experiment 20001555 PARAMETER Experiment Name: At_Drought_Soil_Dry_P Parameter: Organism Value: A. thaliana
  misc_feature: MA Experiment 20001555 PARAMETER Experiment Name: At_Drought_Soil_Dry_P Parameter: Plant Line Value: WS
  misc_feature: MA Experiment 20001555 PARAMETER Experiment Name: At_Drought_Soil_Dry_P Parameter: Post Timepoint (hr) Value: None
  misc_feature: MA Experiment 20001555 PARAMETER Experiment Name: At_Drought_Soil_Dry_P Parameter: Post-Treatment Value: None
  misc_feature: MA Experiment 20001555 PARAMETER Experiment Name: At_Drought_Soil_Dry_P Parameter: Timepoint (day) Value: 10
  misc_feature: MA Experiment 20001555 PARAMETER Experiment Name: At_Drought_Soil_Dry_P Parameter: Treatment Value: Drought vs. No Drought
atgcaattaaaagccaatttcctccgcttcaaaatctcagtcgtgtgcgcacataaacctttaccaaaatcccagcaatcgatgattttccggcgattctccgggagatttctaactgcgatccccgactcttgtaaacttaaattcgaagctaaacggagtttccgatctgatgcggcgctcgaagccatagctaatgcattagaagagaaagtaccaaacttagtgttatacaattatccttccttctccggcgctttttcagctctcttcgctcatctctaccactatcgactccgtcttccttgtctcatcttacccttttcttccctcataccctttagggttgaagatttgtgtttggaggggtttgagaggtgttaccttctcgattttgttgttccaaaagattttgcttgccagaaaacagcttgcgagatcgtttgctttgatcatcggaactccgcattgaaaaggattggcttaataaaggaagagcacaagaagaggcttaagatttatgttgatactgaaactagtagctcaaaggctgtgtataaatatttctctagtaaactcacagatcaaagatcttctgaggtagaagctctcagtttgctaagtgtagaagacaaaactcgggttgaatcggttcttgattacattgaggatatcgatcttcggcgatggatgttaccagatatcaaagctttcagctttggtcttaaggattggcgctcaaggatcaattgtatcatcaatccttacatgtacgaacagttgttgaaaataagttcagcggatctcattgcgtatgggaattcgtatttttcatctcgtcttattgatgcaaagaaactgctaaagctgaataaagctttcaagattagattgggaagagggttatatggagagtgcctgggaatgcgcgcagatggtaaccatcaactaagcgatgaacttggcaagcttcttagtctacaaagttctgcagctggtctgaggcctataggagctgttacatttgtgcaaaggaataatctcaaaatgtgcttgagaagtaccgatgctataaccaatacatccgaagttgctaaggcttatggaggaggtggaacgtctagttcaagctcgtttatcataagaatggatgaatataatcaatggatttcgaagctttga

SEQ ID NO: 44282 - protein, 393 aa, Arabidopsis thaliana
  peptide (1)..(393): Ceres Seq. ID no. 13509409
  misc_feature (76)..(389): Homolog of NCBI NO: 25405983 NR Description: protein F12M16.25 [imported] - Arabidopsis
  misc_feature (76)..(389): Homolog of NCBI NO: 18404427 NR Description: expressed protein [Arabidopsis thaliana]
  misc_feature (76)..(389): Homolog of NCBI NO: 21593117 NR Description: unknown [Arabidopsis thaliana]
  misc_feature (1)..(393): Homolog of NCBI NO: 15242457 NR Description: hypothetical protein [Arabidopsis thaliana]
MQLKANFLRFKISVVCAHKPLPKSQQSMIFRRFSGRFLTAIPDSCKLKFEAKRSFRSDAALEAIANALEEKVPNLVLYNYPSFSGAFSALFAHLYHYRLRLPCLILPFSSLIPFRVEDLCLEGFERCYLLDFVVPKDFACQKTACEIVCFDHRNSALKRIGLIKEEHKKRLKIYVDTETSSSKAVYKYFSSKLTDQRSSEVEALSLLSVEDKTRVESVLDYIEDIDLRRWMLPDIKAFSFGLKDWRSRINCIINPYMYEQLLKISSADLIAYGNSYFSSRLIDAKKLLKLNKAFKIRLGRGLYGECLGMRADGNHQLSDELGKLLSLQSSAAGLRPIGAVTFVQRNNLKMCLRSTDAITNTSEVAKAYGGGGTSSSSSFIIRMDEYNQWISKL

SEQ ID NO: 44283 - protein, 366 aa, Arabidopsis thaliana
  peptide (1)..(366): Ceres Seq. ID no. 13509410
  misc_feature (49)..(362): Homolog of NCBI NO: 25405983 NR Description: protein F12M16.25 [imported] - Arabidopsis
  misc_feature (49)..(362): Homolog of NCBI NO: 18404427 NR Description: expressed protein [Arabidopsis thaliana]
  misc_feature (49)..(362): Homolog of NCBI NO: 21593117 NR Description: unknown [Arabidopsis thaliana]
  misc_feature (1)..(366): Homolog of NCBI NO: 15242457 NR Description: hypothetical protein [Arabidopsis thaliana]
MIFRRFSGRFLTAIPDSCKLKFEAKRSFRSDAALEAIANALEEKVPNLVLYNYPSFSGAFSALFAHLYHYRLRLPCLILPFSSLIPFRVEDLCLEGFERCYLLDFVVPKDFACQKTACEIVCFDHRNSALKRIGLIKEEHKKRLKIYVDTETSSSKAVYKYFSSKLTDQRSSEVEALSLLSVEDKTRVESVLDYIEDIDLRRWMLPDIKAFSFGLKDWRSRINCIINPYMYEQLLKISSADLIAYGNSYFSSRLIDAKKLLKLNKAFKIRLGRGLYGECLGMRADGNHQLSDELGKLLSLQSSAAGLRPIGAVTFVQRNNLKMCLRSTDAITNTSEVAKAYGGGGTSSSSSFIIRMDEYNQWISKL

SEQ ID NO: 44284 - DNA, 1332 bp, Arabidopsis thaliana; identical to SEQ ID NO: 25100
  misc_feature (1)..(1332): Ceres Seq. ID no. 12488506
  misc_feature: MA Experiment ID: 108473 Result: Up-regulated in Transcription
  misc_feature: MA Experiment 108473 PARAMETER Experiment Name: At_Drought_Flowers_cDNA_P Parameter: Timepoint (hr) Value: 7 d
  misc_feature: MA Experiment 108473 PARAMETER Experiment Name: At_Drought_Flowers_cDNA_P Parameter: Tissue Value: Flower
  misc_feature: MA Experiment 108473 PARAMETER Experiment Name: At_Drought_Flowers_cDNA_P Parameter: Treatment Value: Drought vs. No Drought
  misc_feature: MA Experiment ID: 108474 Result: Up-regulated in Transcription
  misc_feature: MA Experiment 108474 PARAMETER Experiment Name: At_Drought_Flowers_cDNA_P Parameter: Timepoint (hr) Value: null
  misc_feature: MA Experiment 108474 PARAMETER Experiment Name: At_Drought_Flowers_cDNA_P Parameter: Treatment Value: Drought vs. No Drought
  misc_feature: MA Experiment ID: 108489 Result: Up-regulated in Transcription
  misc_feature: MA Experiment ID: 108501 Result: Down-regulated in Transcription
  misc_feature: MA Experiment 108501 PARAMETER Experiment Name: At_ap2_floral_buds_cDNA_P Parameter: Plant Line Value: ap2 (Ler.)
  misc_feature: MA Experiment 108501 PARAMETER Experiment Name: At_ap2_floral_buds_cDNA_P Parameter: Tissue Value: Closed Flower
  misc_feature: MA Experiment ID: 108579 Result: Down-regulated in Transcription
  misc_feature: MA Experiment 108579 PARAMETER Experiment Name: At_4deg_Cold_cDNA_P Parameter: Temperature (deg C) Value: 4 vs. 22
  misc_feature: MA Experiment 108579 PARAMETER Experiment Name: At_4deg_Cold_cDNA_P Parameter: Timepoint (hr) Value: 6
  misc_feature: MA Experiment 108579 PARAMETER Experiment Name: At_4deg_Cold_cDNA_P Parameter: Tissue Value: Aerial
  misc_feature: MA Experiment ID: 108585 Result: Up-regulated in Transcription
  misc_feature: MA Experiment 108585 PARAMETER Experiment Name: At_5mM_NaNP_cDNA_P Parameter: Timepoint (hr) Value: 6
  misc_feature: MA Experiment 108585 PARAMETER Experiment Name: At_5mM_NaNP_cDNA_P Parameter: Tissue Value: Aerial
  misc_feature: MA Experiment 108585 PARAMETER Experiment Name: At_5mM_NaNP_cDNA_P Parameter: Treatment Value: null
  misc_feature: MA Experiment ID: 108607 Result: Down-regulated in Transcription
  misc_feature: MA Experiment 108607 PARAMETER Experiment Name: At_100uM_ABA_cDNA_P Parameter: Timepoint (hr) Value: 4
  misc_feature: MA Experiment 108607 PARAMETER Experiment Name: At_100uM_ABA_cDNA_P Parameter: Tissue Value: Aerial
  misc_feature: MA Experiment 108607 PARAMETER Experiment Name: At_100uM_ABA_cDNA_P Parameter: Treatment Value: 100uM ABA vs. No Treatment
  misc_feature: MA Experiment ID: 20000089 Result: Up-regulated in Transcription
  misc_feature: MA Experiment ID: 20000166 Result: Down-regulated in Transcription
  misc_feature: MA Experiment 20000166 PARAMETER Experiment Name: At_100uM_ABA_P Parameter: Age (day) Value: 14
  misc_feature: MA Experiment 20000166 PARAMETER Experiment Name: At_100uM_ABA_P Parameter: Organism Value: A. thaliana
  misc_feature: MA Experiment 20000166 PARAMETER Experiment Name: At_100uM_ABA_P Parameter: Plant Line Value: WS
  misc_feature: MA Experiment 20000166 PARAMETER Experiment Name: At_100uM_ABA_P Parameter: Timepoint (hr) Value: 1
  misc_feature: MA Experiment 20000166 PARAMETER Experiment Name: At_100uM_ABA_P Parameter: Tissue Value: Aerial
  misc_feature: MA Experiment 20000166 PARAMETER Experiment Name: At_100uM_ABA_P Parameter: Treatment Value: 100uM ABA vs. No Treatment
  misc_feature: MA Experiment ID: 20000169 Result: Down-regulated in Transcription
  misc_feature: MA Experiment 20000169 PARAMETER Experiment Name: At_100uM_ABA_P Parameter: Age (day) Value: 14
  misc_feature: MA Experiment 20000169 PARAMETER Experiment Name: At_100uM_ABA_P Parameter: Organism Value: A. thaliana
  misc_feature: MA Experiment 20000169 PARAMETER Experiment Name: At_100uM_ABA_P Parameter: Plant Line Value: WS
  misc_feature: MA Experiment 20000169 PARAMETER Experiment Name: At_100uM_ABA_P Parameter: Timepoint (hr) Value: 6
  misc_feature: MA Experiment 20000169 PARAMETER Experiment Name: At_100uM_ABA_P Parameter: Tissue Value: Aerial
  misc_feature: MA Experiment 20000169 PARAMETER Experiment Name: At_100uM_ABA_P Parameter: Treatment Value: 100uM ABA vs. No Treatment
  misc_feature: MA Experiment ID: 20000213 Result: Down-regulated in Transcription
  misc_feature: MA Experiment 20000213 PARAMETER Experiment Name: At_4deg_Cold_P Parameter: Timepoint (hr) Value: 2
  misc_feature: MA Experiment ID: 20000224 Result: Down-regulated in Transcription
  misc_feature: MA Experiment ID: 20000227 Result: Down-regulated in Transcription
  misc_feature: MA Experiment 20000227 PARAMETER Experiment Name: At_Root-Tips-vs-Tops_P Parameter: Tissue Value: Root Tips vs. Root Tops
  misc_feature: MA Experiment ID: 20000234 Result: Down-regulated in Transcription
  misc_feature: MA Experiment 20000234 PARAMETER Experiment Name: At_Siliques_P Parameter: Age (day) Value: 21
  misc_feature: MA Experiment 20000234 PARAMETER Experiment Name: At_Siliques_P Parameter: Organism Value: A. thaliana
  misc_feature: MA Experiment 20000234 PARAMETER Experiment Name: At_Siliques_P Parameter: Plant Line Value: WS
  misc_feature: MA Experiment 20000234 PARAMETER Experiment Name: At_Siliques_P Parameter: Tissue Value: Less Than 5mm Siliques vs. Whole Plant
  misc_feature: MA Experiment ID: 20000235 Result: Down-regulated in Transcription
  misc_feature: MA Experiment 20000235 PARAMETER Experiment Name: At_Siliques_P Parameter: Age (day) Value: 21
  misc_feature: MA Experiment 20000235 PARAMETER Experiment Name: At_Siliques_P Parameter: Organism Value: A. thaliana
  misc_feature: MA Experiment 20000235 PARAMETER Experiment Name: At_Siliques_P Parameter: Plant Line Value: WS
  misc_feature: MA Experiment 20000235 PARAMETER Experiment Name: At_Siliques_P Parameter: Tissue Value: 5-10mm Siliques vs. Whole Plant
  misc_feature: MA Experiment ID: 20000264 Result: Down-regulated in Transcription
  misc_feature: MA Experiment 20000264 PARAMETER Experiment Name: At_Open_Flower_P Parameter: Age (day) Value: 21
  misc_feature: MA Experiment 20000264 PARAMETER Experiment Name: At_Open_Flower_P Parameter: Plant Line Value: WS
  misc_feature: MA Experiment 20000264 PARAMETER Experiment Name: At_Open_Flower_P Parameter: Tissue Value: Open Flower vs. Whole Plant
  misc_feature: MA Experiment ID: 20000265 Result: Down-regulated in Transcription
  misc_feature: MA Experiment 20000265 PARAMETER Experiment Name: At_Open_Flower_P Parameter: Age (day) Value: 21
  misc_feature: MA Experiment 20000265 PARAMETER Experiment Name: At_Open_Flower_P Parameter: Plant Line Value: WS
  misc_feature: MA Experiment 20000265 PARAMETER Experiment Name: At_Open_Flower_P Parameter: Tissue Value: Closed Flower vs. Whole Plant
  misc_feature: MA Experiment ID: 20000268 Result: Down-regulated in Transcription
  misc_feature: MA Experiment 20000268 PARAMETER Experiment Name: At_100mM_NaCl__P Parameter: Age (day) Value: 14
  misc_feature: MA Experiment 20000268 PARAMETER Experiment Name: At_100mM_NaCl__P Parameter: Organism Value: A. thaliana
  misc_feature: MA Experiment 20000268 PARAMETER Experiment Name: At_100mM_NaCl__P Parameter: Plant Line Value: WS
  misc_feature: MA Experiment 20000268 PARAMETER Experiment Name: At_100mM_NaCl__P Parameter: Timepoint (hr) Value: 6
  misc_feature: MA Experiment 20000268 PARAMETER Experiment Name: At_100mM_NaCl__P Parameter: Tissue Value: Whole Plant
  misc_feature: MA Experiment 20000268 PARAMETER Experiment Name: At_100mM_NaCl__P Parameter: Treatment Value: 100mM NaCl vs. No Treatment
  misc_feature: MA Experiment ID: 20000269 Result: Down-regulated in Transcription
  misc_feature: MA Experiment 20000269 PARAMETER Experiment Name: At_1mM_KNO3_L-vs-H_Roots_P Parameter: Age (day) Value: 7,10,12
  misc_feature: MA Experiment 20000269 PARAMETER Experiment Name: At_1mM_KNO3_L-vs-H_Roots_P Parameter: Organism Value: A. thaliana
  misc_feature: MA Experiment 20000269 PARAMETER Experiment Name: At_1mM_KNO3_L-vs-H_Roots_P Parameter: Plant Line Value: WS
  misc_feature: MA Experiment 20000269 PARAMETER Experiment Name: At_1mM_KNO3_L-vs-H_Roots_P Parameter: Timepoint (day) Value: 7,10,12
  misc_feature: MA Experiment 20000269 PARAMETER Experiment Name: At_1mM_KNO3_L-vs-H_Roots_P Parameter: Tissue Value: Roots
  misc_feature: MA Experiment 20000269 PARAMETER Experiment Name: At_1mM_KNO3_L-vs-H_Roots_P Parameter: Treatment Value: 1mM KNO3 vs. 50mM KNO3
  misc_feature: MA Experiment ID: 20000286 Result: Down-regulated in Transcription
  misc_feature: MA Experiment 20000286 PARAMETER Experiment Name: At_Open_Flower_P Parameter: Age (day) Value: 21
  misc_feature: MA Experiment 20000286 PARAMETER Experiment Name: At_Open_Flower_P Parameter: Plant Line Value: WS
  misc_feature: MA Experiment 20000286 PARAMETER Experiment Name: At_Open_Flower_P Parameter: Tissue Value: Half Open vs. Whole Plant
  misc_feature: MA Experiment ID: 20000437 Result: Down-regulated in Transcription
  misc_feature: MA Experiment 20000437 PARAMETER Experiment Name: At_Drought_P Parameter: Age (day) Value: 8
  misc_feature: MA Experiment 20000437 PARAMETER Experiment Name: At_Drought_P Parameter: Organism Value: A. thaliana
  misc_feature: MA Experiment 20000437 PARAMETER Experiment Name: At_Drought_P Parameter: Plant Line Value: WS
  misc_feature: MA Experiment 20000437 PARAMETER Experiment Name: At_Drought_P Parameter: Timepoint (hr) Value: 24
  misc_feature: MA Experiment 20000437 PARAMETER Experiment Name: At_Drought_P Parameter: Tissue Value: Whole Plant
  misc_feature: MA Experiment 20000437 PARAMETER Experiment Name: At_Drought_P Parameter: Treatment Value: Drought vs. No Drought
  misc_feature: MA Experiment ID: 20000441 Result: Up-regulated in Transcription
  misc_feature: MA Experiment 20000441 PARAMETER Experiment Name: At_1uM_BR-BRZ__P Parameter: Tissue Value: Shoot Apices
  misc_feature: MA Experiment 20000441 PARAMETER Experiment Name: At_1uM_BR-BRZ__P Parameter: Treatment Value: 1uM BR vs. No Treatment
  misc_feature: MA Experiment ID: 20000443 Result: Up-regulated in Transcription
  misc_feature: MA Experiment 20000443 PARAMETER Experiment Name: At_1uM_BR-BRZ__P Parameter: Tissue Value: Shoot Apices
  misc_feature: MA Experiment 20000443 PARAMETER Experiment Name: At_1uM_BR-BRZ__P Parameter: Treatment Value: 1uM BRZ vs. No Treatment
  misc_feature: MA Experiment ID: 20000495 Result: Up-regulated in Transcription
  misc_feature: MA Experiment 20000495 PARAMETER Experiment Name: At_Guard_Cells_P Parameter: Harvest Date Value: 8/2/2002
  misc_feature: MA Experiment 20000495 PARAMETER Experiment Name: At_Guard_Cells_P Parameter: Organism Value: A. thaliana
  misc_feature: MA Experiment 20000495 PARAMETER Experiment Name: At_Guard_Cells_P Parameter: Tissue Value: Guard Cells vs. Leaves
  misc_feature: MA Experiment ID: 20000496 Result: Up-regulated in Transcription
  misc_feature: MA Experiment 20000496 PARAMETER Experiment Name: At_Guard_Cells_P Parameter: Harvest Date Value: 7/19/2002
  misc_feature: MA Experiment 20000496 PARAMETER Experiment Name: At_Guard_Cells_P Parameter: Organism Value: Canola
  misc_feature: MA Experiment 20000496 PARAMETER Experiment Name: At_Guard_Cells_P Parameter: Tissue Value: Guard Cells vs. Leaves
  misc_feature: MA Experiment ID: 20000709 Result: Up-regulated in Transcription
  misc_feature: MA Experiment 20000709 PARAMETER Experiment Name: At_15mM_NH4NO3_L-to-H_P Parameter: Age (hr) Value: 14
  misc_feature: MA Experiment 20000709 PARAMETER Experiment Name: At_15mM_NH4NO3_L-to-H_P Parameter: Organism Value: A. thaliana
  misc_feature: MA Experiment 20000709 PARAMETER Experiment Name: At_15mM_NH4NO3_L-to-H_P Parameter: Plant Line Value: WS
  misc_feature: MA Experiment 20000709 PARAMETER Experiment Name: At_15mM_NH4NO3_L-to-H_P Parameter: Timepoint (hr) Value: 4
  misc_feature: MA Experiment 20000709 PARAMETER Experiment Name: At_15mM_NH4NO3_L-to-H_P Parameter: Tissue Value: Aerial
  misc_feature: MA Experiment 20000709 PARAMETER Experiment Name: At_15mM_NH4NO3_L-to-H_P Parameter: Treatment Value: 15mM NH4NO3 vs. 30mM Mannitol
  misc_feature: MA Experiment ID: 20000794 Result: Down-regulated in Transcription
  misc_feature: MA Experiment 20000794 PARAMETER Experiment Name: At_Petals_P Parameter: Age (day) Value: 23-25 days
  misc_feature: MA Experiment 20000794 PARAMETER Experiment Name: At_Petals_P Parameter: Plant Line Value: WS
  misc_feature: MA Experiment 20000794 PARAMETER Experiment Name: At_Petals_P Parameter: Tissue Value: Petals vs. Whole plant
  misc_feature: MA Experiment ID: 20001247 Result: Up-regulated in Transcription
  misc_feature: MA Experiment 20001247 PARAMETER Experiment Name: At_Far-red-induction_P Parameter: Age (day) Value: 7
  misc_feature: MA Experiment 20001247 PARAMETER Experiment Name: At_Far-red-induction_P Parameter: Light Value: Far-red vs. White
  misc_feature: MA Experiment 20001247 PARAMETER Experiment Name: At_Far-red-induction_P Parameter: Organism Value: A. thaliana
  misc_feature: MA Experiment 20001247 PARAMETER Experiment Name: At_Far-red-induction_P Parameter: Plant Line Value: Columbia
  misc_feature: MA Experiment 20001247 PARAMETER Experiment Name: At_Far-red-induction_P Parameter: Timepoint (hr) Value: 1
  misc_feature: MA Experiment 20001247 PARAMETER Experiment Name: At_Far-red-induction_P Parameter: Tissue Value: Whole Plant
  misc_feature: MA Experiment ID: 20001248 Result: Up-regulated in Transcription
  misc_feature: MA Experiment 20001248 PARAMETER Experiment Name: At_Far-red-induction_P Parameter: Age (day) Value: 7
  misc_feature: MA Experiment 20001248 PARAMETER Experiment Name: At_Far-red-induction_P Parameter: Light Value: Far-red vs. White
  misc_feature: MA Experiment 20001248 PARAMETER Experiment Name: At_Far-red-induction_P Parameter: Organism Value: A. thaliana
  misc_feature: MA Experiment 20001248 PARAMETER Experiment Name: At_Far-red-induction_P Parameter: Plant Line Value: Columbia
  misc_feature: MA Experiment 20001248 PARAMETER Experiment Name: At_Far-red-induction_P Parameter: Timepoint (hr) Value: 4
  misc_feature: MA Experiment 20001248 PARAMETER Experiment Name: At_Far-red-induction_P Parameter: Tissue Value: Whole Plant
  misc_feature: MA Experiment ID: 20001450 Result: Up-regulated in Transcription
  misc_feature: MA Experiment 20001450 PARAMETER Experiment Name: At_Far-red-induction_P Parameter: Age (day) Value: 7
  misc_feature: MA Experiment 20001450 PARAMETER Experiment Name: At_Far-red-induction_P Parameter: Light Value: Far-red vs. White
  misc_feature: MA Experiment 20001450 PARAMETER Experiment Name: At_Far-red-induction_P Parameter: Organism Value: A. thaliana
  misc_feature: MA Experiment 20001450 PARAMETER Experiment Name: At_Far-red-induction_P Parameter: Plant Line Value: Columbia
  misc_feature: MA Experiment 20001450 PARAMETER Experiment Name: At_Far-red-induction_P Parameter: Timepoint (hr) Value: 8
  misc_feature: MA Experiment 20001450 PARAMETER Experiment Name: At_Far-red-induction_P Parameter: Tissue Value: Whole Plant
  misc_feature: MA Experiment ID: 20001451 Result: Up-regulated in Transcription
  misc_feature: MA Experiment 20001451 PARAMETER Experiment Name: At_Far-red-induction_P Parameter: Age (day) Value: 7
  misc_feature: MA Experiment 20001451 PARAMETER Experiment Name: At_Far-red-induction_P Parameter: Light Value: Far-red vs. White
  misc_feature: MA Experiment 20001451 PARAMETER Experiment Name: At_Far-red-induction_P Parameter: Organism Value: A. thaliana
  misc_feature: MA Experiment 20001451 PARAMETER Experiment Name: At_Far-red-induction_P Parameter: Plant Line Value: Columbia
  misc_feature: MA Experiment 20001451 PARAMETER Experiment Name: At_Far-red-induction_P Parameter: Timepoint (hr) Value: 24
  misc_feature: MA Experiment 20001451 PARAMETER Experiment Name: At_Far-red-induction_P Parameter: Tissue Value: Whole Plant
  misc_feature: MA Experiment ID: 20001457 Result: Up-regulated in Transcription
  misc_feature: MA Experiment 20001457 PARAMETER Experiment Name: At_50mM_NH4NO3_L-to-H_P Parameter: Age (day) Value: Undefined
  misc_feature: MA Experiment 20001457 PARAMETER Experiment Name: At_50mM_NH4NO3_L-to-H_P Parameter: Organism Value: Undefined
  misc_feature: MA Experiment 20001457 PARAMETER Experiment Name: At_50mM_NH4NO3_L-to-H_P Parameter: Plant Line Value: Undefined
  misc_feature: MA Experiment 20001457 PARAMETER Experiment Name: At_50mM_NH4NO3_L-to-H_P Parameter: Timepoint (hr) Value: 0.5
  misc_feature: MA Experiment 20001457 PARAMETER Experiment Name: At_50mM_NH4NO3_L-to-H_P Parameter: Tissue Value: Siliques
  misc_feature: MA Experiment 20001457 PARAMETER Experiment Name: At_50mM_NH4NO3_L-to-H_P Parameter: Treatment Value: 50mM NH4NO3 vs. 100mM Manitol
  misc_feature: MA Experiment ID: 20001458 Result: Up-regulated in Transcription
  misc_feature: MA Experiment 20001458 PARAMETER Experiment Name: At_50mM_NH4NO3_L-to-H_P Parameter: Age (day) Value: Undefined
  misc_feature: MA Experiment 20001458 PARAMETER Experiment Name: At_50mM_NH4NO3_L-to-H_P Parameter: Organism Value: Undefined
  misc_feature: MA Experiment 20001458 PARAMETER Experiment Name: At_50mM_NH4NO3_L-to-H_P Parameter: Plant Line Value: Undefined
  misc_feature: MA Experiment 20001458 PARAMETER Experiment Name: At_50mM_NH4NO3_L-to-H_P Parameter: Timepoint (hr) Value: 2
  misc_feature: MA Experiment 20001458 PARAMETER Experiment Name: At_50mM_NH4NO3_L-to-H_P Parameter: Tissue Value: Siliques
  misc_feature: MA Experiment 20001458 PARAMETER Experiment Name: At_50mM_NH4NO3_L-to-H_P Parameter: Treatment Value: 50mM NH4NO3 vs. 100mM Manitol
  misc_feature: MA Experiment ID: 20001459 Result: Up-regulated in Transcription
  misc_feature: MA Experiment 20001459 PARAMETER Experiment Name: At_50mM_NH4NO3_L-to-H_P Parameter: Age (day) Value: Undefined
  misc_feature: MA Experiment 20001459 PARAMETER Experiment Name: At_50mM_NH4NO3_L-to-H_P Parameter: Organism Value: Undefined
  misc_feature: MA Experiment 20001459 PARAMETER Experiment Name: At_50mM_NH4NO3_L-to-H_P Parameter: Plant Line Value: Undefined
  misc_feature: MA Experiment 20001459 PARAMETER Experiment Name: At_50mM_NH4NO3_L-to-H_P Parameter: Timepoint (hr) Value: 4
  misc_feature: MA Experiment 20001459 PARAMETER Experiment Name: At_50mM_NH4NO3_L-to-H_P Parameter: Tissue Value: Siliques
  misc_feature: MA Experiment 20001459 PARAMETER Experiment Name: At_50mM_NH4NO3_L-to-H_P Parameter: Treatment Value: 50mM NH4NO3 vs. 100mM Manitol
  misc_feature: MA Experiment ID: 20001554 Result: Down-regulated in Transcription
  misc_feature: MA Experiment 20001554 PARAMETER Experiment Name: At_Drought_Soil_Dry_P Parameter: Age (day) Value: 21
  misc_feature: MA Experiment 20001554 PARAMETER Experiment Name: At_Drought_Soil_Dry_P Parameter: Organism Value: A. thaliana
  misc_feature: MA Experiment 20001554 PARAMETER Experiment Name: At_Drought_Soil_Dry_P Parameter: Plant Line Value: WS
  misc_feature: MA Experiment 20001554 PARAMETER Experiment Name: At_Drought_Soil_Dry_P Parameter: Post Timepoint (hr) Value: None
  misc_feature: MA Experiment 20001554 PARAMETER Experiment Name: At_Drought_Soil_Dry_P Parameter: Post-Treatment Value: None
  misc_feature: MA Experiment 20001554 PARAMETER Experiment Name: At_Drought_Soil_Dry_P Parameter: Timepoint (day) Value: 7
  misc_feature: MA Experiment 20001554 PARAMETER Experiment Name: At_Drought_Soil_Dry_P Parameter: Treatment Value: Drought vs. No Drought
  misc_feature: MA Experiment ID: 20001555 Result: Down-regulated in Transcription
  misc_feature: MA Experiment 20001555 PARAMETER Experiment Name: At_Drought_Soil_Dry_P Parameter: Age (day) Value: 24
  misc_feature: MA Experiment 20001555 PARAMETER Experiment Name: At_Drought_Soil_Dry_P Parameter: Organism Value: A. thaliana
  misc_feature: MA Experiment 20001555 PARAMETER Experiment Name: At_Drought_Soil_Dry_P Parameter: Plant Line Value: WS
  misc_feature: MA Experiment 20001555 PARAMETER Experiment Name: At_Drought_Soil_Dry_P Parameter: Post Timepoint (hr) Value: None
  misc_feature: MA Experiment 20001555 PARAMETER Experiment Name: At_Drought_Soil_Dry_P Parameter: Post-Treatment Value: None
  misc_feature: MA Experiment 20001555 PARAMETER Experiment Name: At_Drought_Soil_Dry_P Parameter: Timepoint (day) Value: 10
  misc_feature: MA Experiment 20001555 PARAMETER Experiment Name: At_Drought_Soil_Dry_P Parameter: Treatment Value: Drought vs. No Drought
  misc_feature: MA Experiment ID: 20001556 Result: Down-regulated in Transcription
  misc_feature: MA Experiment 20001556 PARAMETER Experiment Name: At_Drought_Soil_Dry_P Parameter: Age (day) Value: 26
  misc_feature: MA Experiment 20001556 PARAMETER Experiment Name: At_Drought_Soil_Dry_P Parameter: Organism Value: A. thaliana
  misc_feature: MA Experiment 20001556 PARAMETER Experiment Name: At_Drought_Soil_Dry_P Parameter: Plant Line Value: WS
  misc_feature: MA Experiment 20001556 PARAMETER Experiment Name: At_Drought_Soil_Dry_P Parameter: Post Timepoint (hr) Value: None
  misc_feature: MA Experiment 20001556 PARAMETER Experiment Name: At_Drought_Soil_Dry_P Parameter: Post-Treatment Value: None
  misc_feature: MA Experiment 20001556 PARAMETER Experiment Name: At_Drought_Soil_Dry_P Parameter: Timepoint (day) Value: 12
  misc_feature: MA Experiment 20001556 PARAMETER Experiment Name: At_Drought_Soil_Dry_P Parameter: Treatment Value: Drought vs. No Drought
  misc_feature: MA Experiment ID: 20001557 Result: Down-regulated in Transcription
  misc_feature: MA Experiment 20001557 PARAMETER Experiment Name: At_Drought_Soil_Dry_P Parameter: Age (day) Value: 27
  misc_feature: MA Experiment 20001557 PARAMETER Experiment Name: At_Drought_Soil_Dry_P Parameter: Organism Value: A. thaliana
  misc_feature: MA Experiment 20001557 PARAMETER Experiment Name: At_Drought_Soil_Dry_P Parameter: Plant Line Value: WS
  misc_feature: MA Experiment 20001557 PARAMETER Experiment Name: At_Drought_Soil_Dry_P Parameter: Post Timepoint (hr) Value: 3
  misc_feature: MA Experiment 20001557 PARAMETER Experiment Name: At_Drought_Soil_Dry_P Parameter: Post-Treatment Value: Re-Water vs. No Drought
  misc_feature: MA Experiment 20001557 PARAMETER Experiment Name: At_Drought_Soil_Dry_P Parameter: Timepoint (day) Value: 13
  misc_feature: MA Experiment 20001557 PARAMETER Experiment Name: At_Drought_Soil_Dry_P Parameter: Treatment Value: Drought vs. No Drought
  misc_feature: MA Experiment ID: 20001558 Result: Down-regulated in Transcription
  misc_feature: MA Experiment 20001558 PARAMETER Experiment Name: At_Drought_Soil_Dry_P Parameter: Age (day) Value: 27
  misc_feature: MA Experiment 20001558 PARAMETER Experiment Name: At_Drought_Soil_Dry_P Parameter: Organism Value: A. thaliana
  misc_feature: MA Experiment 20001558 PARAMETER Experiment Name: At_Drought_Soil_Dry_P Parameter: Plant Line Value: WS
  misc_feature: MA Experiment 20001558 PARAMETER Experiment Name: At_Drought_Soil_Dry_P Parameter: Post Timepoint (hr) Value: 6
  misc_feature: MA Experiment 20001558 PARAMETER Experiment Name: At_Drought_Soil_Dry_P Parameter: Post-Treatment Value: Re-Water vs. No Drought
  misc_feature: MA Experiment 20001558 PARAMETER Experiment Name: At_Drought_Soil_Dry_P Parameter: Timepoint (day) Value: 13
  misc_feature: MA Experiment 20001558 PARAMETER Experiment Name: At_Drought_Soil_Dry_P Parameter: Treatment Value: Drought vs. No Drought
  misc_feature: MA Experiment ID: 20001559 Result: Down-regulated in Transcription
  misc_feature: MA Experiment 20001559 PARAMETER Experiment Name: At_Drought_Soil_Dry_P Parameter: Age (day) Value: 28
  misc_feature: MA Experiment 20001559 PARAMETER Experiment Name: At_Drought_Soil_Dry_P Parameter: Organism Value: A. thaliana
  misc_feature: MA Experiment 20001559 PARAMETER Experiment Name: At_Drought_Soil_Dry_P Parameter: Plant Line Value: WS
  misc_feature: MA Experiment 20001559 PARAMETER Experiment Name: At_Drought_Soil_Dry_P Parameter: Post Timepoint (hr) Value: 29
  misc_feature: MA Experiment 20001559 PARAMETER Experiment Name: At_Drought_Soil_Dry_P Parameter: Post-Treatment Value: Re-Water vs. No Drought
  misc_feature: MA Experiment 20001559 PARAMETER Experiment Name: At_Drought_Soil_Dry_P Parameter: Timepoint (day) Value: 14
  misc_feature: MA Experiment 20001559 PARAMETER Experiment Name: At_Drought_Soil_Dry_P Parameter: Treatment Value: Drought vs. No Drought
  misc_feature: MA Experiment ID: 20001560 Result: Down-regulated in Transcription
  misc_feature: MA Experiment 20001560 PARAMETER Experiment Name: At_Drought_Soil_Dry_P Parameter: Age (day) Value: 28
  misc_feature: MA Experiment 20001560 PARAMETER Experiment Name: At_Drought_Soil_Dry_P Parameter: Organism Value: A. thaliana
  misc_feature: MA Experiment 20001560 PARAMETER Experiment Name: At_Drought_Soil_Dry_P Parameter: Plant Line Value: WS
  misc_feature: MA Experiment 20001560 PARAMETER Experiment Name: At_Drought_Soil_Dry_P Parameter: Post Timepoint (hr) Value: None
  misc_feature: MA Experiment 20001560 PARAMETER Experiment Name: At_Drought_Soil_Dry_P Parameter: Post-Treatment Value: None
  misc_feature: MA Experiment 20001560 PARAMETER Experiment Name: At_Drought_Soil_Dry_P Parameter: Timepoint (day) Value: 14
  misc_feature: MA Experiment 20001560 PARAMETER Experiment Name: At_Drought_Soil_Dry_P Parameter: Treatment Value: Drought vs. No Drought
  misc_feature: MA Experiment ID: 20001757 Result: Up-regulated in Transcription
  misc_feature: MA Experiment 20001757 PARAMETER Experiment Name: At_50mM_NH4NO3_L-to-H_P Parameter: Timepoint (hr) Value: 6
  misc_feature: MA Experiment 20001757 PARAMETER Experiment Name: At_50mM_NH4NO3_L-to-H_P Parameter: Tissue Value: Leaf
  misc_feature: MA Experiment 20001757 PARAMETER Experiment Name: At_50mM_NH4NO3_L-to-H_P Parameter: Treatment Value: 50mM NH4NO3 vs 100mM Mannitol
  misc_feature: MA Experiment ID: 20001759 Result: Up-regulated in Transcription
  misc_feature: MA Experiment 20001759 PARAMETER Experiment Name: At_50mM_NH4NO3_L-to-H_P Parameter: Timepoint (hr) Value: 1
  misc_feature: MA Experiment 20001759 PARAMETER Experiment Name: At_50mM_NH4NO3_L-to-H_P Parameter: Tissue Value: Siliques
  misc_feature: MA Experiment 20001759 PARAMETER Experiment Name: At_50mM_NH4NO3_L-to-H_P Parameter: Treatment Value: 50mM NH4NO3 vs 100mM Mannitol

SEQ ID NO: 44285 - protein, 386 aa, Arabidopsis thaliana; identical to SEQ ID NO: 25101
  peptide (1)..(386): Ceres Seq. ID no. 12488507
  misc_feature (26)..(216): Pfam Name: Eukaryotic aspartyl protease Pfam Description: Eukaryotic aspartyl protease
  misc_feature (26)..(216): Pfam Name: Eukaryotic aspartyl protease Pfam Description: Eukaryotic aspartyl protease
  misc_feature (30)..(246): Homolog of NCBI NO: 11558383 NR Description: conglutin gamma [Lupinus albus]
  misc_feature (259)..(375): Homolog of NCBI NO: 18379072 NR Description: expressed protein
  misc_feature (1)..(284): Homolog of NCBI NO: 18379072 NR Description: expressed protein
  misc_feature (241)..(375): Homolog of NCBI NO: 21537233 NR Description: EDGP precursor [Arabidopsis thaliana]
  misc_feature (5)..(278): Homolog of NCBI NO: 21537233 NR Description: EDGP precursor [Arabidopsis thaliana]
  misc_feature (30)..(246): Homolog of NCBI NO: 11558383 NR Description: conglutin gamma [Lupinus albus]
  misc_feature (1)..(284): Homolog of NCBI NO: 18379072 NR Description: expressed protein
  misc_feature (5)..(278): Homolog of NCBI NO: 21537233 NR Description: EDGP precursor [Arabidopsis thaliana]
  misc_feature (1)..(386): Homolog of NCBI NO: 15239656 NR Description: conglutin gamma - like protein
  misc_feature (1)..(200): Homolog of NCBI NO: 27372527 NR Description: xyloglucan-specific fungal endoglucanase
  misc_feature (238)..(375): Homolog of NCBI NO: 27372527 NR Description: xyloglucan-specific fungal endoglucanase
  misc_feature (1)..(206): Homolog of NCBI NO: 32482806 NR Description: putative xyloglucanase inhibitor [Solanum
  misc_feature (238)..(375): Homolog of NCBI NO: 32482806 NR Description: putative xyloglucanase inhibitor [Solanum
  misc_feature (241)..(375): Homolog of NCBI NO: 21537233 NR Description: EDGP precursor [Arabidopsis thaliana]
  misc_feature (259)..(375): Homolog of NCBI NO: 18379072 NR Description: expressed protein
  misc_feature (238)..(375): Homolog of NCBI NO: 32482806 NR Description: putative xyloglucanase inhibitor [Solanum
  misc_feature (1)..(206): Homolog of NCBI NO: 32482806 NR Description: putative xyloglucanase inhibitor [Solanum
  misc_feature (238)..(375): Homolog of NCBI NO: 27372527 NR Description: xyloglucan-specific fungal endoglucanase
  misc_feature (1)..(200): Homolog of NCBI NO: 27372527 NR Description: xyloglucan-specific fungal endoglucanase
  misc_feature (1)..(386): Homolog of NCBI NO: 15239656 NR Description: conglutin gamma - like protein

SEQ ID NO: 44286 - protein, 249 aa, Arabidopsis thaliana; identical to SEQ ID NO: 25102
  peptide (1)..(249): Ceres Seq. ID no. 12488508
  misc_feature (1)..(79): Pfam Name: Eukaryotic aspartyl protease Pfam Description: Eukaryotic aspartyl protease
  misc_feature (1)..(79): Pfam Name: Eukaryotic aspartyl protease Pfam Description: Eukaryotic aspartyl protease
  misc_feature (1)..(109): Homolog of NCBI NO: 11558383 NR Description: conglutin gamma [Lupinus albus]
  misc_feature (122)..(238): Homolog of NCBI NO: 18379072 NR Description: expressed protein
  misc_feature (1)..(147): Homolog of NCBI NO: 18379072 NR Description: expressed protein
  misc_feature (104)..(238): Homolog of NCBI NO: 21537233 NR Description: EDGP precursor [Arabidopsis thaliana]
  misc_feature (1)..(141): Homolog of NCBI NO: 21537233 NR Description: EDGP precursor [Arabidopsis thaliana]
  misc_feature (1)..(109): Homolog of NCBI NO: 11558383 NR Description: conglutin gamma [Lupinus albus]
  misc_feature (1)..(147): Homolog of NCBI NO: 18379072 NR Description: expressed protein
  misc_feature (1)..(141): Homolog of NCBI NO: 21537233 NR Description: EDGP precursor [Arabidopsis thaliana]
  misc_feature (1)..(249): Homolog of NCBI NO: 15239656 NR Description: conglutin gamma - like protein
  misc_feature (1)..(63): Homolog of NCBI NO: 27372527 NR Description: xyloglucan-specific fungal endoglucanase
  misc_feature (101)..(238): Homolog of NCBI NO: 27372527 NR Description: xyloglucan-specific fungal endoglucanase
  misc_feature (1)..(69): Homolog of NCBI NO: 32482806 NR Description: putative xyloglucanase inhibitor [Solanum
  misc_feature (101)..(238): Homolog of NCBI NO: 32482806 NR Description: putative xyloglucanase inhibitor [Solanum
  misc_feature (104)..(238): Homolog of NCBI NO: 21537233 NR Description: EDGP precursor [Arabidopsis thaliana]
  misc_feature (122)..(238): Homolog of NCBI NO: 18379072 NR Description: expressed protein
  misc_feature (101)..(238): Homolog of NCBI NO: 32482806 NR Description: putative xyloglucanase inhibitor [Solanum
  misc_feature (1)..(69): Homolog of NCBI NO: 32482806 NR Description: putative xyloglucanase inhibitor [Solanum
  misc_feature (101)..(238): Homolog of NCBI NO: 27372527 NR Description: xyloglucan-specific fungal endoglucanase
  misc_feature (1)..(63): Homolog of NCBI NO: 27372527 NR Description: xyloglucan-specific fungal endoglucanase
  misc_feature (1)..(249): Homolog of NCBI NO: 15239656 NR Description: conglutin gamma - like protein

SEQ ID NO: 44287 - protein, 215 aa, Arabidopsis thaliana; identical to SEQ ID NO: 25103
  peptide (1)..(215): Ceres Seq. ID no. 12488509
  misc_feature (89)..(204): Pfam Name: Eukaryotic aspartyl protease Pfam Description: Eukaryotic aspartyl protease
  misc_feature (89)..(204): Pfam Name: Eukaryotic aspartyl protease Pfam Description: Eukaryotic aspartyl protease
  misc_feature (1)..(75): Homolog of NCBI NO: 11558383 NR Description: conglutin gamma [Lupinus albus]
  misc_feature (88)..(204): Homolog of NCBI NO: 18379072 NR Description: expressed protein
  misc_feature (1)..(113): Homolog of NCBI NO: 18379072 NR Description: expressed protein
  misc_feature (70)..(204): Homolog of NCBI NO: 21537233 NR Description: EDGP precursor [Arabidopsis thaliana]
  misc_feature (1)..(107): Homolog of NCBI NO: 21537233 NR Description: EDGP precursor [Arabidopsis thaliana]
  misc_feature (1)..(75): Homolog of NCBI NO: 11558383 NR Description: conglutin gamma [Lupinus albus]
  misc_feature (1)..(113): Homolog of NCBI NO: 18379072 NR Description: expressed protein
  misc_feature (1)..(107): Homolog of NCBI NO: 21537233 NR Description: EDGP precursor [Arabidopsis thaliana]
  misc_feature (1)..(215): Homolog of NCBI NO: 15239656 NR Description: conglutin gamma - like protein
  misc_feature (1)..(29): Homolog of NCBI NO: 27372527 NR Description: xyloglucan-specific fungal endoglucanase
  misc_feature (67)..(204): Homolog of NCBI NO: 27372527 NR Description: xyloglucan-specific fungal endoglucanase
  misc_feature (1)..(35): Homolog of NCBI NO: 32482806 NR Description: putative xyloglucanase inhibitor [Solanum
  misc_feature (67)..(204): Homolog of NCBI NO: 32482806 NR Description: putative xyloglucanase inhibitor [Solanum
  misc_feature (70)..(204): Homolog of NCBI NO: 21537233 NR Description: EDGP precursor [Arabidopsis thaliana]
  misc_feature (88)..(204): Homolog of NCBI NO: 18379072 NR Description: expressed protein
  misc_feature (67)..(204): Homolog of NCBI NO: 32482806 NR Description: putative xyloglucanase inhibitor [Solanum
  misc_feature (1)..(35): Homolog of NCBI NO: 32482806 NR Description: putative xyloglucanase inhibitor [Solanum
  misc_feature (67)..(204): Homolog of NCBI NO: 27372527 NR Description: xyloglucan-specific fungal endoglucanase
  misc_feature (1)..(29): Homolog of NCBI NO: 27372527 NR Description: xyloglucan-specific fungal endoglucanase
  misc_feature (1)..(215): Homolog of NCBI NO: 15239656 NR Description: conglutin gamma - like protein

SEQ ID NO: 44288 - DNA, 546 bp, Arabidopsis thaliana; identical to SEQ ID NO: 43233
  misc_feature (1)..(546): Ceres Seq. ID no. 12481728
  misc_feature: MA Experiment ID: 20000355 Result: Up-regulated in Transcription
  misc_feature: MA Experiment 20000355 PARAMETER Experiment Name: At_Siliques_Sub_P Parameter: Age (day) Value: 21
  misc_feature: MA Experiment 20000355 PARAMETER Experiment Name: At_Siliques_Sub_P Parameter: Organism Value: A. thaliana
  misc_feature: MA Experiment 20000355 PARAMETER Experiment Name: At_Siliques_Sub_P Parameter: Plant Line Value: WS
  misc_feature: MA Experiment 20000355 PARAMETER Experiment Name: At_Siliques_Sub_P Parameter: Tissue Value: Less Than 5mm Siliques vs. Whole Plant

SEQ ID NO: 44289 - protein, 137 aa, Arabidopsis thaliana; identical to SEQ ID NO: 43234
  peptide (1)..(137): Ceres Seq. ID no. 12481729
  misc_feature (10)..(83): Pfam Name: Ubiquitin family Pfam Description: Ubiquitin family
  misc_feature (10)..(83): Pfam Name: Ubiquitin family Pfam Description: Ubiquitin family
  misc_feature (10)..(137): Homolog of NCBI NO: 15187109 NR Description: ubiquitin [Branchiostoma belcheri]
  misc_feature (10)..(137): Homolog of NCBI NO: 4507761 NR Description: ubiquitin and ribosomal protein L40 precursor
  misc_feature (10)..(137): Homolog of NCBI NO: 2558539 NR Description: ubiquitin-ribosomal protein fusion protein
  misc_feature (10)..(137): Homolog of NCBI NO: 70654 NR Description: ubiquitin / ribosomal protein CEP52 -
  misc_feature (108)..(137): Homolog of NCBI NO: 20330759 NR Description: Putative ubiquitin / ribosomal protein CEP52
  misc_feature (10)..(137): Homolog of NCBI NO: 15187109 NR Description: ubiquitin [Branchiostoma belcheri]
  misc_feature (10)..(137): Homolog of NCBI NO: 2558539 NR Description: ubiquitin-ribosomal protein fusion protein
  misc_feature (108)..(137): Homolog of NCBI NO: 20330759 NR Description: Putative ubiquitin / ribosomal protein CEP52
  misc_feature (10)..(137): Homolog of NCBI NO: 18404062 NR Description: ubiquitin extension protein (UBQ2)
  misc_feature (10)..(137): Homolog of NCBI NO: 322750 NR Description: ubiquitin / ribosomal protein CEP52 - wood
  misc_feature (10)..(137): Homolog of NCBI NO: 485518 NR Description: ubiquitin / ribosomal protein CEP52 - rice
  misc_feature (10)..(137): Homolog of NCBI NO: 421867 NR Description: ubiquitin / ribosomal protein CEP52 - turnip
  misc_feature (10)..(106): Homolog of NCBI NO: 20330759 NR Description: Putative ubiquitin / ribosomal protein CEP52
  misc_feature (10)..(137): Homolog of NCBI NO: 70654 NR Description: ubiquitin / ribosomal protein CEP52 -
  misc_feature (10)..(137): Homolog of NCBI NO: 4507761 NR Description: ubiquitin and ribosomal protein L40 precursor
  misc_feature (10)..(106): Homolog of NCBI NO: 20330759 NR Description: Putative ubiquitin / ribosomal protein CEP52
  misc_feature (10)..(137): Homolog of NCBI NO: 421867 NR Description: ubiquitin / ribosomal protein CEP52 - turnip
  misc_feature (10)..(137): Homolog of NCBI NO: 485518 NR Description: ubiquitin / ribosomal protein CEP52 - rice
  misc_feature (10)..(137): Homolog of NCBI NO: 322750 NR Description: ubiquitin / ribosomal protein CEP52 - wood
  misc_feature (10)..(137): Homolog of NCBI NO: 18404062 NR Description: ubiquitin extension protein (UBQ2)

SEQ ID NO: 44290 - protein, 128 aa, Arabidopsis thaliana; identical to SEQ ID NO: 26134
  peptide (1)..(128): Ceres Seq. ID no. 12481730
  misc_feature (1)..(74): Pfam Name: Ubiquitin family Pfam Description: Ubiquitin family
  misc_feature (1)..(74): Pfam Name: Ubiquitin family Pfam Description: Ubiquitin family
  misc_feature (1)..(128): Homolog of NCBI NO: 15187109 NR Description: ubiquitin [Branchiostoma belcheri]
  misc_feature (1)..(128): Homolog of NCBI NO: 4507761 NR Description: ubiquitin and ribosomal protein L40 precursor
  misc_feature (1)..(128): Homolog of NCBI NO: 2558539 NR Description: ubiquitin-ribosomal protein fusion protein
  misc_feature (1)..(128): Homolog of NCBI NO: 70654 NR Description: ubiquitin / ribosomal protein CEP52 -
  misc_feature (99)..(128): Homolog of NCBI NO: 20330759 NR Description: Putative ubiquitin / ribosomal protein CEP52
  misc_feature (1)..(128): Homolog of NCBI NO: 15187109 NR Description: ubiquitin [Branchiostoma belcheri]
  misc_feature (1)..(128): Homolog of NCBI NO: 2558539 NR Description: ubiquitin-ribosomal protein fusion protein
  misc_feature (99)..(128): Homolog of NCBI NO: 20330759 NR Description: Putative ubiquitin / ribosomal protein CEP52
  misc_feature (1)..(128): Homolog of NCBI NO: 18404062 NR Description: ubiquitin extension protein (UBQ2)
  misc_feature (1)..(128): Homolog of NCBI NO: 322750 NR Description: ubiquitin / ribosomal protein CEP52 - wood
  misc_feature (1)..(128): Homolog of NCBI NO: 485518 NR Description: ubiquitin / ribosomal protein CEP52 - rice
  misc_feature (1)..(128): Homolog of NCBI NO: 421867 NR Description: ubiquitin / ribosomal protein CEP52 - turnip
  misc_feature (1)..(97): Homolog of NCBI NO: 20330759 NR Description: Putative ubiquitin / ribosomal protein CEP52
  misc_feature (1)..(128): Homolog of NCBI NO: 70654 NR Description: ubiquitin / ribosomal protein CEP52 -
  misc_feature (1)..(128): Homolog of NCBI NO: 4507761 NR Description: ubiquitin and ribosomal protein L40 precursor
  misc_feature (1)..(97): Homolog of NCBI NO: 20330759 NR Description: Putative ubiquitin / ribosomal protein CEP52
  misc_feature (1)..(128): Homolog of NCBI NO: 421867 NR Description: ubiquitin / ribosomal protein CEP52 - turnip
  misc_feature (1)..(128): Homolog of NCBI NO: 485518 NR Description: ubiquitin / ribosomal protein CEP52 - rice
  misc_feature (1)..(128): Homolog of NCBI NO: 322750 NR Description: ubiquitin / ribosomal protein CEP52 - wood
  misc_feature (1)..(128): Homolog of NCBI NO: 18404062 NR Description: ubiquitin extension protein (UBQ2)

SEQ ID NO: 44291 - DNA, 1429 bp, Arabidopsis thaliana
  misc_feature (1)..(1429): Ceres Seq. ID no. 13646310
  misc_feature: MA Experiment ID: 108464 Result: Up-regulated in Transcription
  misc_feature: MA Experiment 108464 PARAMETER Experiment Name: At_Germinating_Seeds_cDNA_P Parameter: Age (day) Value: 4 vs. 0
  misc_feature: MA Experiment 108464 PARAMETER Experiment Name: At_Germinating_Seeds_cDNA_P Parameter: Tissue Value: Germinating Seeds
  misc_feature: MA Experiment ID: 20000173 Result: Down-regulated in Transcription
  misc_feature: MA Experiment 20000173 PARAMETER Experiment Name: At_42deg_Heat_P Parameter: Age (day) Value: 14
  misc_feature: MA Experiment 20000173 PARAMETER Experiment Name: At_42deg_Heat_P Parameter: Organism Value: A. thaliana
  misc_feature: MA Experiment 20000173 PARAMETER Experiment Name: At_42deg_Heat_P Parameter: Plant Line Value: WS
  misc_feature: MA Experiment 20000173 PARAMETER Experiment Name: At_42deg_Heat_P Parameter: Temperature (deg C) Value: 42 vs. 22
  misc_feature: MA Experiment 20000173 PARAMETER Experiment Name: At_42deg_Heat_P Parameter: Timepoint (hr) Value: 6
  misc_feature: MA Experiment 20000173 PARAMETER Experiment Name: At_42deg_Heat_P Parameter: Tissue Value: Aerial
  misc_feature: MA Experiment ID: 20000184 Result: Down-regulated in Transcription
  misc_feature: MA Experiment 20000184 PARAMETER Experiment Name: At_Shoots__P Parameter: Age (day) Value: 7
  misc_feature: MA Experiment 20000184 PARAMETER Experiment Name: At_Shoots__P Parameter: Tissue Value: Shoots vs. Whole Plant
  misc_feature: MA Experiment ID: 20000264 Result: Down-regulated in Transcription
  misc_feature: MA Experiment 20000264 PARAMETER Experiment Name: At_Open_Flower_P Parameter: Age (day) Value: 21
  misc_feature: MA Experiment 20000264 PARAMETER Experiment Name: At_Open_Flower_P Parameter: Plant Line Value: WS
  misc_feature: MA Experiment 20000264 PARAMETER Experiment Name: At_Open_Flower_P Parameter: Tissue Value: Open Flower vs. Whole Plant
  misc_feature: MA Experiment ID: 20000438 Result: Down-regulated in Transcription
  misc_feature: MA Experiment 20000438 PARAMETER Experiment Name: At_Shoots__P Parameter: Age (day) Value: 14
  misc_feature: MA Experiment 20000438 PARAMETER Experiment Name: At_Shoots__P Parameter: Tissue Value: Shoots vs. Whole Plant
  misc_feature: MA Experiment ID: 20001556 Result: Down-regulated in Transcription
  misc_feature: MA Experiment 20001556 PARAMETER Experiment Name: At_Drought_Soil_Dry_P Parameter: Age (day) Value: 26
  misc_feature: MA Experiment 20001556 PARAMETER Experiment Name: At_Drought_Soil_Dry_P Parameter: Organism Value: A. thaliana
  misc_feature: MA Experiment 20001556 PARAMETER Experiment Name: At_Drought_Soil_Dry_P Parameter: Plant Line Value: WS
  misc_feature: MA Experiment 20001556 PARAMETER Experiment Name: At_Drought_Soil_Dry_P Parameter: Post Timepoint (hr) Value: None
  misc_feature: MA Experiment 20001556 PARAMETER Experiment Name: At_Drought_Soil_Dry_P Parameter: Post-Treatment Value: None
  misc_feature: MA Experiment 20001556 PARAMETER Experiment Name: At_Drought_Soil_Dry_P Parameter: Timepoint (day) Value: 12
  misc_feature: MA Experiment 20001556 PARAMETER Experiment Name: At_Drought_Soil_Dry_P Parameter: Treatment Value: Drought vs. No Drought
  misc_feature: MA Experiment ID: 20001557 Result: Down-regulated in Transcription
  misc_feature: MA Experiment 20001557 PARAMETER Experiment Name: At_Drought_Soil_Dry_P Parameter: Age (day) Value: 27
  misc_feature: MA Experiment 20001557 PARAMETER Experiment Name: At_Drought_Soil_Dry_P Parameter: Organism Value: A. thaliana
  misc_feature: MA Experiment 20001557 PARAMETER Experiment Name: At_Drought_Soil_Dry_P Parameter: Plant Line Value: WS
  misc_feature: MA Experiment 20001557 PARAMETER Experiment Name: At_Drought_Soil_Dry_P Parameter: Post Timepoint (hr) Value: 3
  misc_feature: MA Experiment 20001557 PARAMETER Experiment Name: At_Drought_Soil_Dry_P Parameter: Post-Treatment Value: Re-Water vs. No Drought
  misc_feature: MA Experiment 20001557 PARAMETER Experiment Name: At_Drought_Soil_Dry_P Parameter: Timepoint (day) Value: 13
  misc_feature: MA Experiment 20001557 PARAMETER Experiment Name: At_Drought_Soil_Dry_P Parameter: Treatment Value: Drought vs. No Drought
  misc_feature: MA Experiment ID: 20001558 Result: Down-regulated in Transcription
  misc_feature: MA Experiment 20001558 PARAMETER Experiment Name: At_Drought_Soil_Dry_P Parameter: Age (day) Value: 27
  misc_feature: MA Experiment 20001558 PARAMETER Experiment Name: At_Drought_Soil_Dry_P Parameter: Organism Value: A. thaliana
  misc_feature: MA Experiment 20001558 PARAMETER Experiment Name: At_Drought_Soil_Dry_P Parameter: Plant Line Value: WS
  misc_feature: MA Experiment 20001558 PARAMETER Experiment Name: At_Drought_Soil_Dry_P Parameter: Post Timepoint (hr) Value: 6
  misc_feature: MA Experiment 20001558 PARAMETER Experiment Name: At_Drought_Soil_Dry_P Parameter: Post-Treatment Value: Re-Water vs. No Drought
  misc_feature: MA Experiment 20001558 PARAMETER Experiment Name: At_Drought_Soil_Dry_P Parameter: Timepoint (day) Value: 13
  misc_feature: MA Experiment 20001558 PARAMETER Experiment Name: At_Drought_Soil_Dry_P Parameter: Treatment Value: Drought vs. No Drought
  misc_feature: MA Experiment ID: 20001773 Result: Up-regulated in Transcription
  misc_feature: MA Experiment 20001773 PARAMETER Experiment Name: At_Far-red-enriched-adult_P Parameter: Age (day) Value: 30
  misc_feature: MA Experiment 20001773 PARAMETER Experiment Name: At_Far-red-enriched-adult_P Parameter: Light Value: Far-red enriched vs. White
  misc_feature: MA Experiment 20001773 PARAMETER Experiment Name: At_Far-red-enriched-adult_P Parameter: Organism Value: A. thaliana
  misc_feature: MA Experiment 20001773 PARAMETER Experiment Name: At_Far-red-enriched-adult_P Parameter: Plant Line Value: Columbia
  misc_feature: MA Experiment 20001773 PARAMETER Experiment Name: At_Far-red-enriched-adult_P Parameter: Timepoint (hr) Value: 48
  misc_feature: MA Experiment 20001773 PARAMETER Experiment Name: At_Far-red-enriched-adult_P Parameter: Tissue Value: Aerial
  misc_feature: MA Experiment ID: 20001906 Result: Down-regulated in Transcription
  misc_feature: MA Experiment 20001906 PARAMETER Experiment Name: At_Drought_Reproduction_P Parameter: Age (day) Value: 35
  misc_feature: MA Experiment 20001906 PARAMETER Experiment Name: At_Drought_Reproduction_P Parameter: Organism Value: A. thaliana
  misc_feature: MA Experiment 20001906 PARAMETER Experiment Name: At_Drought_Reproduction_P Parameter: Plant Line Value: WS
  misc_feature: MA Experiment 20001906 PARAMETER Experiment Name: At_Drought_Reproduction_P Parameter: Timepoint (day) Value: 5
  misc_feature: MA Experiment 20001906 PARAMETER Experiment Name: At_Drought_Reproduction_P Parameter: Tissue Value: Siliques
  misc_feature: MA Experiment 20001906 PARAMETER Experiment Name: At_Drought_Reproduction_P Parameter: Treatment Value: Drought vs. No Drought
  misc_feature: MA Experiment ID: 20001911 Result: Down-regulated in Transcription
  misc_feature: MA Experiment 20001911 PARAMETER Experiment Name: At_Drought_Reproduction_P Parameter: Age (day) Value: 40
  misc_feature: MA Experiment 20001911 PARAMETER Experiment Name: At_Drought_Reproduction_P Parameter: Organism Value: A. thaliana
  misc_feature: MA Experiment 20001911 PARAMETER Experiment Name: At_Drought_Reproduction_P Parameter: Plant Line Value: WS
  misc_feature: MA Experiment 20001911 PARAMETER Experiment Name: At_Drought_Reproduction_P Parameter: Timepoint (day) Value: 10
  misc_feature: MA Experiment 20001911 PARAMETER Experiment Name: At_Drought_Reproduction_P Parameter: Tissue Value: Flowers
  misc_feature: MA Experiment 20001911 PARAMETER Experiment Name: At_Drought_Reproduction_P Parameter: Treatment Value: Drought vs. No Drought
ataaatattgattccagtgaatctcttaatgtcatcaagatcagaagacaatttttatttttcatcaagtttcttagatcatcaggttgattggtactctaatcagtgtgattgtaaatggcgtctaattcttctaacgggacgacgacgacaaagccaccacctatgccgtctcctctgcgtaattccaagttttttcagtcgaatatgaggatcttggtgaccggaggagctggattcattggttcacatctcgttgataaattgatccaaaacgaaaagaatgaagtaatcgttgcggataattacttcacaggatcaaaagacaatctcaagaaatggattggtcatccaagatttgagctaattcgtcatgatgtgactgaacctcttttcgtcgaggttgatcaaatctaccatttagcatgtcccgcttctccaattttctacaaatacaaccccgttaagacgataaaaacaaatgtgattggcacacttaacatgttaggactagctaagcgagttggagcaagaattttacttacttccacatctgaagtgtatggtgatcctttggttcaccctcaaaccgagagctattggggaaatgtaaacccgatcggtgttagaagctgttatgatgaaggaaaacgtgttgccgagactcttatgtttgattaccataggcaacatgggattgagatacgcatagcgaggatattcaacacatatggtcctcgtatgaacattgatgatggtcgcgttgtgagcaacttcattgctcaggctctcaggggagaagctctgactgttcagaaaccgggaacacaaacccgcagtttctgttatgtttcggacatggtggaaggtctaatgcgtttgatggaaggagaccaaaccggaccgataaacataggcaatccaggcgaattcacgatggttgagctcgctgagacggttaaagagcttattaaaccggacgtggagataaagatggtagagaacacacctgatgatccaaggcagaggaaaccagacataagcaaagctaaagaagttcttggttgggaaccaaaggtgaagctacgtgaggggcttcctcttatggaagaagattttcgtctaaggcttggtgttccgaagaagtaaaacttattttccaaaaaaaagaagaagaaaaataattgctattttaatttcatggaattgtgtggtcttatcattttgtttgtttgtttgaaatcggggttccaagtcgaagcaagtgcacacatatccccggaacatgtggagcatgtcttttaatctttctctttgcattttgagtttgtaggaaataagcgtcctaacgaggaacattttagggaagtgatgttacgttactacttgaattttattatgaatgtaatcagtgagatgttttaagctt

SEQ ID NO: 44292 - protein, 343 aa, Arabidopsis thaliana
  peptide (1)..(343): Ceres Seq. ID no. 13646311
  misc_feature (33)..(339): Pfam Name: NAD dependent epimerase/dehydratase family Pfam Description: NAD dependent epimerase/dehydratase family
  misc_feature (31)..(338): Homolog of NCBI NO: 15227109 NR Description: NAD-dependent epimerase/dehydratase family
  misc_feature (80)..(342): Homolog of NCBI NO: 2351580 NR Description: thymidine diphospho-glucose 4-6-dehydratase
  misc_feature (3)..(343): Homolog of NCBI NO: 11121508 NR Description: d-TDP-glucose dehydratase [Phragmites australis]
  misc_feature (2)..(343): Homolog of NCBI NO: 18447934 NR Description: UDP-glucuronic acid decarboxylase
  misc_feature (1)..(342): Homolog of NCBI NO: 13591616 NR Description: UDP-D-glucuronate carboxy-lyase [Pisum sativum]
  misc_feature (1)..(343): Homolog of NCBI NO: 11270075 NR Description: dTDPglucose 4,6-dehydratase (EC 4.2.1.46)
  misc_feature (1)..(342): Homolog of NCBI NO: 14030703 NR Description: AT5g59290/mnc17_180 [Arabidopsis thaliana]
  misc_feature (1)..(342): Homolog of NCBI NO: 15237853 NR Description: NAD-dependent epimerase/dehydratase family
  misc_feature (5)..(342): Homolog of NCBI NO: 15231432 NR Description: NAD-dependent epimerase/dehydratase family
  misc_feature (1)..(343): Homolog of NCBI NO: 15226950 NR Description: NAD-dependent epimerase/dehydratase family
MASNSSNGTTTTKPPPMPSPLRNSKFFQSNMRILVTGGAGFIGSHLVDKLIQNEKNEVIVADNYFTGSKDNLKKWIGHPRFELIRHDVTEPLFVEVDQIYHLACPASPIFYKYNPVKTIKTNVIGTLNMLGLAKRVGARILLTSTSEVYGDPLVHPQTESYWGNVNPIGVRSCYDEGKRVAETLMFDYHRQHGIEIRIARIFNTYGPRMNIDDGRVVSNFIAQALRGEALTVQKPGTQTRSFCYVSDMVEGLMRLMEGDQTGPINIGNPGEFTMVELAETVKELIKPDVEIKMVENTPDDPRQRKPDISKAKEVLGWEPKVKLREGLPLMEEDFRLRLGVPKK

SEQ ID NO: 44293 - protein, 327 aa, Arabidopsis thaliana
  peptide (1)..(327): Ceres Seq. ID no. 13646312
  misc_feature (17)..(323): Pfam Name: NAD dependent epimerase/dehydratase family Pfam Description: NAD dependent epimerase/dehydratase family
  misc_feature (15)..(322): Homolog of NCBI NO: 15227109 NR Description: NAD-dependent epimerase/dehydratase family
  misc_feature (64)..(326): Homolog of NCBI NO: 2351580 NR Description: thymidine diphospho-glucose 4-6-dehydratase
  misc_feature (1)..(327): Homolog of NCBI NO: 11121508 NR Description: d-TDP-glucose dehydratase [Phragmites australis]
  misc_feature (1)..(327): Homolog of NCBI NO: 18447934 NR Description: UDP-glucuronic acid decarboxylase
  misc_feature (1)..(326): Homolog of NCBI NO: 13591616 NR Description: UDP-D-glucuronate carboxy-lyase [Pisum sativum]
  misc_feature (1)..(327): Homolog of NCBI NO: 11270075 NR Description: dTDPglucose 4,6-dehydratase (EC 4.2.1.46)
  misc_feature (1)..(326): Homolog of NCBI NO: 14030703 NR Description: AT5g59290/mnc17_180 [Arabidopsis thaliana]
  misc_feature (1)..(326): Homolog of NCBI NO: 15237853 NR Description: NAD-dependent epimerase/dehydratase family
  misc_feature (1)..(326): Homolog of NCBI NO: 15231432 NR Description: NAD-dependent epimerase/dehydratase family
  misc_feature (1)..(327): Homolog of NCBI NO: 15226950 NR Description: NAD-dependent epimerase/dehydratase family
MPSPLRNSKFFQSNMRILVTGGAGFIGSHLVDKLIQNEKNEVIVADNYFTGSKDNLKKWIGHPRFELIRHDVTEPLFVEVDQIYHLACPASPIFYKYNPVKTIKTNVIGTLNMLGLAKRVGARILLTSTSEVYGDPLVHPQTESYWGNVNPIGVRSCYDEGKRVAETLMFDYHRQHGIEIRIARIFNTYGPRMNIDDGRVVSNFIAQALRGEALTVQKPGTQTRSFCYVSDMVEGLMRLMEGDQTGPINIGNPGEFTMVELAETVKELIKPDVEIKMVENTPDDPRQRKPDISKAKEVLGWEPKVKLREGLPLMEEDFRLRLGVPKK

SEQ ID NO: 44294 - protein, 313 aa, Arabidopsis thaliana
  peptide (1)..(313): Ceres Seq. ID no. 13646313
  misc_feature (3)..(309): Pfam Name: NAD dependent epimerase/dehydratase family Pfam Description: NAD dependent epimerase/dehydratase family
  misc_feature (1)..(308): Homolog of NCBI NO: 15227109 NR Description: NAD-dependent epimerase/dehydratase family
  misc_feature (50)..(312): Homolog of NCBI NO: 2351580 NR Description: thymidine diphospho-glucose 4-6-dehydratase
  misc_feature (1)..(313): Homolog of NCBI NO: 11121508 NR Description: d-TDP-glucose dehydratase [Phragmites australis]
  misc_feature (1)..(313): Homolog of NCBI NO: 18447934 NR Description: UDP-glucuronic acid decarboxylase
  misc_feature (1)..(312): Homolog of NCBI NO: 13591616 NR Description: UDP-D-glucuronate carboxy-lyase [Pisum sativum]
  misc_feature (1)..(313): Homolog of NCBI NO: 11270075 NR Description: dTDPglucose 4,6-dehydratase (EC 4.2.1.46)
  misc_feature (1)..(312): Homolog of NCBI NO: 14030703 NR Description: AT5g59290/mnc17_180 [Arabidopsis thaliana]
  misc_feature (1)..(312): Homolog of NCBI NO: 15237853 NR Description: NAD-dependent epimerase/dehydratase family
  misc_feature (1)..(312): Homolog of NCBI NO: 15231432 NR Description: NAD-dependent epimerase/dehydratase family
  misc_feature (1)..(313): Homolog of NCBI NO: 15226950 NR Description: NAD-dependent epimerase/dehydratase family
MRILVTGGAGFIGSHLVDKLIQNEKNEVIVADNYFTGSKDNLKKWIGHPRFELIRHDVTEPLFVEVDQIYHLACPASPIFYKYNPVKTIKTNVIGTLNMLGLAKRVGARILLTSTSEVYGDPLVHPQTESYWGNVNPIGVRSCYDEGKRVAETLMFDYHRQHGIEIRIARIFNTYGPRMNIDDGRVVSNFIAQALRGEALTVQKPGTQTRSFCYVSDMVEGLMRLMEGDQTGPINIGNPGEFTMVELAETVKELIKPDVEIKMVENTPDDPRQRKPDISKAKEVLGWEPKVKLREGLPLMEEDFRLRLGVPKK

SEQ ID NO: 44295 - DNA, 1959 bp, Arabidopsis thaliana
  misc_feature (1)..(1959): Ceres Seq. ID no. 12488810
  misc_feature: MA Experiment ID: 20000314 Result: Down-regulated in Transcription
  misc_feature: MA Experiment 20000314 PARAMETER Experiment Name: At_14day_Shoots-Roots_Sub_P Parameter: Age (day) Value: 14
  misc_feature: MA Experiment 20000314 PARAMETER Experiment Name: At_14day_Shoots-Roots_Sub_P Parameter: Organism Value: A. thaliana
  misc_feature: MA Experiment 20000314 PARAMETER Experiment Name: At_14day_Shoots-Roots_Sub_P Parameter: Plant Line Value: WS
  misc_feature: MA Experiment 20000314 PARAMETER Experiment Name: At_14day_Shoots-Roots_Sub_P Parameter: Tissue Value: Roots vs. Whole Plant
  misc_feature: MA Experiment ID: 20000315 Result: Down-regulated in Transcription
  misc_feature: MA Experiment 20000315 PARAMETER Experiment Name: At_14day_Shoots-Roots_Sub_P Parameter: Age (day) Value: 14
  misc_feature: MA Experiment 20000315 PARAMETER Experiment Name: At_14day_Shoots-Roots_Sub_P Parameter: Organism Value: A. thaliana
  misc_feature: MA Experiment 20000315 PARAMETER Experiment Name: At_14day_Shoots-Roots_Sub_P Parameter: Plant Line Value: WS
  misc_feature: MA Experiment 20000315 PARAMETER Experiment Name: At_14day_Shoots-Roots_Sub_P Parameter: Tissue Value: Shoots vs. Whole Plant
  misc_feature: MA Experiment ID: 20000348 Result: Up-regulated in Transcription
  misc_feature: MA Experiment 20000348 PARAMETER Experiment Name: At_100uM_ABA_Sub_P Parameter: Age (day) Value: 14
  misc_feature: MA Experiment 20000348 PARAMETER Experiment Name: At_100uM_ABA_Sub_P Parameter: Organism Value: A. thaliana
  misc_feature: MA Experiment 20000348 PARAMETER Experiment Name: At_100uM_ABA_Sub_P Parameter: Plant Line Value: WS
  misc_feature: MA Experiment 20000348 PARAMETER Experiment Name: At_100uM_ABA_Sub_P Parameter: Timepoint (hr) Value: 1
  misc_feature: MA Experiment 20000348 PARAMETER Experiment Name: At_100uM_ABA_Sub_P Parameter: Tissue Value: Aerial
  misc_feature: MA Experiment 20000348 PARAMETER Experiment Name: At_100uM_ABA_Sub_P Parameter: Treatment Value: 100uM ABA vs. No Treatment
  misc_feature: MA Experiment ID: 20000349 Result: Up-regulated in Transcription
  misc_feature: MA Experiment 20000349 PARAMETER Experiment Name: At_100uM_ABA_Sub_P Parameter: Age (day) Value: 14
  misc_feature: MA Experiment 20000349 PARAMETER Experiment Name: At_100uM_ABA_Sub_P Parameter: Organism Value: A. thaliana
  misc_feature: MA Experiment 20000349 PARAMETER Experiment Name: At_100uM_ABA_Sub_P Parameter: Plant Line Value: WS
  misc_feature: MA Experiment 20000349 PARAMETER Experiment Name: At_100uM_ABA_Sub_P Parameter: Timepoint (hr) Value: 6
  misc_feature: MA Experiment 20000349 PARAMETER Experiment Name: At_100uM_ABA_Sub_P Parameter: Tissue Value: Aerial
  misc_feature: MA Experiment 20000349 PARAMETER Experiment Name: At_100uM_ABA_Sub_P Parameter: Treatment Value: 100uM ABA vs. No Treatment
  misc_feature: MA Experiment ID: 20000352 Result: Up-regulated in Transcription
  misc_feature: MA Experiment 20000352 PARAMETER Experiment Name: At_Drought_Sub_P Parameter: Age (day) Value: 7
  misc_feature: MA Experiment 20000352 PARAMETER Experiment Name: At_Drought_Sub_P Parameter: Organism Value: A. thaliana
  misc_feature: MA Experiment 20000352 PARAMETER Experiment Name: At_Drought_Sub_P Parameter: Plant Line Value: WS
  misc_feature: MA Experiment 20000352 PARAMETER Experiment Name: At_Drought_Sub_P Parameter: Timepoint (hr) Value: 6
  misc_feature: MA Experiment 20000352 PARAMETER Experiment Name: At_Drought_Sub_P Parameter: Tissue Value: Whole Plant
  misc_feature: MA Experiment 20000352 PARAMETER Experiment Name: At_Drought_Sub_P Parameter: Treatment Value: Drought vs. No Drought
  misc_feature: MA Experiment ID: 20001807 Result: Down-regulated in Transcription
  misc_feature: MA Experiment 20001807 PARAMETER Experiment Name: At_50mM_NH4NO3_L-to-H_Sub_P Parameter: Timepoint (hr) Value: 6
  misc_feature: MA Experiment 20001807 PARAMETER Experiment Name: At_50mM_NH4NO3_L-to-H_Sub_P Parameter: Tissue Value: Leaf
  misc_feature: MA Experiment 20001807 PARAMETER Experiment Name: At_50mM_NH4NO3_L-to-H_Sub_P Parameter: Treatment Value: 50mM NH4NO3 vs 100mM Mannitol
aaaaaattacataataaatagagaagagattttggaagagagaaaatgcaatttagctcctcacgtattagcaatttaagttcttgtcttggtcttccctcgatttcaaacgacattaaccaaaaccagagaactacgaattattcgctaaaaaaagatggattcttgttgcaactttagcttggggacaaaaactgtcttggccaaagacagtttcaagaatgtagagaacaaatttttgggtgagaagatcaaaggaagcgtcttgaagcctttttcttcagatttgagttccaagaagttcagaaatcgaaaattgaggcccggtgttgcttacgctattgctacctcaaagaatgctaaagaggctttgaaaaatcaaccttccatgtttgagagaagaagagcagatcctaaaaatgtggctgcaatcattctaggaggaggcgatggagctaaactctttcctcttaccaagcgagcagcaacacctgctgttcctgtgggtggatgctataggatgatcgatatcccgatgagtaattgcattaacagttgcataaacaagattttcgtgctgactcagtttaactcggcttccctcaatcgccatttggctcgtacttattttgggaatggcataaactttggagatggttttgttgaggttctggctgctacacaaactcctggtgaagccgggaaaaagtggtttcaaggcacagctgatgctgtgagaaaatttctgtgggtgtttgaggatgctaagaacaggaacattgagaatataatcatcttgtctggagatcacctatatagaatgaactatatggactttgttcagcaccatgtcgatagtaaagccgatattactctttcgtgcgcgccggttgatgagagccgtgcgtcggagtatggactggtcaatattgatcgaagcgggcgtgtagtccatttctctgagaaaccaactggcatcgatctgaaatcaatgcaaaccgatactactatgcatggactgtctcatcaagaagcagcaaaatctccatacattgcgtcaatgggagtttattgtttcaaaaccgaagctttactgaagcttctgacatggcggtatccgagttccaatgactttgggtctgaaattattcctgcagctataaaagatcacaatgttcaaggatacatctacagagactattgggaagacatcggaactattaagagtttctatgaagctaatattgctcttgtcgaggagcatcccaagtttgagttttacgatcagaatacacctttctacacttctcctcggtttctaccacccaccaaaaccgagaagtgccggattgtaaattcggtaatctcacacggatgtttcttgggagaatgcagcatccaacgttccattattggtgaaagatcacgtcttgactatggtgttgagcttcaggatactcttatgttaggagcggatagttaccaaaccgaatctgagatcgcgtctctgcttgcggaaggaaatgttccaattggcattggccgagatacaaagatcaggaaatgcatcattgacaagaatgcaaagatcgggaaaaacgtggtgatcatgaacaaagatgatgttaaggaggctgataggccagaggaaggattctacattcgatctggaatcactgtggttgtcgaaaaggccaccattaaagacggtactgtgatatgaacaaaacgatctcaagaccgccgtggtgattttgaggtgtttggccggaagttaaaaagagagaccgttgtgattttgtcatgtaaattagaagaggagatagaagaatcatacaatttagaagcaaaagcaagtttaagctttacaataagagtgatcagccgatcacctatagctataatagtcactctcttttcataatgatcaataaataaagctatctatcttcttctgtt

SEQ ID NO: 44296 - protein, 521 aa, Arabidopsis thaliana
  peptide (1)..(521): Ceres Seq. ID no. 12488811
  misc_feature (90)..(368): Pfam Name: Nucleotidyl transferase Pfam Description: Nucleotidyl transferase
  misc_feature (1)..(521): Homolog of NCBI NO: 5917791 NR Description: ADP-glucose pyrophosphorylase large subunit
  misc_feature (24)..(521): Homolog of NCBI NO: 29421114 NR Description: ADP-glucose pyrophosphorylase large subunit
  misc_feature (1)..(521): Homolog of NCBI NO: 7671234 NR Description: ADP-glucose pyrophosphorylase large subunit
  misc_feature (20)..(521): Homolog of NCBI NO: 7434880 NR Description: glucose-1-phosphate adenylyltransferase (EC
  misc_feature (53)..(521): Homolog of NCBI NO: 232166 NR Description: Glucose-1-phosphate adenylyltransferase large
  misc_feature (1)..(521): Homolog of NCBI NO: 7434869 NR Description: glucose-1-phosphate adenylyltransferase (EC
  misc_feature (1)..(521): Homolog of NCBI NO: 7434884 NR Description: glucose-1-phosphate adenylyltransferase (EC
  misc_feature (20)..(521): Homolog of NCBI NO: 5923897 NR Description: ADP-glucose pyrophosphorylase large subunit
  misc_feature (1)..(521): Homolog of NCBI NO: 15226593 NR Description: putative ADP-glucose pyrophosphorylase large
  misc_feature (1)..(521): Homolog of NCBI NO: 15234972 NR Description: glucose-1-phosphate adenylyltransferase (APL3)
MDSCCNFSLGTKTVLAKDSFKNVENKFLGEKIKGSVLKPFSSDLSSKKFRNRKLRPGVAYAIATSKNAKEALKNQPSMFERRRADPKNVAAIILGGGDGAKLFPLTKRAATPAVPVGGCYRMIDIPMSNCINSCINKIFVLTQFNSASLNRHLARTYFGNGINFGDGFVEVLAATQTPGEAGKKWFQGTADAVRKFLWVFEDAKNRNIENIIILSGDHLYRMNYMDFVQHHVDSKADITLSCAPVDESRASEYGLVNIDRSGRVVHFSEKPTGIDLKSMQTDTTMHGLSHQEAAKSPYIASMGVYCFKTEALLKLLTWRYPSSNDFGSEIIPAAIKDHNVQGYIYRDYWEDIGTIKSFYEANIALVEEHPKFEFYDQNTPFYTSPRFLPPTKTEKCRIVNSVISHGCFLGECSIQRSIIGERSRLDYGVELQDTLMLGADSYQTESEIASLLAEGNVPIGIGRDTKIRKCIIDKNAKIGKNVVIMNKDDVKEADRPEEGFYIRSGITVVVEKATIKDGTVI

SEQ ID NO: 44297 - protein, 444 aa, Arabidopsis thaliana
  peptide (1)..(444): Ceres Seq. ID no. 12488812
  misc_feature (13)..(291): Pfam Name: Nucleotidyl transferase Pfam Description: Nucleotidyl transferase
  misc_feature (1)..(444): Homolog of NCBI NO: 5917791 NR Description: ADP-glucose pyrophosphorylase large subunit
  misc_feature (1)..(444): Homolog of NCBI NO: 29421114 NR Description: ADP-glucose pyrophosphorylase large subunit
  misc_feature (1)..(444): Homolog of NCBI NO: 7671234 NR Description: ADP-glucose pyrophosphorylase large subunit
  misc_feature (1)..(444): Homolog of NCBI NO: 7434880 NR Description: glucose-1-phosphate adenylyltransferase (EC
  misc_feature (1)..(444): Homolog of NCBI NO: 232166 NR Description: Glucose-1-phosphate adenylyltransferase large
  misc_feature (1)..(444): Homolog of NCBI NO: 7434869 NR Description: glucose-1-phosphate adenylyltransferase (EC
  misc_feature (1)..(444): Homolog of NCBI NO: 7434884 NR Description: glucose-1-phosphate adenylyltransferase (EC
  misc_feature (1)..(444): Homolog of NCBI NO: 5923897 NR Description: ADP-glucose pyrophosphorylase large subunit
  misc_feature (1)..(444): Homolog of NCBI NO: 15226593 NR Description: putative ADP-glucose pyrophosphorylase large
  misc_feature (1)..(444): Homolog of NCBI NO: 15234972 NR Description: glucose-1-phosphate adenylyltransferase (APL3)
MFERRRADPKNVAAIILGGGDGAKLFPLTKRAATPAVPVGGCYRMIDIPMSNCINSCINKIFVLTQFNSASLNRHLARTYFGNGINFGDGFVEVLAATQTPGEAGKKWFQGTADAVRKFLWVFEDAKNRNIENIIILSGDHLYRMNYMDFVQHHVDSKADITLSCAPVDESRASEYGLVNIDRSGRVVHFSEKPTGIDLKSMQTDTTMHGLSHQEAAKSPYIASMGVYCFKTEALLKLLTWRYPSSNDFGSEIIPAAIKDHNVQGYIYRDYWEDIGTIKSFYEANIALVEEHPKFEFYDQNTPFYTSPRFLPPTKTEKCRIVNSVISHGCFLGECSIQRSIIGERSRLDYGVELQDTLMLGADSYQTESEIASLLAEGNVPIGIGRDTKIRKCIIDKNAKIGKNVVIMNKDDVKEADRPEEGFYIRSGITVVVEKATIKDGTVI

SEQ ID NO: 44298 - protein, 400 aa, Arabidopsis thaliana
  peptide (1)..(400): Ceres Seq. ID no. 12488813
  misc_feature (1)..(247): Pfam Name: Nucleotidyl transferase Pfam Description: Nucleotidyl transferase
  misc_feature (1)..(400): Homolog of NCBI NO: 5917791 NR Description: ADP-glucose pyrophosphorylase large subunit
  misc_feature (1)..(400): Homolog of NCBI NO: 29421114 NR Description: ADP-glucose pyrophosphorylase large subunit
  misc_feature (1)..(400): Homolog of NCBI NO: 7671234 NR Description: ADP-glucose pyrophosphorylase large subunit
  misc_feature (1)..(400): Homolog of NCBI NO: 7434880 NR Description: glucose-1-phosphate adenylyltransferase (EC
  misc_feature (1)..(400): Homolog of NCBI NO: 232166 NR Description: Glucose-1-phosphate adenylyltransferase large
  misc_feature (1)..(400): Homolog of NCBI NO: 7434869 NR Description: glucose-1-phosphate adenylyltransferase (EC
  misc_feature (1)..(400): Homolog of NCBI NO: 7434884 NR Description: glucose-1-phosphate adenylyltransferase (EC
  misc_feature (1)..(400): Homolog of NCBI NO: 5923897 NR Description: ADP-glucose pyrophosphorylase large subunit
  misc_feature (1)..(400): Homolog of NCBI NO: 15226593 NR Description: putative ADP-glucose pyrophosphorylase large
  misc_feature (1)..(400): Homolog of NCBI NO: 15234972 NR Description: glucose-1-phosphate adenylyltransferase (APL3)
MIDIPMSNCINSCINKIFVLTQFNSASLNRHLARTYFGNGINFGDGFVEVLAATQTPGEAGKKWFQGTADAVRKFLWVFEDAKNRNIENIIILSGDHLYRMNYMDFVQHHVDSKADITLSCAPVDESRASEYGLVNIDRSGRVVHFSEKPTGIDLKSMQTDTTMHGLSHQEAAKSPYIASMGVYCFKTEALLKLLTWRYPSSNDFGSEIIPAAIKDHNVQGYIYRDYWEDIGTIKSFYEANIALVEEHPKFEFYDQNTPFYTSPRFLPPTKTEKCRIVNSVISHGCFLGECSIQRSIIGERSRLDYGVELQDTLMLGADSYQTESEIASLLAEGNVPIGIGRDTKIRKCIIDKNAKIGKNVVIMNKDDVKEADRPEEGFYIRSGITVVVEKATIKDGTVI

SEQ ID NO: 44299 - DNA, 1642 bp, Arabidopsis thaliana
  misc_feature (1)..(1642): Ceres Seq. ID no. 14304412
  misc_feature: MA Experiment ID: 20000180 Result: Up-regulated in Transcription
  misc_feature: MA Experiment 20000180 PARAMETER Experiment Name: At_Germinating_Seeds_P Parameter: Age (hr) Value: 24 vs. 0
  misc_feature: MA Experiment 20000180 PARAMETER Experiment Name: At_Germinating_Seeds_P Parameter: Tissue Value: Germinating Seeds
  misc_feature: MA Experiment ID: 20000264 Result: Up-regulated in Transcription
  misc_feature: MA Experiment 20000264 PARAMETER Experiment Name: At_Open_Flower_P Parameter: Age (day) Value: 21
  misc_feature: MA Experiment 20000264 PARAMETER Experiment Name: At_Open_Flower_P Parameter: Plant Line Value: WS
  misc_feature: MA Experiment 20000264 PARAMETER Experiment Name: At_Open_Flower_P Parameter: Tissue Value: Open Flower vs. Whole Plant
  misc_feature: MA Experiment ID: 20000286 Result: Up-regulated in Transcription
  misc_feature: MA Experiment 20000286 PARAMETER Experiment Name: At_Open_Flower_P Parameter: Age (day) Value: 21
  misc_feature: MA Experiment 20000286 PARAMETER Experiment Name: At_Open_Flower_P Parameter: Plant Line Value: WS
  misc_feature: MA Experiment 20000286 PARAMETER Experiment Name: At_Open_Flower_P Parameter: Tissue Value: Half Open vs. Whole Plant
  misc_feature: MA Experiment ID: 20000438 Result: Up-regulated in Transcription
  misc_feature: MA Experiment 20000438 PARAMETER Experiment Name: At_Shoots__P Parameter: Age (day) Value: 14
  misc_feature: MA Experiment 20000438 PARAMETER Experiment Name: At_Shoots__P Parameter: Tissue Value: Shoots vs. Whole Plant
  misc_feature: MA Experiment ID: 20000439 Result: Down-regulated in Transcription
  misc_feature: MA Experiment 20000439 PARAMETER Experiment Name: At_Roots__P Parameter: Age (day) Value: 14 vs. 21
  misc_feature: MA Experiment 20000439 PARAMETER Experiment Name: At_Roots__P Parameter: Organism Value: A. thaliana
  misc_feature: MA Experiment 20000439 PARAMETER Experiment Name: At_Roots__P Parameter: Tissue Value: Roots vs. Whole Plant
  misc_feature: MA Experiment ID: 20000443 Result: Up-regulated in Transcription
  misc_feature: MA Experiment 20000443 PARAMETER Experiment Name: At_1uM_BR-BRZ__P Parameter: Tissue Value: Shoot Apices
  misc_feature: MA Experiment 20000443 PARAMETER Experiment Name: At_1uM_BR-BRZ__P Parameter: Treatment Value: 1uM BRZ vs. No Treatment
  misc_feature: MA Experiment ID: 20000794 Result: Up-regulated in Transcription
  misc_feature: MA Experiment 20000794 PARAMETER Experiment Name: At_Petals_P Parameter: Age (day) Value: 23-25 days
  misc_feature: MA Experiment 20000794 PARAMETER Experiment Name: At_Petals_P Parameter: Plant Line Value: WS
  misc_feature: MA Experiment 20000794 PARAMETER Experiment Name: At_Petals_P Parameter: Tissue Value: Petals vs. Whole plant
  misc_feature: MA Experiment ID: 20001248 Result: Down-regulated in Transcription
  misc_feature: MA Experiment 20001248 PARAMETER Experiment Name: At_Far-red-induction_P Parameter: Age (day) Value: 7
  misc_feature: MA Experiment 20001248 PARAMETER Experiment Name: At_Far-red-induction_P Parameter: Light Value: Far-red vs. White
  misc_feature: MA Experiment 20001248 PARAMETER Experiment Name: At_Far-red-induction_P Parameter: Organism Value: A. thaliana
  misc_feature: MA Experiment 20001248 PARAMETER Experiment Name: At_Far-red-induction_P Parameter: Plant Line Value: Columbia
  misc_feature: MA Experiment 20001248 PARAMETER Experiment Name: At_Far-red-induction_P Parameter: Timepoint (hr) Value: 4
  misc_feature: MA Experiment 20001248 PARAMETER Experiment Name: At_Far-red-induction_P Parameter: Tissue Value: Whole Plant
aagtattccaaaagaagaagaagaaataccttctcaattttctctaatggctctgataaccttacttgaagtctcaatttctttactctttttctccttcctttacggatatttcttgattagcaagaaacctcaccgttcgtttctcaccaactggccatttctcggtatgcttccgggtttactcgtggagatccctcgtgtttacgactttgtaaccgagcttctcgaggcctcaaacttaacttatcctttcaaaggtccatgtttagggggccttgacatgttgatcaccgttgatccggctaatatccatcacatcatgagctcaaacttcgcgaattacccgaaaggaaccgagttcaagaagatattcgatgttttgggagatgggattttcaacgcggattcggagttatggaaagatctgaggaaatcagctcaaagcatgatgactcatcaagattttcaaaggtttacactaagaacaatcatgagtaagctagagaaagggcttgtcccacttcttgattacgttgctgaaaagaaacaagtcgttgacttacaagatgtgttccaaagatttacgttcgacacttcgtttgttttagcgaccggggttgacccgggttgtctctcgactgaaatgccgcaaatcgagtttgctagagctttagacgaagcagaggaagcaattttcttcaggcatgtgaagccagagattgtttggaagatgcagaggtttattgggtttggagatgagttgaaaatgaagaaagctcactcgacattcgaccgagtttgctctaaatgcatagcttctaagagagatgaaataaccaatggggttataaacattgactcttcttctaaagatttgttgatgtgctacatgaatgtggatacaaccaagtacaagttgttgaatccaagtgatgacaaattccttagagacatgatcttaagcttcatgttagctggtagagacaccacaagctctgctctcacttggttcttttggcttctctctaagaacccaaaagccataaccaagattcgtcaagaaatcaacacacaactatctccaagaaccaatgattttgattcattcaatgctcaagagttaaacaagttggtgtatttacatggagcattgtgtgaagcccttaggctatatccaccggttccatttcagcacaagtctcctacaaaatccgacgttcttccaagtggacacagagtcgatgcgagttcgaagattgtgttctgtctttactcattagggagaatgaaatcagtttggggagaagatgcatcggaatttaaaccggagagatggatttcagagagtggaaggttgattcacgtgccttcttttaagttcttatcgtttaatgccggtccaaggacttgtttggggaaagaagtggctatgacacagatgaagacagtggctgtgaaaattatacaaaactatgagataaaggtcgttgaaggacacaagatcgagccagttccttctattattcttcacatgaagcatggtcttaaagttacagtcactaagagatctaatttgctctgaatattatgcattactattgtactacatttagtatgaaaataattattagaattttac

SEQ ID NO: 44300 - protein, 527 aa, Arabidopsis thaliana
  peptide (1)..(527): Ceres Seq. ID no. 14304413
  misc_feature (16)..(522): Homolog of NCBI NO: 15242968 NR Description: cytochrome P450, putative [Arabidopsis thaliana]
  misc_feature (16)..(523): Homolog of NCBI NO: 15235108 NR Description: cytochrome p450 family [Arabidopsis thaliana]
  misc_feature (16)..(522): Homolog of NCBI NO: 15218645 NR Description: cytochrome P450, putative [Arabidopsis thaliana]
  misc_feature (16)..(523): Homolog of NCBI NO: 15227116 NR Description: cytochrome P450, putative [Arabidopsis thaliana]
  misc_feature (16)..(523): Homolog of NCBI NO: 15236695 NR Description: cytochrome P450, putative [Arabidopsis thaliana]
  misc_feature (61)..(523): Homolog of NCBI NO: 30692374 NR Description: cytochrome P450 family [Arabidopsis thaliana]
  misc_feature (57)..(523): Homolog of NCBI NO: 7430718 NR Description: cytochrome P450 homolog F23K16.120 - Arabidopsis
  misc_feature (16)..(523): Homolog of NCBI NO: 7430717 NR Description: cytochrome P450 homolog F23K16.110 - Arabidopsis
  misc_feature (16)..(527): Homolog of NCBI NO: 30692374 NR Description: cytochrome P450 family [Arabidopsis thaliana]
  misc_feature (16)..(527): Homolog of NCBI NO: 15227788 NR Description: cytochrome P450, putative [Arabidopsis thaliana]
SIPKEEEEIPSQFSLMALITLLEVSISLLFFSFLYGYFLISKKPHRSFLTNWPFLGMLPGLLVEIPRVYDFVTELLEASNLTYPFKGPCLGGLDMLITVDPANIHHIMSSNFANYPKGTEFKKIFDVLGDGIFNADSELWKDLRKSAQSMMTHQDFQRFTLRTIMSKLEKGLVPLLDYVAEKKQVVDLQDVFQRFTFDTSFVLATGVDPGCLSTEMPQIEFARALDEAEEAIFFRHVKPEIVWKMQRFIGFGDELKMKKAHSTFDRVCSKCIASKRDEITNGVINIDSSSKDLLMCYMNVDTTKYKLLNPSDDKFLRDMILSFMLAGRDTTSSALTWFFWLLSKNPKAITKIRQEINTQLSPRTNDFDSFNAQELNKLVYLHGALCEALRLYPPVPFQHKSPTKSDVLPSGHRVDASSKIVFCLYSLGRMKSVWGEDASEFKPERWISESGRLIHVPSFKFLSFNAGPRTCLGKEVAMTQMKTVAVKIIQNYEIKVVEGHKIEPVPSIILHMKHGLKVTVTKRSNLL

SEQ ID NO: 44301 - protein, 512 aa, Arabidopsis thaliana
  peptide (1)..(512): Ceres Seq. ID no. 14304414
  misc_feature (1)..(507): Homolog of NCBI NO: 15242968 NR Description: cytochrome P450, putative [Arabidopsis thaliana]
  misc_feature (1)..(508): Homolog of NCBI NO: 15235108 NR Description: cytochrome p450 family [Arabidopsis thaliana]
  misc_feature (1)..(507): Homolog of NCBI NO: 15218645 NR Description: cytochrome P450, putative [Arabidopsis thaliana]
  misc_feature (1)..(508): Homolog of NCBI NO: 15227116 NR Description: cytochrome P450, putative [Arabidopsis thaliana]
  misc_feature (1)..(508): Homolog of NCBI NO: 15236695 NR Description: cytochrome P450, putative [Arabidopsis thaliana]
  misc_feature (46)..(508): Homolog of NCBI NO: 30692374 NR Description: cytochrome P450 family [Arabidopsis thaliana]
  misc_feature (42)..(508): Homolog of NCBI NO: 7430718 NR Description: cytochrome P450 homolog F23K16.120 - Arabidopsis
  misc_feature (1)..(508): Homolog of NCBI NO: 7430717 NR Description: cytochrome P450 homolog F23K16.110 - Arabidopsis
  misc_feature (1)..(512): Homolog of NCBI NO: 30692374 NR Description: cytochrome P450 family [Arabidopsis thaliana]
  misc_feature (1)..(512): Homolog of NCBI NO: 15227788 NR Description: cytochrome P450, putative [Arabidopsis thaliana]
MALITLLEVSISLLFFSFLYGYFLISKKPHRSFLTNWPFLGMLPGLLVEIPRVYDFVTELLEASNLTYPFKGPCLGGLDMLITVDPANIHHIMSSNFANYPKGTEFKKIFDVLGDGIFNADSELWKDLRKSAQSMMTHQDFQRFTLRTIMSKLEKGLVPLLDYVAEKKQVVDLQDVFQRFTFDTSFVLATGVDPGCLSTEMPQIEFARALDEAEEAIFFRHVKPEIVWKMQRFIGFGDELKMKKAHSTFDRVCSKCIASKRDEITNGVINIDSSSKDLLMCYMNVDTTKYKLLNPSDDKFLRDMILSFMLAGRDTTSSALTWFFWLLSKNPKAITKIRQEINTQLSPRTNDFDSFNAQELNKLVYLHGALCEALRLYPPVPFQHKSPTKSDVLPSGHRVDASSKIVFCLYSLGRMKSVWGEDASEFKPERWISESGRLIHVPSFKFLSFNAGPRTCLGKEVAMTQMKTVAVKIIQNYEIKVVEGHKIEPVPSIILHMKHGLKVTVTKRSNLL

SEQ ID NO: 44302 - protein, 471 aa, Arabidopsis thaliana
  peptide (1)..(471): Ceres Seq. ID no. 14304415
  misc_feature (1)..(466): Homolog of NCBI NO: 15242968 NR Description: cytochrome P450, putative [Arabidopsis thaliana]
  misc_feature (1)..(467): Homolog of NCBI NO: 15235108 NR Description: cytochrome p450 family [Arabidopsis thaliana]
  misc_feature (1)..(466): Homolog of NCBI NO: 15218645 NR Description: cytochrome P450, putative [Arabidopsis thaliana]
  misc_feature (1)..(467): Homolog of NCBI NO: 15227116 NR Description: cytochrome P450, putative [Arabidopsis thaliana]
  misc_feature (1)..(467): Homolog of NCBI NO: 15236695 NR Description: cytochrome P450, putative [Arabidopsis thaliana]
  misc_feature (5)..(467): Homolog of NCBI NO: 30692374 NR Description: cytochrome P450 family [Arabidopsis thaliana]
  misc_feature (1)..(467): Homolog of NCBI NO: 7430718 NR Description: cytochrome P450 homolog F23K16.120 - Arabidopsis
  misc_feature (1)..(467): Homolog of NCBI NO: 7430717 NR Description: cytochrome P450 homolog F23K16.110 - Arabidopsis
  misc_feature (1)..(471): Homolog of NCBI NO: 30692374 NR Description: cytochrome P450 family [Arabidopsis thaliana]
  misc_feature (1)..(471): Homolog of NCBI NO: 15227788 NR Description: cytochrome P450, putative [Arabidopsis thaliana]
MLPGLLVEIPRVYDFVTELLEASNLTYPFKGPCLGGLDMLITVDPANIHHIMSSNFANYPKGTEFKKIFDVLGDGIFNADSELWKDLRKSAQSMMTHQDFQRFTLRTIMSKLEKGLVPLLDYVAEKKQVVDLQDVFQRFTFDTSFVLATGVDPGCLSTEMPQIEFARALDEAEEAIFFRHVKPEIVWKMQRFIGFGDELKMKKAHSTFDRVCSKCIASKRDEITNGVINIDSSSKDLLMCYMNVDTTKYKLLNPSDDKFLRDMILSFMLAGRDTTSSALTWFFWLLSKNPKAITKIRQEINTQLSPRTNDFDSFNAQELNKLVYLHGALCEALRLYPPVPFQHKSPTKSDVLPSGHRVDASSKIVFCLYSLGRMKSVWGEDASEFKPERWISESGRLIHVPSFKFLSFNAGPRTCLGKEVAMTQMKTVAVKIIQNYEIKVVEGHKIEPVPSIILHMKHGLKVTVTKRSNLL

SEQ ID NO: 44303 - DNA, 1449 bp, Arabidopsis thaliana
  misc_feature (1)..(1449): Ceres Seq. ID no. 13509793
  misc_feature: MA Experiment ID: 108434 Result: Down-regulated in Transcription
  misc_feature: MA Experiment 108434 PARAMETER Experiment Name: At_Root_Tips_cDNA_P Parameter: Tissue Value: Root Tips
  misc_feature: MA Experiment ID: 108462 Result: Up-regulated in Transcription
  misc_feature: MA Experiment 108462 PARAMETER Experiment Name: At_Germinating_Seeds_cDNA_P Parameter: Age (day) Value: 2 vs. 0
  misc_feature: MA Experiment 108462 PARAMETER Experiment Name: At_Germinating_Seeds_cDNA_P Parameter: Tissue Value: Germinating Seeds
  misc_feature: MA Experiment ID: 108501 Result: Up-regulated in Transcription
  misc_feature: MA Experiment 108501 PARAMETER Experiment Name: At_ap2_floral_buds_cDNA_P Parameter: Plant Line Value: ap2 (Ler.)
  misc_feature: MA Experiment 108501 PARAMETER Experiment Name: At_ap2_floral_buds_cDNA_P Parameter: Tissue Value: Closed Flower
  misc_feature: MA Experiment ID: 20000180 Result: Up-regulated in Transcription
  misc_feature: MA Experiment 20000180 PARAMETER Experiment Name: At_Germinating_Seeds_P Parameter: Age (hr) Value: 24 vs. 0
  misc_feature: MA Experiment 20000180 PARAMETER Experiment Name: At_Germinating_Seeds_P Parameter: Tissue Value: Germinating Seeds
  misc_feature: MA Experiment ID: 20000573 Result: Down-regulated in Transcription
  misc_feature: MA Experiment 20000573 PARAMETER Experiment Name: At_100uM_ABA_Mutants__P Parameter: Organism Value: A. thaliana
  misc_feature: MA Experiment 20000573 PARAMETER Experiment Name: At_100uM_ABA_Mutants__P Parameter: Plant Line Value: CS22 vs. Ler wt
  misc_feature: MA Experiment 20000573 PARAMETER Experiment Name: At_100uM_ABA_Mutants__P Parameter: Timepoint (hr) Value: N/A
  misc_feature: MA Experiment 20000573 PARAMETER Experiment Name: At_100uM_ABA_Mutants__P Parameter: Tissue Value: Whole Plant
  misc_feature: MA Experiment 20000573 PARAMETER Experiment Name: At_100uM_ABA_Mutants__P Parameter: Treatment Value: None
  misc_feature: MA Experiment ID: 20001555 Result: Up-regulated in Transcription
  misc_feature: MA Experiment 20001555 PARAMETER Experiment Name: At_Drought_Soil_Dry_P Parameter: Age (day) Value: 24
  misc_feature: MA Experiment 20001555 PARAMETER Experiment Name: At_Drought_Soil_Dry_P Parameter: Organism Value: A. thaliana
  misc_feature: MA Experiment 20001555 PARAMETER Experiment Name: At_Drought_Soil_Dry_P Parameter: Plant Line Value: WS
  misc_feature: MA Experiment 20001555 PARAMETER Experiment Name: At_Drought_Soil_Dry_P Parameter: Post Timepoint (hr) Value: None
  misc_feature: MA Experiment 20001555 PARAMETER Experiment Name: At_Drought_Soil_Dry_P Parameter: Post-Treatment Value: None
  misc_feature: MA Experiment 20001555 PARAMETER Experiment Name: At_Drought_Soil_Dry_P Parameter: Timepoint (day) Value: 10
  misc_feature: MA Experiment 20001555 PARAMETER Experiment Name: At_Drought_Soil_Dry_P Parameter: Treatment Value: Drought vs. No Drought
  misc_feature: MA Experiment ID: 20001556 Result: Up-regulated in Transcription
  misc_feature: MA Experiment 20001556 PARAMETER Experiment Name: At_Drought_Soil_Dry_P Parameter: Age (day) Value: 26
  misc_feature: MA Experiment 20001556 PARAMETER Experiment Name: At_Drought_Soil_Dry_P Parameter: Organism Value: A. thaliana
  misc_feature: MA Experiment 20001556 PARAMETER Experiment Name: At_Drought_Soil_Dry_P Parameter: Plant Line Value: WS
  misc_feature: MA Experiment 20001556 PARAMETER Experiment Name: At_Drought_Soil_Dry_P Parameter: Post Timepoint (hr) Value: None
  misc_feature: MA Experiment 20001556 PARAMETER Experiment Name: At_Drought_Soil_Dry_P Parameter: Post-Treatment Value: None
  misc_feature: MA Experiment 20001556 PARAMETER Experiment Name: At_Drought_Soil_Dry_P Parameter: Timepoint (day) Value: 12
  misc_feature: MA Experiment 20001556 PARAMETER Experiment Name: At_Drought_Soil_Dry_P Parameter: Treatment Value: Drought vs. No Drought
accaacaacaacaactccactaaaaaattcatagctctacaagagtcacctcatagagaagtgaagagacagagatagttgtgacagagagattcatggcggaagcttgcggagtgagaaggatgaagctgggaagccaaggccttgaggtatctgcgcaaggccttggttgcatgggcctctccgctttctacggtgctcccaagccggaaaatgaagccatcgctctcatccaccacgctattcactccggcgttactctccttgacacctccgatatctacggccctgagaccaatgaagttctcctcggaaaggctctcaaggatggggtgagagaaaaagtggaacttgcgaccaaatttggaatcagttatgcagaggggaaaagagaggtcagaggagatcctgaatatgtaagggctgcttgtgaggcaagtttaaagaggctagatattgcctgcatcgatctctattatcagcatcgtgtcgatactcgtgtccctatcgaaatcactatgggagaactgaagaagctggttgaagagggtaaaataaagtacattggtttgtctgaagcctctgcctcaactatcagaagagcacatgctgttcacccaattactgccgtgcagatagaatggtccttgtggacgagagatgtggaagaagaaatcattccgacctgcagggaacttgggattgggattgttgcttacagtcctctaggacgaggtttcttcgcatctggacccaagcttgttgagaacctagaaaaggatgacttcagaaaggctctaccaagattccaagaggaaaacttagaccacaacaagattgtttatgaaaaagtttgtgcaatatcggagaagaaagggtgcactcctggacaactagccctggcatgggttcatcaccagggagatgacgtttgccctatcccaggaaccactaagatcgagaacctcaaacagaacattggagctttgtcagtgaaactcactcctgaagagatgactgagcttgaggccattgcccaaccaggttttgtgaaaggagatagatacagtaacatgataccaactttcaagaacgctgagacaccaccattgtctgcttggaaagccgcttaaaaccggctgaagtttctacggttgtggtggtgcatcatgacattgaagtggtcttaactttctgtcagctagatcagtgtgttggggaataatggtgcgtcttcgagagtagagtatcattcccacggaaacccaagtatcatggttaatgccttgaagaataaataatgtagagttccccaagtgaaaacttcaattttacatttccatacattgtaaccaaactctataaataaagtgttgtgatacataccttaccaaaaaaggctatctatattgtaaaattcatcttctactcaataacttgtgcttctct

SEQ ID NO: 44304 - protein, 345 aa, Arabidopsis thaliana; identical to SEQ ID NO: 28593
  peptide (1)..(345): Ceres Seq. ID no. 13509794
  misc_feature (285)..(345): Homolog of NCBI NO: 25316328 NR Description: hypothetical protein F8A5.23 [imported] -
  misc_feature (10)..(246): Homolog of NCBI NO: 25316328 NR Description: hypothetical protein F8A5.23 [imported] -
  misc_feature (10)..(344): Homolog of NCBI NO: 25316214 NR Description: hypothetical protein F8A5.20 [imported] -
  misc_feature (1)..(344): Homolog of NCBI NO: 30696451 NR Description: aldo/keto reductase family [Arabidopsis thaliana]
  misc_feature (1)..(344): Homolog of NCBI NO: 30102704 NR Description: At1g60680 [Arabidopsis thaliana]
  misc_feature (1)..(345): Homolog of NCBI NO: 25316216 NR Description: hypothetical protein F8A5.24 [imported] -
  misc_feature (1)..(344): Homolog of NCBI NO: 15219786 NR Description: aldo/keto reductase family [Arabidopsis thaliana]
  misc_feature (1)..(345): Homolog of NCBI NO: 30696459 NR Description: aldo/keto reductase family [Arabidopsis thaliana]
  misc_feature (1)..(345): Homolog of NCBI NO: 6562980 NR Description: auxin-induced atb2 [Arabidopsis thaliana]
  misc_feature (1)..(345): Homolog of NCBI NO: 18406861 NR Description: aldo/keto reductase family [Arabidopsis thaliana]

SEQ ID NO: 44305 - protein, 336 aa, Arabidopsis thaliana; identical to SEQ ID NO: 28594
  peptide (1)..(336): Ceres Seq. ID no. 13509795
  misc_feature (276)..(336): Homolog of NCBI NO: 25316328 NR Description: hypothetical protein F8A5.23 [imported] -
  misc_feature (1)..(237): Homolog of NCBI NO: 25316328 NR Description: hypothetical protein F8A5.23 [imported] -
  misc_feature (1)..(335): Homolog of NCBI NO: 25316214 NR Description: hypothetical protein F8A5.20 [imported] -
  misc_feature (1)..(335): Homolog of NCBI NO: 30696451 NR Description: aldo/keto reductase family [Arabidopsis thaliana]
  misc_feature (1)..(335): Homolog of NCBI NO: 30102704 NR Description: At1g60680 [Arabidopsis thaliana]
  misc_feature (1)..(336): Homolog of NCBI NO: 25316216 NR Description: hypothetical protein F8A5.24 [imported] -
  misc_feature (1)..(335): Homolog of NCBI NO: 15219786 NR Description: aldo/keto reductase family [Arabidopsis thaliana]
  misc_feature (1)..(336): Homolog of NCBI NO: 30696459 NR Description: aldo/keto reductase family [Arabidopsis thaliana]
  misc_feature (1)..(336): Homolog of NCBI NO: 6562980 NR Description: auxin-induced atb2 [Arabidopsis thaliana]
  misc_feature (1)..(336): Homolog of NCBI NO: 18406861 NR Description: aldo/keto reductase family [Arabidopsis thaliana]

SEQ ID NO: 44306 - protein, 319 aa, Arabidopsis thaliana; identical to SEQ ID NO: 28595
  peptide (1)..(319): Ceres Seq. ID no. 13509796
  misc_feature (259)..(319): Homolog of NCBI NO: 25316328 NR Description: hypothetical protein F8A5.23 [imported] -
  misc_feature (1)..(220): Homolog of NCBI NO: 25316328 NR Description: hypothetical protein F8A5.23 [imported] -
  misc_feature (1)..(318): Homolog of NCBI NO: 25316214 NR Description: hypothetical protein F8A5.20 [imported] -
  misc_feature (1)..(318): Homolog of NCBI NO: 30696451 NR Description: aldo/keto reductase family [Arabidopsis thaliana]
  misc_feature (1)..(318): Homolog of NCBI NO: 30102704 NR Description: At1g60680 [Arabidopsis thaliana]
  misc_feature (1)..(319): Homolog of NCBI NO: 25316216 NR Description: hypothetical protein F8A5.24 [imported] -
  misc_feature (1)..(318): Homolog of NCBI NO: 15219786 NR Description: aldo/keto reductase family [Arabidopsis thaliana]
  misc_feature (1)..(319): Homolog of NCBI NO: 30696459 NR Description: aldo/keto reductase family [Arabidopsis thaliana]
  misc_feature (1)..(319): Homolog of NCBI NO: 6562980 NR Description: auxin-induced atb2 [Arabidopsis thaliana]
  misc_feature (1)..(319): Homolog of NCBI NO: 18406861 NR Description: aldo/keto reductase family [Arabidopsis thaliana]

SEQ ID NO: 44307 - DNA, 787 bp, Arabidopsis thaliana
  misc_feature (1)..(787): Ceres Seq. ID no. 12466093
  misc_feature: MA Experiment ID: 20000307 Result: Up-regulated in Transcription
  misc_feature: MA Experiment 20000307 PARAMETER Experiment Name: At_Germinating_Seeds_Sub_P Parameter: Age (hr) Value: 24 vs. 0
  misc_feature: MA Experiment 20000307 PARAMETER Experiment Name: At_Germinating_Seeds_Sub_P Parameter: Organism Value: A. thaliana
  misc_feature: MA Experiment 20000307 PARAMETER Experiment Name: At_Germinating_Seeds_Sub_P Parameter: Plant Line Value: WS
  misc_feature: MA Experiment 20000307 PARAMETER Experiment Name: At_Germinating_Seeds_Sub_P Parameter: Tissue Value: Germinating Seeds
  misc_feature: MA Experiment ID: 20000314 Result: Down-regulated in Transcription
  misc_feature: MA Experiment 20000314 PARAMETER Experiment Name: At_14day_Shoots-Roots_Sub_P Parameter: Age (day) Value: 14
  misc_feature: MA Experiment 20000314 PARAMETER Experiment Name: At_14day_Shoots-Roots_Sub_P Parameter: Organism Value: A. thaliana
  misc_feature: MA Experiment 20000314 PARAMETER Experiment Name: At_14day_Shoots-Roots_Sub_P Parameter: Plant Line Value: WS
  misc_feature: MA Experiment 20000314 PARAMETER Experiment Name: At_14day_Shoots-Roots_Sub_P Parameter: Tissue Value: Roots vs. Whole Plant
acacatccgacggggaaaaagagttccgacaagaatcgagaactgaaagatttgtcatttgtctctcaaatgtctgtggagagaagagaaattggaataaagaagacagtgttgtgagagagagagagagagagagagatgagttcgtctctacctctgaggctacttcttcctcttacaacttctctgatttctcctcctcctcctcctccagattctttccatgctccttcgtcgttcagatcgaaaaaccctaatttcaaacgccgattgtcttcttcttcctggttaaccaaaaatcatatatacacatcaggtgcatctggaactaatgctgcagtcatcagaggtgcattgagagcagagagaccagagctgcttacagtaattctaccccaaagtttgaaaaaacaacctcctgagagccaagaactattgtctaaagtacaaaacgtggtagaaaagccacataatgaccatttgccattgttagaagccagcaggttgtgtaatatggacatcatatcacaagttcaacaagtgatctgcttcgcgtttcatgacagtaagcttcttatggagacatgtcaagaagccaaaaatntgcgcaagattgtcactctcttctacctcgattgattcacattcactctttattttcttctcgttacaaaacagagaagataatcctccttgtaaattatgaatcttgattaaacaaacacacacaaccacaattatattcttttgtctaaattttgatacacatcagtgctatttttatagg

SEQ ID NO: 44308 - protein, 166 aa, Arabidopsis thaliana
  peptide (1)..(166): Ceres Seq. ID no. 12466094
  misc_feature (51)..(166): Homolog of NCBI NO: 17232156 NR Description: hypothetical protein [Nostoc sp. PCC 7120]
  misc_feature (1)..(166): Homolog of NCBI NO: 13812204 NR Description: hypothetical protein [Guillardia theta]
  misc_feature (45)..(166): Homolog of NCBI NO: 23043068 NR Description: hypothetical protein [Trichodesmium erythraeum
  misc_feature (51)..(166): Homolog of NCBI NO: 22298406 NR Description: ORF_ID:tlr0863~hypothetical protein
  misc_feature (45)..(142): Homolog of NCBI NO: 7486491 NR Description: hypothetical protein At2g43940 [imported] -
  misc_feature (45)..(166): Homolog of NCBI NO: 30689549 NR Description: predicted protein [Arabidopsis thaliana]
  misc_feature (1)..(49): Homolog of NCBI NO: 15232185 NR Description: putative protein
  misc_feature (45)..(166): Homolog of NCBI NO: 15232185 NR Description: putative protein
  misc_feature (1)..(49): Homolog of NCBI NO: 21537298 NR Description: unknown [Arabidopsis thaliana]
  misc_feature (45)..(166): Homolog of NCBI NO: 21537298 NR Description: unknown [Arabidopsis thaliana]
  misc_feature (156)..(156): Xaa is any aa, unknown or other
MSSSLPLRLLLPLTTSLISPPPPPPDSFHAPSSFRSKNPNFKRRLSSSSWLTKNHIYTSGASGTNAAVIRGALRAERPELLTVILPQSLKKQPPESQELLSKVQNVVEKPHNDHLPLLEASRLCNMDIISQVQQVICFAFHDSKLLMETCQEAKNXRKIVTLFYLD

SEQ ID NO: 44309 - protein, 84 aa, Arabidopsis thaliana
  peptide (1)..(84): Ceres Seq. ID no. 12466095
TSDGEKEFRQESRTERFVICLSNVCGEKRNWNKEDSVVRERERERDEFVSTSEATSSSYNFSDFSSSSSSRFFPCSFVVQIEKP

SEQ ID NO: 44310 - DNA, 1035 bp, Arabidopsis thaliana; identical to SEQ ID NO: 43907
  misc_feature (1)..(1035): Ceres Seq. ID no. 12488601
  misc_feature: MA Experiment ID: 20000166 Result: Up-regulated in Transcription
  misc_feature: MA Experiment 20000166 PARAMETER Experiment Name: At_100uM_ABA_P Parameter: Age (day) Value: 14
  misc_feature: MA Experiment 20000166 PARAMETER Experiment Name: At_100uM_ABA_P Parameter: Organism Value: A. thaliana
  misc_feature: MA Experiment 20000166 PARAMETER Experiment Name: At_100uM_ABA_P Parameter: Plant Line Value: WS
  misc_feature: MA Experiment 20000166 PARAMETER Experiment Name: At_100uM_ABA_P Parameter: Timepoint (hr) Value: 1
  misc_feature: MA Experiment 20000166 PARAMETER Experiment Name: At_100uM_ABA_P Parameter: Tissue Value: Aerial
  misc_feature: MA Experiment 20000166 PARAMETER Experiment Name: At_100uM_ABA_P Parameter: Treatment Value: 100uM ABA vs. No Treatment
  misc_feature: MA Experiment ID: 20000173 Result: Down-regulated in Transcription
  misc_feature: MA Experiment 20000173 PARAMETER Experiment Name: At_42deg_Heat_P Parameter: Age (day) Value: 14
  misc_feature: MA Experiment 20000173 PARAMETER Experiment Name: At_42deg_Heat_P Parameter: Organism Value: A. thaliana
  misc_feature: MA Experiment 20000173 PARAMETER Experiment Name: At_42deg_Heat_P Parameter: Plant Line Value: WS
  misc_feature: MA Experiment 20000173 PARAMETER Experiment Name: At_42deg_Heat_P Parameter: Temperature (deg C) Value: 42 vs. 22
  misc_feature: MA Experiment 20000173 PARAMETER Experiment Name: At_42deg_Heat_P Parameter: Timepoint (hr) Value: 6
  misc_feature: MA Experiment 20000173 PARAMETER Experiment Name: At_42deg_Heat_P Parameter: Tissue Value: Aerial
  misc_feature: MA Experiment ID: 20000179 Result: Up-regulated in Transcription
  misc_feature: MA Experiment 20000179 PARAMETER Experiment Name: At_Germinating_Seeds_P Parameter: Age (hr) Value: 6 vs. 0
  misc_feature: MA Experiment 20000179 PARAMETER Experiment Name: At_Germinating_Seeds_P Parameter: Tissue Value: Germinating Seeds
  misc_feature: MA Experiment ID: 20000180 Result: Up-regulated in Transcription
  misc_feature: MA Experiment 20000180 PARAMETER Experiment Name: At_Germinating_Seeds_P Parameter: Age (hr) Value: 24 vs. 0
  misc_feature: MA Experiment 20000180 PARAMETER Experiment Name: At_Germinating_Seeds_P Parameter: Tissue Value: Germinating Seeds
  misc_feature: MA Experiment ID: 20000436 Result: Up-regulated in Transcription
  misc_feature: MA Experiment 20000436 PARAMETER Experiment Name: At_Drought_P Parameter: Age (day) Value: 7
  misc_feature: MA Experiment 20000436 PARAMETER Experiment Name: At_Drought_P Parameter: Organism Value: A. thaliana
  misc_feature: MA Experiment 20000436 PARAMETER Experiment Name: At_Drought_P Parameter: Plant Line Value: WS
  misc_feature: MA Experiment 20000436 PARAMETER Experiment Name: At_Drought_P Parameter: Timepoint (hr) Value: 12
  misc_feature: MA Experiment 20000436 PARAMETER Experiment Name: At_Drought_P Parameter: Tissue Value: Whole Plant
  misc_feature: MA Experiment 20000436 PARAMETER Experiment Name: At_Drought_P Parameter: Treatment Value: Drought vs. No Drought
  misc_feature: MA Experiment ID: 20000453 Result: Up-regulated in Transcription
  misc_feature: MA Experiment 20000453 PARAMETER Experiment Name: At_100uM_ABA_P Parameter: Age (day) Value: 15
  misc_feature: MA Experiment 20000453 PARAMETER Experiment Name: At_100uM_ABA_P Parameter: Organism Value: A. thaliana
  misc_feature: MA Experiment 20000453 PARAMETER Experiment Name: At_100uM_ABA_P Parameter: Plant Line Value: WS
  misc_feature: MA Experiment 20000453 PARAMETER Experiment Name: At_100uM_ABA_P Parameter: Timepoint (hr) Value: 24
  misc_feature: MA Experiment 20000453 PARAMETER Experiment Name: At_100uM_ABA_P Parameter: Tissue Value: Aerial
  misc_feature: MA Experiment 20000453 PARAMETER Experiment Name: At_100uM_ABA_P Parameter: Treatment Value: 100uM ABA vs. No Treatment
  misc_feature: MA Experiment ID: 20000495 Result: Down-regulated in Transcription
  misc_feature: MA Experiment 20000495 PARAMETER Experiment Name: At_Guard_Cells_P Parameter: Harvest Date Value: 8/2/2002
  misc_feature: MA Experiment 20000495 PARAMETER Experiment Name: At_Guard_Cells_P Parameter: Organism Value: A. thaliana
  misc_feature: MA Experiment 20000495 PARAMETER Experiment Name: At_Guard_Cells_P Parameter: Tissue Value: Guard Cells vs. Leaves
  misc_feature: MA Experiment ID: 20000573 Result: Down-regulated in Transcription
  misc_feature: MA Experiment 20000573 PARAMETER Experiment Name: At_100uM_ABA_Mutants__P Parameter: Organism Value: A. thaliana
  misc_feature: MA Experiment 20000573 PARAMETER Experiment Name: At_100uM_ABA_Mutants__P Parameter: Plant Line Value: CS22 vs. Ler wt
  misc_feature: MA Experiment 20000573 PARAMETER Experiment Name: At_100uM_ABA_Mutants__P Parameter: Timepoint (hr) Value: N/A
  misc_feature: MA Experiment 20000573 PARAMETER Experiment Name: At_100uM_ABA_Mutants__P Parameter: Tissue Value: Whole Plant
  misc_feature: MA Experiment 20000573 PARAMETER Experiment Name: At_100uM_ABA_Mutants__P Parameter: Treatment Value: None
  misc_feature: MA Experiment ID: 20000574 Result: Down-regulated in Transcription
  misc_feature: MA Experiment 20000574 PARAMETER Experiment Name: At_100uM_ABA_Mutants__P Parameter: Organism Value: A. thaliana
  misc_feature: MA Experiment 20000574 PARAMETER Experiment Name: At_100uM_ABA_Mutants__P Parameter: Plant Line Value: CS23 vs. Ler wt
  misc_feature: MA Experiment 20000574 PARAMETER Experiment Name: At_100uM_ABA_Mutants__P Parameter: Timepoint (hr) Value: N/A
  misc_feature: MA Experiment 20000574 PARAMETER Experiment Name: At_100uM_ABA_Mutants__P Parameter: Tissue Value: Whole Plant
  misc_feature: MA Experiment 20000574 PARAMETER Experiment Name: At_100uM_ABA_Mutants__P Parameter: Treatment Value: None
  misc_feature: MA Experiment ID: 20001248 Result: Down-regulated in Transcription
  misc_feature: MA Experiment 20001248 PARAMETER Experiment Name: At_Far-red-induction_P Parameter: Age (day) Value: 7
  misc_feature: MA Experiment 20001248 PARAMETER Experiment Name: At_Far-red-induction_P Parameter: Light Value: Far-red vs. White
  misc_feature: MA Experiment 20001248 PARAMETER Experiment Name: At_Far-red-induction_P Parameter: Organism Value: A. thaliana
  misc_feature: MA Experiment 20001248 PARAMETER Experiment Name: At_Far-red-induction_P Parameter: Plant Line Value: Columbia
  misc_feature: MA Experiment 20001248 PARAMETER Experiment Name: At_Far-red-induction_P Parameter: Timepoint (hr) Value: 4
  misc_feature: MA Experiment 20001248 PARAMETER Experiment Name: At_Far-red-induction_P Parameter: Tissue Value: Whole Plant
  misc_feature: MA Experiment ID: 20001451 Result: Down-regulated in Transcription
  misc_feature: MA Experiment 20001451 PARAMETER Experiment Name: At_Far-red-induction_P Parameter: Age (day) Value: 7
  misc_feature: MA Experiment 20001451 PARAMETER Experiment Name: At_Far-red-induction_P Parameter: Light Value: Far-red vs. White
  misc_feature: MA Experiment 20001451 PARAMETER Experiment Name: At_Far-red-induction_P Parameter: Organism Value: A. thaliana
  misc_feature: MA Experiment 20001451 PARAMETER Experiment Name: At_Far-red-induction_P Parameter: Plant Line Value: Columbia
  misc_feature: MA Experiment 20001451 PARAMETER Experiment Name: At_Far-red-induction_P Parameter: Timepoint (hr) Value: 24
  misc_feature: MA Experiment 20001451 PARAMETER Experiment Name: At_Far-red-induction_P Parameter: Tissue Value: Whole Plant

SEQ ID NO: 44311 - protein, 270 aa, Arabidopsis thaliana; identical to SEQ ID NO: 43908
  peptide (1)..(270): Ceres Seq. ID no. 12488602
  misc_feature (44)..(262): Pfam Name: alpha/beta hydrolase fold Pfam Description: alpha/beta hydrolase fold
  misc_feature (44)..(262): Pfam Name: alpha/beta hydrolase fold Pfam Description: alpha/beta hydrolase fold
  misc_feature (4)..(260): Homolog of NCBI NO: 29827464 NR Description: putative hydrolase [Streptomyces avermitilis
  misc_feature (10)..(264): Homolog of NCBI NO: 22298700 NR Description: ORF_ID:tlr1157~hypothetical protein
  misc_feature (4)..(253): Homolog of NCBI NO: 22987307 NR Description: hypothetical protein [Burkholderia fungorum]
  misc_feature (7)..(262): Homolog of NCBI NO: 15230110 NR Description: unknown protein; protein id: At3g24420.1
  misc_feature (8)..(260): Homolog of NCBI NO: 24216360 NR Description: Predicted hydrolases or acyltransferases,
  misc_feature (4)..(260): Homolog of NCBI NO: 29827464 NR Description: putative hydrolase [Streptomyces avermitilis
  misc_feature (4)..(253): Homolog of NCBI NO: 22987307 NR Description: hypothetical protein [Burkholderia fungorum]
  misc_feature (8)..(260): Homolog of NCBI NO: 24216360 NR Description: Predicted hydrolases or acyltransferases,
  misc_feature (1)..(270): Homolog of NCBI NO: 15235567 NR Description: putative protein
  misc_feature (124)..(270): Homolog of NCBI NO: 40736991 NR Description: putative hydrolases [Oryza sativa (japonica
  misc_feature (1)..(125): Homolog of NCBI NO: 40736991 NR Description: putative hydrolases [Oryza sativa (japonica
  misc_feature (6)..(262): Homolog of NCBI NO: 21593927 NR Description: unknown [Arabidopsis thaliana]
  misc_feature (6)..(262): Homolog of NCBI NO: 18396732 NR Description: expressed protein
  misc_feature (7)..(262): Homolog of NCBI NO: 15230110 NR Description: unknown protein; protein id: At3g24420.1
  misc_feature (10)..(264): Homolog of NCBI NO: 22298700 NR Description: ORF_ID:tlr1157~hypothetical protein
  misc_feature (6)..(262): Homolog of NCBI NO: 18396732 NR Description: expressed protein
  misc_feature (6)..(262): Homolog of NCBI NO: 21593927 NR Description: unknown [Arabidopsis thaliana]
  misc_feature (1)..(125): Homolog of NCBI NO: 40736991 NR Description: putative hydrolases [Oryza sativa (japonica
  misc_feature (124)..(270): Homolog of NCBI NO: 40736991 NR Description: putative hydrolases [Oryza sativa (japonica
  misc_feature (1)..(270): Homolog of NCBI NO: 15235567 NR Description: putative protein

SEQ ID NO: 44312 - protein, 219 aa, Arabidopsis thaliana; identical to SEQ ID NO: 43909
  peptide (1)..(219): Ceres Seq. ID no. 12488603
  misc_feature (1)..(211): Pfam Name: alpha/beta hydrolase fold Pfam Description: alpha/beta hydrolase fold
  misc_feature (1)..(211): Pfam Name: alpha/beta hydrolase fold Pfam Description: alpha/beta hydrolase fold
  misc_feature (1)..(209): Homolog of NCBI NO: 29827464 NR Description: putative hydrolase [Streptomyces avermitilis
  misc_feature (1)..(213): Homolog of NCBI NO: 22298700 NR Description: ORF_ID:tlr1157~hypothetical protein
  misc_feature (1)..(202): Homolog of NCBI NO: 22987307 NR Description: hypothetical protein [Burkholderia fungorum]
  misc_feature (1)..(211): Homolog of NCBI NO: 15230110 NR Description: unknown protein; protein id: At3g24420.1
  misc_feature (1)..(209): Homolog of NCBI NO: 24216360 NR Description: Predicted hydrolases or acyltransferases,
  misc_feature (1)..(209): Homolog of NCBI NO: 29827464 NR Description: putative hydrolase [Streptomyces avermitilis
  misc_feature (1)..(202): Homolog of NCBI NO: 22987307 NR Description: hypothetical protein [Burkholderia fungorum]
  misc_feature (1)..(209): Homolog of NCBI NO: 24216360 NR Description: Predicted hydrolases or acyltransferases,
  misc_feature (1)..(219): Homolog of NCBI NO: 15235567 NR Description: putative protein
  misc_feature (73)..(219): Homolog of NCBI NO: 40736991 NR Description: putative hydrolases [Oryza sativa (japonica
  misc_feature (1)..(74): Homolog of NCBI NO: 40736991 NR Description: putative hydrolases [Oryza sativa (japonica
  misc_feature (1)..(211): Homolog of NCBI NO: 21593927 NR Description: unknown [Arabidopsis thaliana]
  misc_feature (1)..(211): Homolog of NCBI NO: 18396732 NR Description: expressed protein
  misc_feature (1)..(211): Homolog of NCBI NO: 15230110 NR Description: unknown protein; protein id: At3g24420.1
  misc_feature (1)..(213): Homolog of NCBI NO: 22298700 NR Description: ORF_ID:tlr1157~hypothetical protein
  misc_feature (1)..(211): Homolog of NCBI NO: 18396732 NR Description: expressed protein
  misc_feature (1)..(211): Homolog of NCBI NO: 21593927 NR Description: unknown [Arabidopsis thaliana]
  misc_feature (1)..(74): Homolog of NCBI NO: 40736991 NR Description: putative hydrolases [Oryza sativa (japonica
  misc_feature (73)..(219): Homolog of NCBI NO: 40736991 NR Description: putative hydrolases [Oryza sativa (japonica
  misc_feature (1)..(219): Homolog of NCBI NO: 15235567 NR Description: putative protein

SEQ ID NO: 44313 - protein, 172 aa, Arabidopsis thaliana; identical to SEQ ID NO: 43910
  peptide (1)..(172): Ceres Seq. ID no. 12488604
  misc_feature (1)..(164): Pfam Name: alpha/beta hydrolase fold Pfam Description: alpha/beta hydrolase fold
  misc_feature (1)..(164): Pfam Name: alpha/beta hydrolase fold Pfam Description: alpha/beta hydrolase fold
  misc_feature (1)..(162): Homolog of NCBI NO: 29827464 NR Description: putative hydrolase [Streptomyces avermitilis
  misc_feature (1)..(166): Homolog of NCBI NO: 22298700 NR Description: ORF_ID:tlr1157~hypothetical protein
  misc_feature (1)..(155): Homolog of NCBI NO: 22987307 NR Description: hypothetical protein [Burkholderia fungorum]
  misc_feature (1)..(164): Homolog of NCBI NO: 15230110 NR Description: unknown protein; protein id: At3g24420.1
  misc_feature (1)..(162): Homolog of NCBI NO: 24216360 NR Description: Predicted hydrolases or acyltransferases,
  misc_feature (1)..(162): Homolog of NCBI NO: 29827464 NR Description: putative hydrolase [Streptomyces avermitilis
  misc_feature (1)..(155): Homolog of NCBI NO: 22987307 NR Description: hypothetical protein [Burkholderia fungorum]
  misc_feature (1)..(162): Homolog of NCBI NO: 24216360 NR Description: Predicted hydrolases or acyltransferases,
  misc_feature (1)..(172): Homolog of NCBI NO: 15235567 NR Description: putative protein
  misc_feature (26)..(172): Homolog of NCBI NO: 40736991 NR Description: putative hydrolases [Oryza sativa (japonica
  misc_feature (1)..(27): Homolog of NCBI NO: 40736991 NR Description: putative hydrolases [Oryza sativa (japonica
  misc_feature (1)..(164): Homolog of NCBI NO: 21593927 NR Description: unknown [Arabidopsis thaliana]
  misc_feature (1)..(164): Homolog of NCBI NO: 18396732 NR Description: expressed protein
  misc_feature (1)..(164): Homolog of NCBI NO: 15230110 NR Description: unknown protein; protein id: At3g24420.1
  misc_feature (1)..(166): Homolog of NCBI NO: 22298700 NR Description: ORF_ID:tlr1157~hypothetical protein
  misc_feature (1)..(164): Homolog of NCBI NO: 18396732 NR Description: expressed protein
  misc_feature (1)..(164): Homolog of NCBI NO: 21593927 NR Description: unknown [Arabidopsis thaliana]
  misc_feature (1)..(27): Homolog of NCBI NO: 40736991 NR Description: putative hydrolases [Oryza sativa (japonica
  misc_feature (26)..(172): Homolog of NCBI NO: 40736991 NR Description: putative hydrolases [Oryza sativa (japonica
  misc_feature (1)..(172): Homolog of NCBI NO: 15235567 NR Description: putative protein

SEQ ID NO: 44314 - DNA, 3250 bp, Arabidopsis thaliana
  misc_feature (1)..(3250): Ceres Seq. ID no. 13509447
  misc_feature: MA Experiment ID: 20000355 Result: Up-regulated in Transcription
  misc_feature: MA Experiment 20000355 PARAMETER Experiment Name: At_Siliques_Sub_P Parameter: Age (day) Value: 21
  misc_feature: MA Experiment 20000355 PARAMETER Experiment Name: At_Siliques_Sub_P Parameter: Organism Value: A. thaliana
  misc_feature: MA Experiment 20000355 PARAMETER Experiment Name: At_Siliques_Sub_P Parameter: Plant Line Value: WS
  misc_feature: MA Experiment 20000355 PARAMETER Experiment Name: At_Siliques_Sub_P Parameter: Tissue Value: Less Than 5mm Siliques vs. Whole Plant
  misc_feature: MA Experiment ID: 20000440 Result: Up-regulated in Transcription
  misc_feature: MA Experiment 20000440 PARAMETER Experiment Name: At_Closed-Flower__Sub_P Parameter: Tissue Value: Closed Flower vs. Whole Plant
aaaacaaaaattacacaaaaatcaaaacttttactttttatttctcctctctggatcttcctcttcaaagctcaaggccattagggtttatctgagctccaaaatcaccctaattctagtgtatttctcagcaagcaagcttcttctttttttgtcctgggtaactgtgattgttgcaggatcttgtgtagaaacagatcacaagaagatgaatgataactcggtggtgcggctttgattatcttcagagattttagattctgtatccactctgttgcgatggggtcgtttgcaggcgcttgtgagattgtggaagagaaggatgatgaagtaagattgccaaaacattccgggagatatggtaaatcggttatgggatcatcaagtaaggatttggtggagcgtaagcaacgagagtatcatggttctcttgagtatgacattgatatgctttttcagtctatttctgttaaaccatctactacgaggttgatgagttcttctttccatcatcatgagacgagcgcgagtgccggtccaagcaggaccacaagcccttcgaagagaattgcgtccatgaaaaaaccagggacacctcagtctcctagatttgttggtctctctgattcagtttctttgaagcaggctcttagggatcgttgcatttctaaggcgtcggaaatggctgctcagaaacggttgtcgaaatctgctgctgcatctccgagggtctcagaagctgacaggataaagagtttgtataaccaagtttcgaatgaatctactagcagcaggtctgggcttgttcctgtggacaagggtaaaggaagtttggttgagatacctttgatgcctgtaaacgataaaccaagctcttcaaagagcgtacctcaacggtttgaagatccttctaaccccatttctgagccatctcaagctggaaccagttttggattacaaggagtggggaatcaaacgcgggagattaagctgttgcatagatccaacaaacctgggtcttgtcttagttctggcagtggagattatgagatagagttagatgaaaatgttgcgtctccttccactcatgcatttgttgaagatgatgtgatagaaatagacaaacacgttacttcactgccatctcactctagcaagaaagtcaatgcgacggagcttgacaagaatatttcctcatctgctgtagactcagagcagaaagggaagttggatgatgcacctaattcagggacagagaatggcaaaacagtacggaaggtaacaagaatgattccacgtcccaaacaaccgaaaaagaaaattttgcttaagaagaagttaaaaatcggggttgtgtcagcaacttacccaacaaaagacgatgaagaaattgttccttccttggactctagtgccaatcaacttctctgccagagatgtcactgttcgttgaagagcaccagcatcgatgacaacccaccttcatatacttctagtcataatcctaagatttgcacagatagtttgagctctgtttcaaataaagaagctcatcaaggatctgacgagaactcctctggctcgtgtaatgtcagtcaaagctctgaagctgacattgtcataatgaaacaagatgtttcctctagcaataatagtggaatcggtgcaatggtagaaaaagaaaccgagaatccgacttccagtgagaaattcgagttctctctgagttcaaaagatagtcttggggattatagcaggagcacaagcattagtgaggagagtaatctgagccgatttagctgtgggaataagcctcacatgtcgatggatgtgagatgggaagcgattaagcatatcaaggttcaatacggctctttgggtttacgacacttcaaccttctgaagaaacttggttgtggagatataggaacagtctatctcgccgagctgattggtacaaactgtttgtttgccataaaggttatggacaacgagttcttggcgagaaggaaaaagtctccccgggcacaagcagaaagagaaatacttaaaatgttggaccatccttttcttcctacattatacgcgcaatttacttcggataatttatcttgtctagtcatggaatattgtcctggaggagatcttcatgtcctcagacagaagcagctaggccggtgtttccctgaacctgcagcaagattctatgtggccgaaattctccttgcactggagtacttacacatgcttggtatcatataccgagatctgaaaccggaaaacattcttgtccgtgaagatggacacattatgcttacggattttgacctctcactccgttgtgcagtgaacccgactcttgtcaggtcaaactctccacctggtaaagatcccgcaaggatttcaggtccatacaacacatccaactgcatacaaccattctgtatcaccgaaccatcttgccaggtttcgtgtttcagccctaggctctcctcaaaccaacaacaaggtagaaaaccaaaaaggggtgatcatctttcgaaaacccaacaacacttgagtagatcattgcctcagctcgtggctgaaccaaccgaagcaagatccaattcctttgtgggaacacacgagtacctagccccagagatcatcaaaggagaaggacatggcgctgcagttgactggtggactttcggggttctcctttacgagcttttatacgggaaaacaccattcaaaggttacaacaacgacgagactttggccaatgttgtgttacagaacctcaagtttcctgatagcccgcttgtaagcttccaggcaaaagacttgatcaggggacttcttgttaaggaaccagagaacaggctcgggtcagagaaaggttctgtagagatcaaaagacatcctttttttgaaggattgaattgggctctgatccggtgtgcaatcccgcctgagctaccggatttctatgagtatggtggtggaccagaggcagcggcggattcgcctggaggcagtaataataggtatcttgaatgtaaagccataggcgatcatcttgagttcgagttgttttaagcaagacatagatattctctggtataagcattcagagtaatcgttgttgtaagttattatatctaagttaaatctaaatgtcttatatgtaaatttagcgttctctgagacataatctcatatagtattctcaaaaatatatatgctccttcgtatctcaattttt

SEQ ID NO: 44315 - protein, 934 aa, Arabidopsis thaliana
  peptide (1)..(934): Ceres Seq. ID no. 13509448
  misc_feature (538)..(879): Pfam Name: Protein kinase domain Pfam Description: Protein kinase domain
  misc_feature (538)..(879): Pfam Name: Protein kinase domain Pfam Description: Protein kinase domain
  misc_feature (748)..(896): Homolog of NCBI NO: 15242814 NR Description: putative blue light receptor [Chlamydomonas
  misc_feature (452)..(685): Homolog of NCBI NO: 15242814 NR Description: putative blue light receptor [Chlamydomonas
  misc_feature (748)..(896): Homolog of NCBI NO: 15227639 NR Description: putative blue light receptor [Chlamydomonas
  misc_feature (452)..(685): Homolog of NCBI NO: 15227639 NR Description: putative blue light receptor [Chlamydomonas
  misc_feature (769)..(888): Homolog of NCBI NO: 7716430 NR Description: PHY3 protein - maidenhair fern
  misc_feature (748)..(896): Homolog of NCBI NO: 15242814 NR Description: putative blue light receptor [Chlamydomonas
  misc_feature (748)..(896): Homolog of NCBI NO: 15227639 NR Description: putative blue light receptor [Chlamydomonas
  misc_feature (769)..(888): Homolog of NCBI NO: 7716430 NR Description: PHY3 protein - maidenhair fern
  misc_feature (301)..(751): Homolog of NCBI NO: 38347607 NR Description: OSJNBa0042I15.20 [Oryza sativa (japonica
  misc_feature (60)..(200): Homolog of NCBI NO: 38347607 NR Description: OSJNBa0042I15.20 [Oryza sativa (japonica
  misc_feature (512)..(695): Homolog of NCBI NO: 30693719 NR Description: PHY3 [Adiantum capillus-veneris]
  misc_feature (769)..(888): Homolog of NCBI NO: 30693719 NR Description: PHY3 [Adiantum capillus-veneris]
  misc_feature (512)..(695): Homolog of NCBI NO: 7716430 NR Description: PHY3 protein - maidenhair fern
  misc_feature (452)..(685): Homolog of NCBI NO: 15227639 NR Description: putative blue light receptor [Chlamydomonas
  misc_feature (452)..(685): Homolog of NCBI NO: 15242814 NR Description: putative blue light receptor [Chlamydomonas
  misc_feature (512)..(695): Homolog of NCBI NO: 7716430 NR Description: PHY3 protein - maidenhair fern
  misc_feature (769)..(888): Homolog of NCBI NO: 30693719 NR Description: PHY3 [Adiantum capillus-veneris]
  misc_feature (512)..(695): Homolog of NCBI NO: 30693719 NR Description: PHY3 [Adiantum capillus-veneris]
  misc_feature (60)..(200): Homolog of NCBI NO: 38347607 NR Description: OSJNBa0042I15.20 [Oryza sativa (japonica
  misc_feature (301)..(751): Homolog of NCBI NO: 38347607 NR Description: OSJNBa0042I15.20 [Oryza sativa (japonica
MGSFAGACEIVEEKDDEVRLPKHSGRYGKSVMGSSSKDLVERKQREYHGSLEYDIDMLFQSISVKPSTTRLMSSSFHHHETSASAGPSRTTSPSKRIASMKKPGTPQSPRFVGLSDSVSLKQALRDRCISKASEMAAQKRLSKSAAASPRVSEADRIKSLYNQVSNESTSSRSGLVPVDKGKGSLVEIPLMPVNDKPSSSKSVPQRFEDPSNPISEPSQAGTSFGLQGVGNQTREIKLLHRSNKPGSCLSSGSGDYEIELDENVASPSTHAFVEDDVIEIDKHVTSLPSHSSKKVNATELDKNISSSAVDSEQKGKLDDAPNSGTENGKTVRKVTRMIPRPKQPKKKILLKKKLKIGVVSATYPTKDDEEIVPSLDSSANQLLCQRCHCSLKSTSIDDNPPSYTSSHNPKICTDSLSSVSNKEAHQGSDENSSGSCNVSQSSEADIVIMKQDVSSSNNSGIGAMVEKETENPTSSEKFEFSLSSKDSLGDYSRSTSISEESNLSRFSCGNKPHMSMDVRWEAIKHIKVQYGSLGLRHFNLLKKLGCGDIGTVYLAELIGTNCLFAIKVMDNEFLARRKKSPRAQAEREILKMLDHPFLPTLYAQFTSDNLSCLVMEYCPGGDLHVLRQKQLGRCFPEPAARFYVAEILLALEYLHMLGIIYRDLKPENILVREDGHIMLTDFDLSLRCAVNPTLVRSNSPPGKDPARISGPYNTSNCIQPFCITEPSCQVSCFSPRLSSNQQQGRKPKRGDHLSKTQQHLSRSLPQLVAEPTEARSNSFVGTHEYLAPEIIKGEGHGAAVDWWTFGVLLYELLYGKTPFKGYNNDETLANVVLQNLKFPDSPLVSFQAKDLIRGLLVKEPENRLGSEKGSVEIKRHPFFEGLNWALIRCAIPPELPDFYEYGGGPEAAADSPGGSNNRYLECKAIGDHLEFELF

SEQ ID NO: 44316 - protein, 903 aa, Arabidopsis thaliana
  peptide (1)..(903): Ceres Seq. ID no. 13509449
  misc_feature (507)..(848): Pfam Name: Protein kinase domain Pfam Description: Protein kinase domain
  misc_feature (507)..(848): Pfam Name: Protein kinase domain Pfam Description: Protein kinase domain
  misc_feature (717)..(865): Homolog of NCBI NO: 15242814 NR Description: putative blue light receptor [Chlamydomonas
  misc_feature (421)..(654): Homolog of NCBI NO: 15242814 NR Description: putative blue light receptor [Chlamydomonas
  misc_feature (717)..(865): Homolog of NCBI NO: 15227639 NR Description: putative blue light receptor [Chlamydomonas
  misc_feature (421)..(654): Homolog of NCBI NO: 15227639 NR Description: putative blue light receptor [Chlamydomonas
  misc_feature (738)..(857): Homolog of NCBI NO: 7716430 NR Description: PHY3 protein - maidenhair fern
  misc_feature (717)..(865): Homolog of NCBI NO: 15242814 NR Description: putative blue light receptor [Chlamydomonas
  misc_feature (717)..(865): Homolog of NCBI NO: 15227639 NR Description: putative blue light receptor [Chlamydomonas
  misc_feature (738)..(857): Homolog of NCBI NO: 7716430 NR Description: PHY3 protein - maidenhair fern
  misc_feature (270)..(720): Homolog of NCBI NO: 38347607 NR Description: OSJNBa0042I15.20 [Oryza sativa (japonica
  misc_feature (29)..(169): Homolog of NCBI NO: 38347607 NR Description: OSJNBa0042I15.20 [Oryza sativa (japonica
  misc_feature (481)..(664): Homolog of NCBI NO: 30693719 NR Description: PHY3 [Adiantum capillus-veneris]
  misc_feature (738)..(857): Homolog of NCBI NO: 30693719 NR Description: PHY3 [Adiantum capillus-veneris]
  misc_feature (481)..(664): Homolog of NCBI NO: 7716430 NR Description: PHY3 protein - maidenhair fern
  misc_feature (421)..(654): Homolog of NCBI NO: 15227639 NR Description: putative blue light receptor [Chlamydomonas
  misc_feature (421)..(654): Homolog of NCBI NO: 15242814 NR Description: putative blue light receptor [Chlamydomonas
  misc_feature (481)..(664): Homolog of NCBI NO: 7716430 NR Description: PHY3 protein - maidenhair fern
  misc_feature (738)..(857): Homolog of NCBI NO: 30693719 NR Description: PHY3 [Adiantum capillus-veneris]
  misc_feature (481)..(664): Homolog of NCBI NO: 30693719 NR Description: PHY3 [Adiantum capillus-veneris]
  misc_feature (29)..(169): Homolog of NCBI NO: 38347607 NR Description: OSJNBa0042I15.20 [Oryza sativa (japonica
  misc_feature (270)..(720): Homolog of NCBI NO: 38347607 NR Description: OSJNBa0042I15.20 [Oryza sativa (japonica
MGSSSKDLVERKQREYHGSLEYDIDMLFQSISVKPSTTRLMSSSFHHHETSASAGPSRTTSPSKRIASMKKPGTPQSPRFVGLSDSVSLKQALRDRCISKASEMAAQKRLSKSAAASPRVSEADRIKSLYNQVSNESTSSRSGLVPVDKGKGSLVEIPLMPVNDKPSSSKSVPQRFEDPSNPISEPSQAGTSFGLQGVGNQTREIKLLHRSNKPGSCLSSGSGDYEIELDENVASPSTHAFVEDDVIEIDKHVTSLPSHSSKKVNATELDKNISSSAVDSEQKGKLDDAPNSGTENGKTVRKVTRMIPRPKQPKKKILLKKKLKIGVVSATYPTKDDEEIVPSLDSSANQLLCQRCHCSLKSTSIDDNPPSYTSSHNPKICTDSLSSVSNKEAHQGSDENSSGSCNVSQSSEADIVIMKQDVSSSNNSGIGAMVEKETENPTSSEKFEFSLSSKDSLGDYSRSTSISEESNLSRFSCGNKPHMSMDVRWEAIKHIKVQYGSLGLRHFNLLKKLGCGDIGTVYLAELIGTNCLFAIKVMDNEFLARRKKSPRAQAEREILKMLDHPFLPTLYAQFTSDNLSCLVMEYCPGGDLHVLRQKQLGRCFPEPAARFYVAEILLALEYLHMLGIIYRDLKPENILVREDGHIMLTDFDLSLRCAVNPTLVRSNSPPGKDPARISGPYNTSNCIQPFCITEPSCQVSCFSPRLSSNQQQGRKPKRGDHLSKTQQHLSRSLPQLVAEPTEARSNSFVGTHEYLAPEIIKGEGHGAAVDWWTFGVLLYELLYGKTPFKGYNNDETLANVVLQNLKFPDSPLVSFQAKDLIRGLLVKEPENRLGSEKGSVEIKRHPFFEGLNWALIRCAIPPELPDFYEYGGGPEAAADSPGGSNNRYLECKAIGDHLEFELF

SEQ ID NO: 44317 - protein, 878 aa, Arabidopsis thaliana
  peptide (1)..(878): Ceres Seq. ID no. 13509450
  misc_feature (482)..(823): Pfam Name: Protein kinase domain Pfam Description: Protein kinase domain
  misc_feature (482)..(823): Pfam Name: Protein kinase domain Pfam Description: Protein kinase domain
  misc_feature (692)..(840): Homolog of NCBI NO: 15242814 NR Description: putative blue light receptor [Chlamydomonas
  misc_feature (396)..(629): Homolog of NCBI NO: 15242814 NR Description: putative blue light receptor [Chlamydomonas
  misc_feature (692)..(840): Homolog of NCBI NO: 15227639 NR Description: putative blue light receptor [Chlamydomonas
  misc_feature (396)..(629): Homolog of NCBI NO: 15227639 NR Description: putative blue light receptor [Chlamydomonas
  misc_feature (713)..(832): Homolog of NCBI NO: 7716430 NR Description: PHY3 protein - maidenhair fern
  misc_feature (692)..(840): Homolog of NCBI NO: 15242814 NR Description: putative blue light receptor [Chlamydomonas
  misc_feature (692)..(840): Homolog of NCBI NO: 15227639 NR Description: putative blue light receptor [Chlamydomonas
  misc_feature (713)..(832): Homolog of NCBI NO: 7716430 NR Description: PHY3 protein - maidenhair fern
  misc_feature (245)..(695): Homolog of NCBI NO: 38347607 NR Description: OSJNBa0042I15.20 [Oryza sativa (japonica
  misc_feature (4)..(144): Homolog of NCBI NO: 38347607 NR Description: OSJNBa0042I15.20 [Oryza sativa (japonica
  misc_feature (456)..(639): Homolog of NCBI NO: 30693719 NR Description: PHY3 [Adiantum capillus-veneris]
  misc_feature (713)..(832): Homolog of NCBI NO: 30693719 NR Description: PHY3 [Adiantum capillus-veneris]
  misc_feature (456)..(639): Homolog of NCBI NO: 7716430 NR Description: PHY3 protein - maidenhair fern
  misc_feature (396)..(629): Homolog of NCBI NO: 15227639 NR Description: putative blue light receptor [Chlamydomonas
  misc_feature (396)..(629): Homolog of NCBI NO: 15242814 NR Description: putative blue light receptor [Chlamydomonas
  misc_feature (456)..(639): Homolog of NCBI NO: 7716430 NR Description: PHY3 protein - maidenhair fern
  misc_feature (713)..(832): Homolog of NCBI NO: 30693719 NR Description: PHY3 [Adiantum capillus-veneris]
  misc_feature (456)..(639): Homolog of NCBI NO: 30693719 NR Description: PHY3 [Adiantum capillus-veneris]
  misc_feature (4)..(144): Homolog of NCBI NO: 38347607 NR Description: OSJNBa0042I15.20 [Oryza sativa (japonica
  misc_feature (245)..(695): Homolog of NCBI NO: 38347607 NR Description: OSJNBa0042I15.20 [Oryza sativa (japonica
MLFQSISVKPSTTRLMSSSFHHHETSASAGPSRTTSPSKRIASMKKPGTPQSPRFVGLSDSVSLKQALRDRCISKASEMAAQKRLSKSAAASPRVSEADRIKSLYNQVSNESTSSRSGLVPVDKGKGSLVEIPLMPVNDKPSSSKSVPQRFEDPSNPISEPSQAGTSFGLQGVGNQTREIKLLHRSNKPGSCLSSGSGDYEIELDENVASPSTHAFVEDDVIEIDKHVTSLPSHSSKKVNATELDKNISSSAVDSEQKGKLDDAPNSGTENGKTVRKVTRMIPRPKQPKKKILLKKKLKIGVVSATYPTKDDEEIVPSLDSSANQLLCQRCHCSLKSTSIDDNPPSYTSSHNPKICTDSLSSVSNKEAHQGSDENSSGSCNVSQSSEADIVIMKQDVSSSNNSGIGAMVEKETENPTSSEKFEFSLSSKDSLGDYSRSTSISEESNLSRFSCGNKPHMSMDVRWEAIKHIKVQYGSLGLRHFNLLKKLGCGDIGTVYLAELIGTNCLFAIKVMDNEFLARRKKSPRAQAEREILKMLDHPFLPTLYAQFTSDNLSCLVMEYCPGGDLHVLRQKQLGRCFPEPAARFYVAEILLALEYLHMLGIIYRDLKPENILVREDGHIMLTDFDLSLRCAVNPTLVRSNSPPGKDPARISGPYNTSNCIQPFCITEPSCQVSCFSPRLSSNQQQGRKPKRGDHLSKTQQHLSRSLPQLVAEPTEARSNSFVGTHEYLAPEIIKGEGHGAAVDWWTFGVLLYELLYGKTPFKGYNNDETLANVVLQNLKFPDSPLVSFQAKDLIRGLLVKEPENRLGSEKGSVEIKRHPFFEGLNWALIRCAIPPELPDFYEYGGGPEAAADSPGGSNNRYLECKAIGDHLEFELF
